United States Patent Application Publication US 2021/0254056 A1 - sequence listing, part 32

SEQ ID NO: 62702 - DNA, 1743 bp, Homo sapiens
cgcaaggaggcacaggaatcccagaggccgctccaaccgggagcccgacccctcatcccaggctctaggatccgcgacagccggcgaggggcgccagggagcccaaggcacgcgccaaccctctgcggccgcgccgcgccctgcgttgccagacgcccgttgccatggcgccagggaggggacaagagcccaggaccctagcgcgcgccgcaatctgtgcggtcacgcccggcccgcgttgagagagcgcttggcagccagcgggtggacgcgcccctcagcggagggcacaaagcctggccgcaggcacgcaggacactcagaacggagcgatggggacgtcgcgggccgcaacacggactttgcctgggtgtcagctcgggtccacagcgcggccgaggcgcaccttgcgccacacactgctcttttactggagaaagcgggacggccgccacggacggcgcaacccctgcgtgcgccgcggatcgacgcctgagggcgccagcagggtccgaccctcctgctccgtccccgcccctgtcctcgggcccggccagcgccgcggcctctggctccgcctccacacgggcccgcaagcaggcaccgcccccgactctgcccccagccccggctcgggcccggcccccgcgagcacggcgcgcgcctccggctcctgtggccgcgcgctggcctggaggctgacctggaggctcatctggaggccgagctgacccggcaggccttgcgcgggcaacatggcggcgcccggcgagcggggccgcttccacggcgggaacctcttcttcctgccggggggcgcgcgctccgagatgatggacgacctggcgaccgacgcgcggggccggggcgcggggcggagagacgcggccgcctcggcctcgacgccagcccaggcgccgacctccgattctcctgtcgccgaggacgcctcccggaggcggccgtgccgggcctgcgtcgacttcaagacgtggatgcggacgcagcagaaggtgcagttccctgcccgatttctcccagccccgcgcagcccctgtccccgcccccgcccaggtaccccggcagagcttcccagggttgcctgtccctgaaccttgccccccgggtaggcccggccttacagccttcatccgcgcgtgggttggatcgtctgcaggactttggccggagtccagtgggccaccggctgggccgtacagtggggagctttgggcgcctttgttcggagaatgaactcactctcggtcggcctgcttccgcagcgggacaccaagtttagggaggactgcccgccggatcgcgaggaactgggccgccacagctgggctgtcctccacaccctggccgcctactaccccgacctgcccaccccagaacagcagcaagacatggcccagttcatacatttattttctaagttttacccctgtgaggagtgtgctgaagacctaagaaaaaggtaagatgtgtttgcacgcagcagagctttgcactggagcctgggcctggggctcctggctgacgttatagcggggaacgtagagaaacggatgcagaggtggcagaagtttgctgaggagcagggacctccaacaggtgaggactggggctatctgagcctcctcctctcgtctcagaagccaagctgtcgggatctgctgctgggtactgctcctgccacagccacagggcttccaggaagggattccctgccttgtctgg

SEQ ID NO: 62703 - DNA, 2866 bp, Homo sapiens
tggggcctacaaggaatgagagcgggcagaggctgccacagtaagcatacgcagatgttcactcatgtcttgcatcagacctgcagcctgggtcgggacctcacgtgccaagaactccttagcgtcttctttccggaaggaagctacaggtgtgctgggaaacctagctgttggagagtgaggtcatgctatgcaggactggctggcaaggcaggccctggcaaagccaggaagcgccctgaggaagccacgggccaaggtcctctgtgactgttcctgcaccccagatctccccggggtctgggtcggcctcctcctgtcacatgacagactgatagaatctccaaatgtctttttccaaaaagggcacagactataagcccacaaattgctcagagaattgcagcatctcttcaactcctttgatgtaaacgtctacttaaagaaagaaaaggaaaaaaagaaagaacctacacctcaatactgctctgcatcacttctggggagaagaaagttagattcctggcagatgtcaccagccgaagccttctatgaacaaaccgggggaatttcacaatgctggaagcaaacaaatctctaagctcagcaaaccaacgggctccagccaggtgcccacagccagcagctggcagtgcagtgagggtggaggaacgctgcatggtaccctctgacccctccacggcttccaagtctgtacagtcaaaaacgtctcccattcactgcggagatgagcgccaaaggcggggggcggcggcgaggaggaggacaacttcctaacacttttctcccttcccgccaagaagcgcgagggggccttcccctccgacgggcaggtctccttccgaggctagtgtcacctccactccacagaggaaaacgtcagtctcggaaggagtttgctcagggtcatccaatgggggcccagaaacacagctgggctgagaatgcccagagtttgacgccctgcttccaggacggatggcctccgcagagtcccccttgccttgtttcctcgaatggaggaccctggaaaataaactcctgaagacgagcaggtcaccgagttctccatctgatcaggacccttcctgaggcccggcaggaacccccgggacacgggggaagtccccaggctgtccccacagggcttgccccctcctgcaacccgctcggccgcctccggcctccaagccccaacgccccgccgtcagccgcacggccgggaccccgccctgggtggccccaccaggcctctctcggaagccggcgccgccgggcccacggccggacctcagtgaggcaaagtccccatccggtcgccgggagccccgctgcccccgggccgcgcccccggcgccccgcacctggcgcagctcctcgcggcacacggcgcagtagcgctgctcgcagagcacccgcatcttggtagagcagcggtagcacaccgggtggtcgcagcggccccagcgccgtggcctccaggtctccgcagcacagcacgcagctcccgccttcccgctcaggagctgccgccgcctccgcctccatgtccgcgcgccgcccctcggcgccccccggccgccgccatggtccgggatccggcccccctctcggccggtcgtggcgccgagcggcctggctcccggcgggcccgccccttccgggcaaacgtcaccgccccacccagcaacgggcccgcccggcgcaagtgcgcgtcgcgacttccgcctcagcgcggcgccggctagagcggtggccctgatagaggccgctctaccatgagccgaccgctcgaaggtccgcgcggccacgcggccagccccgggctcctctgggccacgcgtgtcacgtcaacactcgccgggctccacgaactggcgttgtcagatgaaacacggcacaactggtttgcatctcagatgaacaaggggtcatgtcttagtgtaagtatagcccaaatattgatgggctaggctcatactaaaatgctgctccttatctgaaattgacatttaagtggacctgccgtatttgtatttgctaaatctggccaccttattaggaaaccggtctctggtatttggaacacacacaagcgtggtcccgcctccacttccctaatgccctgtttaaatccctacatgaaagacaacgtgaaaggcagcacgtggtgacgtccatctcgcagcccagggcagtctcgccaggcctgcccagaaggggcctctggaaggcacgaacggaacctgtcctctttacgctgggcccagcacaggacgtgtttggatggatgctgcagtaacagggcctcctccctacccttgagggccaggcacactcaggacctccctccctctgccatccagaaggcaggtccagatctaaaccctactggaaaagaggcagtaaattgtatcaatgagcctgaactttacttactttatttgagaccgggtcttgctcttgctgtaacacagtggtacgatcacagcacactgaggcctcaacctcctgggctcaagtgatccatgcccagtgaacttggactttagaaacagacacaaatgggcttgaaaccccaattttgccacttgaaaaaagctgtcaggcacagtggctcaagcctgtaatcccagcagtttgggaggctgggtggcccggattgctggagcctgggaatttgagaccagcctggcctacacagtcaggctccatctccacaaaaaaaatttttaggccgggcgtggtggctcacgcctgtaatcccagcactttgggaggttgggatcacctgaggtcaggaattggagacaagcctgaccaaaatggtgaaaccccatctcta

SEQ ID NO: 62704 - DNA, 1985 bp, Homo sapiens
aaggggtcccctagccctgccgcctccccctgccccgcctcgggctggccgggcgcggaggtaggggcctggccgggacggctgggactggaggcgggggcggccgggcggcgggggcggggaaggggcgggcgcggaggcggtgccgcagcccgagccggagcccgagccggatcccgaggcgacgggagccgaacaggagccgccgctgaagccaccgccgggtgcccagcgccgccgccgcccccgagctcccccgcgcccctgcccgcgggcggccggtgggcagcgggcgccatggccgcgccggagccgctgcggccgcgcctgtgccgcttggtgcgcggagagcagggctacggcttccacctgcacggcgagaagggccgccgcgggcagttcatccggcgcgtggaacccggttcccccgccgaggccgccgcgctgcgcgctggggaccgcctggtcgaggtcaacggcgtcaacgtggagggcgagacgcaccaccaggtgggggccagcgctcgcccccggcccgccgccccctccccgagcgcgtccccctggggcgagcaggggtcgcacgggggcccgagggggctcccgcggggaggacgcggacgttgtcgggaggcagcggcccggcgccttcggagtcccggcgcaggaagctcagtcctgcacgggggtgggggggggcatcctggcagggaggggcccgcactgcggctcctggccgctggcctcgccctttggtcgcgttttggcctcagtgtgccgtgaaggagggtgttgggccgcctggagcccctccggaaaggtgaagacctgggtgcttttgcctgggtgtgtgtgtacacgtgtgcgtgtgaacacagctgggcgtgtgtatgcaggtccctttggggtcagccatgtgtgcatgcgcctgcctgtgcgtacccaggaggggtcgcagtaaaggcatcagtgtgtctgcacctgtgtgtgctgtagtgtgtgtgtgagtatacaggtctgcacgtgtgcctgtgtgtgtgcaggtctggactcctgggcgtatgggagctgggctctgtgtgtgtgcacgcctggctagtgtactcatcactgtctgcaggccggtgagtctttgtgtctgtactctagtgtgtcccagctggtgtgtctgggaccgggctgagttggtcattgctggcaaccacattccttagctacaaaggcactactcctcctcagaggctgcctagcctggctggggttactggccgaagcctcctgcctcctggctaaggagaacagagccttttctctgtgggttctgacccctgaggtgtgtctgtctcccacaggccagggactccctccagaccctggttggggtccagcgtccacacaccccttttcctccaggtcccctgtccctcacagcaccgatgaatccataacctgtctacatggctggtcctggaacctagagattagcaggttggttcagctggacctggagctggtctcctgtttacctggtgccttgtctgtcactctgtcggccggccccatgccttccacccagagtgtctgctgtgtaaggttgtttgctgaagaatgtggggatcaggccaggggcctggacctgagggattgagggtagggctgccagggctggggccaggctgctgttggatagtcactgccaccctcgccctgggaacacctgcttttccaaggccctgtggggctggtctctgaggactggacacacagaccatggtggactctccccactgccccaggagggcaagaggggcagttactgccccatttgacagttgaggaaactgatgccagagattgagggtaacttgtctgggacacatagtcaagaagcagctgggcactgggttcctcttgtctcactctgggtcatggggagagaggagggctgggggaagatgggcctggctcagtccctcctatctgtt

SEQ ID NO: 62705 - DNA, 1929 bp, Homo sapiens
gtggcagagaggcagagctctggaagggatgtgtgtagtttgtctttggtgaaggatggagagggcccaactttgggtgccccctgggagctaagggtggctctcagtgtcctctgtcctggctggggataggggaggtgggcaggggaggacactgatgtggttggcccctccttttgggggccgtgaaggcctagttagtgatgactcagccctgggccacaccaggctgggggtggccgcagctgcagtgcagctgatcctagtagtgacgacaggggacagcccccaaacagagacggggtggccagcggtgccaggccctggaggtggtggcagaccctgagccctctgccccctgcccctagcccatgtctccacccccatctggagggccttgggggctaagagcaggtgtgaggggtgacagttctgcgggaggcggctgtgtggttggggcgcggtgcctgcgggggcttccgggcttccctggctcttgctcctctggagcctcaacaggaccgtcctgtgttctggggccgggactcctccctgtcccctcagccctgggtcctggggcagggcagggccttccagcagcttccttccttcctttcttgggacggaagcctagctgggtggggggcgccaggctggagccttcgcaggggagcgggctcagtcatcaccctgctccccagagtgactcagcccccacgtccccacccatccccggggagccagggccgcagagggaggtagataagtggggtggcagcctgggtcggccagagagttcaggccaccccggccggacgcctgccacttgctgtcactgtgccgctgtcatggcacgctccgggagtgccacgccacctgcccgggctccgggagcccctccacggagcccaccccagaggctggtacaggtcaggtggggtgggaggaagggagggctaggaggaaccggcagccgctcagcctcccggggtggaaggaggggactccgggaccttgatgtaagcaggctggtcgctgagcaacaatgaaggcctttctctgccagggctggtgcgtcaccatctgggggggtgcccagggtacccccatgccagcctctttgtccggacacaggcatggctgggggaccagggatggtccagctctgtgctggccgccggcagggagggagcctggagcccgtgggagcccgagggcctggcgggaggcggcaggaagtgtgtgctgagccagggcagggaggaggaatgtgagctatgaacgccgcccgagctcctcggctctctgggccccccttccccacgagcccatgtgctgccagcagcccaccctggcccctccattgcagcccctccacctgaggttttagtgctgtgcctggcgccactgggaccctgctgacaatgaaggggtttaggtttgataggcagaacttcttgccttgtagagtgaaagacggctgcttctggacagaggcagaggggtggccagaatgaccctgagaacactgaggggtccttggcctggcctcagggccccagacacccaccagatcctgcttcctgtctggtgccctgagaaaccctgccccgcaggccgctgtgcaggcgtgggaagggctgccgggccagcactgtggggctggccgcatgtgtgggctgctgtgcgtgtttgcaggtgtgtgtggacgtcttgtgtctgtggctgtgtgatgtgtctttgcggactgggcccatatcacgctcccacctcctccactgaattgggctcctgtccccacgccttccctgcgtcccaggccagcctgggggccgtgctccacctcccctcccgaactggactcctgtccccacgccttccctccgtcccaggccagcctgggggccgtgctccacctcccctcccgaa

SEQ ID NO: 62706 - DNA, 2050 bp, Homo sapiens
actggactcctgtccccacgccttccctccgtcccaggccagcctgggggccgtgctccacctcccctcccgaactgggctcctgtccccacgccttccctccgtcccaggccagcctgggggctgtgctccacttcccctcccgaactggactcctgtccccacgccttccctgcgtcccaggccagcctgggggccgtgctgtgactgcatccctgaggggcactttggtgggcaggtgtcagggtcagccttgaagccccacgcctgtgccaccaggtgtgtctgggggaggagtgagtctatgtggtggggccctggagattttgggggtcttgcaccctctaattcagcccatgtggcccagctgagcccctgtggggccagggagccacaggcttgtccctggagtttctggtgtgacgggctgggtggtggccatgcagagagggttcagagggtgggcaggaggcttcagatgaggcatctggcaggctggacaggagaagggtgttccagaccaagggcaggtcctgagcccaggggacagagcactagctgtgtggagaaggacccccttgctcccttggcggggcggtcccccccgctgacatggccgtttctggtccattggggtttggagcgagcttgaaggtgggtggctggaggggttgggggtgtctgaggcctggagacctgccctcctgaggtctgagcgcccccttgccatgccgccccagccctggcctggcctggcctgtggtccctcagggacacacagggaggtaggaggtgagggaagggccctggcagcccccagcccgcctgcacagtctcccctgcgcacgccctcaagcttggcgctccctggaaacctgagctgcctcctgcctgctccggccaccgccatgtttaactgagcacgggcagccgctggccaccgccgccgcaccctggcccaccccctggctgggaggtggtcattgggcctggccttgcctgcatggtcccctggcccagagccctaccgcaggatgccagaggtaacatggggcagggcctgggatggtagcggggggtccttccgggcaccaggaggccctctgtgccctgtccacactaagctcctgccccagcccctgcttgctgggcccacgggggtggggcggctcattttcctggaatgtgaaagcaaacagagccgccaccgcagccagccccacggaggcctctggagagaaaacaaaactgctggcctaggagcgcctgccccacgctctggaggagagcccggggcagggggacgcacaggcagagccctcagggacaaccgccccaggaggccaacggcgacagttcatcccacctggtgcttcctcccaccctgcctgtgcgccacgctggcctcgagccaaaggaattctcccagcaacccgggaaggcggctgggcccgtcggggaggcttctgggtttgaaaacaggctttgcccaagttcccacagctaaagctctgtcacaggcagcctgggtgcccggagtgtttgccactgagacctgggcctgcccgtggggggcacggtaccgagtttgggcagtggcggcaccaccggggagtggcctctggaggcgggaggctggagcaagagactgaccctgtccgttgggcctgcaggatgtcagtgggcccctgagggagctgcgccctcggctctgccacctgcgaaagggacctcagggctatgggttcaacctgcatagtgacaagtcccggcccggccagtacatccgctctgtggacccgggctcacctgccgcccgctctggcctccgcgcccaggaccggctcattgaggtaccggcccaccagggctgcggggtgccgagtgccccgcacctgtccacactggggccctgggtccttgcagggaggagggagacgctgggaacctgagctggtgcgcctcctgctgcctcggtgggcggtggctgtgatgaatatttgatgccacacctggccacgcggcgttgggggctgtctgggcccatggc

SEQ ID NO: 62707 - DNA, 3535 bp, Homo sapiens
cagcctgccccgagctcccccagcctcagtggactggagggtggtcctgccattgcccagaaatcagccccagccccggtgagcccccatcctgcccctgcccaccaggtactgggggcctgtggcagcaagatagggggagagagacccagagatgtgagagagagtcagagacagagacagagagagagagagagagacacagagagagacagagagagagcgagcgagcgcgcggcagccgcggggcgagggcctttgctgctctgccggggcctgctgactgaaaggaatttgtgtttttgctttttttccaaaaagatctccagctccacacatgtttccacttaataccagagacccccccccttcccctcccccttcccctcccccttgggacgcgctctaaataattgcaataaaacaaacctttctctgcaaaccatttcctccccgccccctcccctcagcagcggccgtcctgagtgggagtccctgggacttcccagtggccaagttggggcgcccagcctcttcgtggggaccttgggtaaggccagggaggcctgatgtggccgtaggagctgcccctgcccacctgccctggtgtgggggtccctaggccacaccctgctccccacccagctaccctgtgcgcctgtgccctgctgggggcctgggctctccgaggggcctgaggatggaggccccacgtccccgaggagggcggcctctggacaggcccctcattccgcgcggcagctcccaggcctggggaacgtaggtgtgtgagagcggcacccgggaaggacgcctggcctctggctcagccctgcttggcgggctcccccgtggacaccctgttgactttgcacttccctcccgggccccgcacccccgaaccgaccaccgatcgaccggcaccgctgttgcctcgtaagccatagcgcatgcgcgctctcaggataaacaggccctgcctgggacccacacgcctctgtcttttctgagcctcctccccgtggggtgagaggggtggagggatgaggctgtttcagggagccccctccccgagtctcagcagctggaaacggtctcgttcctgagcccgtgccctgcatccatctgctcccagccctgctccatctcccccgctgacccccatgggaccccctgctgtgtggcacatcctgggcccatgcccatctctcttatttggcagactcagcctcccaccttcaccttccctgtgaagccatccggccccacacaacacccacacgggccaccctttgcccaattcaccctgcgacctctagcagtcacaggtcaagctttgtaccctgtggcgccctgcctgggtccccagtgtccctttcaaggccgggtagctctgtaaacaggggtgggaccctggcagaggctgggctttgagggcatgaaagttcaggagctggcggtgtccgggctgggaagctggggggccggcggtggatagcatgaggggccagggtccccagccagctgcccgggggctgcttgcttccccagcggacttccaacagctggctgcagctggctctccccacttcctccctcccaggttcatgcacaccccctccccctccctgagtacatagcaaagattgtcacgtccccagccggcctcccaggcagccctgctccagacacgcgagcacgggtgtgtacgaacacatccttgtatgcgattcccaggctctctgccccctcagggacagacatcagccagatcccatctgcaaacacaccaaagctttattcaacaggcgtggcttcctgaagcgtaaagccacttcacagacggtggccacagcggcacctcggccagagccatgcggccatcagagaccctgggcggccgggcagagggcttggttgaggcaggcgtggcagcgagggtgcacaggcagacaggtctgctggccgaagcccaccaagagtccattgatctcgtgccacagctccctgtgggggtgggggctgggtcagtgctgacagagggcgggcggggtgagctcttctccctaggaagccccccacatactcatacctaggcagccactcctccagggcggcgcgggtctcctctggggacttggttgccttcttggtccacctcagcctgttggcgattctgtgcacatgcgtgtccactgctgctgggaggccaagcggggtgaacaggggcacactccaccagcctagcccgtgcccctccccgcccagaggcgagtctgccaccacccccgtggccctccagttagacattggaaccgcaaagccctggctgcaagcctacatgtgaccatcttggctgcccctgaggtgctggggcaggggctgagccctctgttggggtgcaggcctctctcccatcacctgagccagcctggggggctctgttctgggctgcccactcccaacactggtgctagttggatgtgtgggtggtggggtctctgctttgggcagggcctgggggtgatgactcggctctgcttggagctctattccccacaataacagcgacagctcgcttggacaaacgcttgctgggggccagaccctgccagagagattggccagctcagtgagtcctcatgaggtcctacggatgctgaaaccgaggcccggcaggatcccgactccgaagcacctctcagccctcagcctccccaggaacgtggccctgtccccggaagggtccatccaggcttccctctgtctgtctcctgtggcctgaggctcctctcggcataagcactggctctgggcaccaggctgggtggcaacagctctgcctggcaggccggcatgaggtcactgcctgcagacctagcacctgccactgcagcggtcagggacacagcgggagcatgccctggccggccgcagctgctgtccacctgggttctggctcctgctcccctcagctggccaccccaggcgtctgctcactggggctcccttctcccacccggtggccccggccagctgcagccccagccctgcctcctcctcccgtgtttcccaaagagaaagccgaggcctgcaccagctccttcgctgctgcctagaaaaaggtgtccgagggtgtggggagaccacaaggcctgaggggtcacacccctggggctctgagcctcagtttcctcctctgtaacacggaagtggccatgcttcaaggctgagtcaggccacgtcacgttgtgtgagcctcctgcccacctggacagtgaatgacgaggactgcctcacccactttgtggccagagcttagagaagccaagggcctggcccagagtcacccagccaggaggtgcagagctgggaccggagccagcaatctatggctgtggcatttttttttttttttaaacggagtcttgctctgtcacccaggctggatacagacaatggtgcgatctccactcactgcaactttcgcctctgggtttcaagcgattctcctgcctcagcctcccgaggagct

SEQ ID NO: 62708 - DNA, 1824 bp, Homo sapiens
ctcccagctgcaccagttcctcctgacatagtctggactacccctggggtccctgggtgcctatgggaatccagctctggccaattctgcagaagtcccagcgggactagcgcagaggccctgtccgtgtccctcactgctcactgcagtgcttggcccccagcaggtcctcaacggctgcaggataaatataataagtgccatgccctttcctgttttccctcagaggcaccctcccccgagctgggggagcaggcttctggctgcgtgtgtccttggcacccagcctctccgaggacagcaagttcactgcaggagggcggggatgggacccacagagcctggagtggagagtcccggacagagtggtgggaaaggaagcgttttcttgcttggggcgaaagggggcagcggagcggagcgcccgaaacccagcccctgcggaccgcaatctttgggaaaaaggcgcaaggtgggaacgcagggccgcacgtgggaaccgttcgcggctgccgggtttgcagcccctgcccgcgcagctgggagccgcaggaggcggcccgggactccagcctgcagcccctatcccgcctcctcccacgctccagccacggcgcggcgctacctgctgcagcctctcttctccggagaggcccgggctcctccctacacccccgcggcccagccccgggtcccaggctccggctccgggtcagcatcctcgcgctcaaggcggtcatgccggactcctgcggactacacatcccggcggcccatgcggccccgtcacgtgatgcaaggatcgccggcctttccgccagagggcggcacagaactacaactcccagcaagctcccaaggcggccctccgcgcaatgccgctaccggaagtgcgggtcgcgcttccggcggcgtcccggggccaggggggtgcgcctttctccgcgtcggggcggcccggagcgcggtggcgcggcgcggggtaagtggcggtccccacggggcaagtggcggtccccacggggcagcggcctagagaggcggaccccgcagtgtccgggtcccgggccctcacccgcgcccactgcaacccgactccggagctccgagcatcccttagttttaagtcatggcgggtgcgaacgggtctctgctgcaggcggctccgtgacagctcctgcttcacatgggtagaggagagacggcaaacgtcggggctcccaggacttcgcggcggcagtcctaacccgtgcactgagtcgggcggggcgggcggcagcgtctgagtagagagctctctagaccaggcctggtgtctcccgggctttcctaggtgcctgtttgcgagctggtcagctgggctgtagttgagttctcccagggagtgtgggaggaaaggttatgcccaccagagacccagggtcctgacggctggaggtccgcagtggggaaggtgggcagaggtgttgctcagatgtccccattcctgtttcgtttgcacagaggggttttctggtgcgtcctggtccaccatggccaaaccaacaagcaaagattcaggcttgaaggagaagtttaagattctgttgggactgggaacaccgaggccaaatcccaggtctgcagagggtaaacagacggagtttatcatcaccgcggaaatactgagagtgagtgagctacctgtgtctttgctaggctagagggaaatgcagagaaggctgggtttggtcttgcaccaggttctgtgggagacgggttgctggcaactgtctacacaggaatgctgtctccagtacttggaggccgacatgtccttcctca

SEQ ID NO: 62709 - DNA, 2870 bp, Homo sapiens
gctgaccttgcacaggctccttgcctttctgggcctcggtttccccatctggacactgagggcagtacccaccttgcaggataactttgaagaggtcgtgtgcctggcacacaacagtgcttgctgtagggcaggcttccacggcctctgccaggccctctcgaggaatcactctgctgggcagtgccccccatctgtgttttctcaggcctctgacccgagaggcagccaattgtttggactctgggcactgccagctgggagggctcaggtctctgaagggcccaaggtcctggtgacagctgtcaggtctccggggacagctgggtcatctctccagctcccaaagaaacaccaagaagcccctgcatgccaaggacaccacccctctggaccactgtgccccagctctgaccactgcagtcccatcttctctgtgagagggggtgacagagctccagtgcagcccaggttggggaggtgggtctgccagggaccagcttaggatttggagaatcggccctggccacctgaaggtccgaacctggaggagaaggacaaggggccagccacacagcctgggcaggggcctctgctttccacctttcagaccctgagggcagagtcccgtgggaggggaccctcagggggccgggggctggctgccacagcgacttcctccttcccgcagatccccaggcgtgcacagcaggcagaagctgtgggggagatcgcagcgcccgctgtgtcctcccggtgaccagctgtcacctgagcccagggcgcctgccccagcagcctggtgtgtttgccaagccagggctggagcttcctggacccgcctaccctggaggggatggagcagtgaagggcaccgggccaagcgctaggcatctggggctaaggagacagaagcccgcggtgcccgtccatgcgggccctctgccccagcacccacatctcaggacaccccttcctcccaggtctggcggtccagtttgggggtcaccgagctggggtggtgtgcagccagcagaggggattcaggatcccggggtgactcctggcccaggcctgtcaccccacagctggctcctggccccaaggcagccacgggcaggggtcgtgatcgggggcgggacggggcccggacctcctgaccgccccccaccccccgccgagcgggggtgtatttgcatgtccccgccccacgcacggcattggcggcggcggcgggaggccgggcctgagtggctgcgcgcccgtggagcggcgggggcggggcgcgagccgggcgcccgggatgatgccgccgccgccgccgccgccgccgccgccgccaggggaagggttcgggtccgggtcgggctcggcgggcgcggggtgcgggacggcccagggcacggcggctgcagcgggagcacactgagcgcccgcccgccatgtccaggaagaagacccccaagagcaaaggggccagcacccccgctgcctccacgctgcccaccgccaacggggcccgaccggcgcgctccgggactgcgctttccggccccgacgcgccgcccaacgggcccttgcagcccggccggccctcgcttggcggcggtgtcgacttctacgacgtcgccttcaaggtgagccaggcacccgccccccaggccagcgcagcaggtggcgcccggcctgagccaagggttgggggtcggacagggggtgcagggcccgcggccccagggcgcggagccgacgcgggaggaaccccgtggggcttgcacggtgcatcgtgcacacacagctgtccatcccaggtctggggtatccaacagctggcagggcctgtcccccaccccccaggcggcatggtggcacaaggggtcccgcgccccagtgccctggcccccgcccggggtctcaccatttcccgtatgctgccctccctcaacccagcggctgtgggccttttttttttttttttttttttgctggggggaagaggtttgccagatggatggggaaccctgggactccagaccaaggcagaggctgtgtggacttggcagggggctgggaggaccattttgggtttggtagcacaggtttcggggagaaggcctgactgctgcccacttgcacctccccccaacctcagacttggcccaggtccctcttcagatcgagatctgatcctaatggggcaaattcctcgagccttgctggggtcatgtccctactgggatgtggagaagcccccggcagaggcctccccaagtctcttaggaggtacccagctgccaccccacctgctcccctcccagatgctgtccaccgtgtgggggtatggacgttagggagggtccgggatgcaggtggctgccctcactccccgctgactgagacggccactgtgcagaaggacagagcagccccagcctttcagaggcatacgctgggtgtccagcccatcggggtccctggccccgctgagcctgcaggcctgggctgcctccctccactcctgctcctcacctgcagcccccttctgaccaggccagctcagggcagaccagactccccccaaccctcctgcttgtcctaggtcatgctggtgggggactcgggtgtggggaagacctgtctgctggtgcgattcaaggatggtgctttcctggcggggaccttcatctccaccgtaggcattgacttccgggtgagtggaggccctggcctggccccacatcagagtcccgccggtacccgagcagcaagttctctctgatccccatggtaccaacaggctcgaggcctggaccccagaagctgcctgcctcgaccttccaacacctgggctggtggctgcacccgacaag

SEQ ID NO: 62710 - DNA, 6440 bp, Homo sapiens
agatacaaaaaattagctgggcgtggtggtgcgtaactgtaatcccagtcacttgggaggctgaaccctcccaaggttctctgaaccccaggagaatagcttgaacccaggagatggagactgcagtgagtcgagatggagccattgcactccagcctgggaaacagggcgagactcttgtctcaaaaaaaaaaaaaaaaaaaaaaagataaagacaggtgccctctacagtgtgacctggagggccaaagttctggggcatggggcaagccatgcagggagccccagcctggtctgctgcctcccacaggcctggctgaccgagatccacgagtacgcccagcacgacgtggcgctcatgctgctggggaacaaggtgggaggcccggctgtcctcacctgggccacagggcagggcaggtgagggggcaggggccaaccatgggccagctttcaccaagaccctgtgcctgggccaggtggactctgcccatgagcgtgtggtgaagagggaggacggggagaagctggccaaggtgagtcagggcaggggggtggtgagggggtgcccctggaggctgcgagcctaggctgtccccgccaggccaccacctggctggcagcagctgtttacaggagtatggactgcccttcatggagaccagcgccaagacgggcctcaacgtggacttggccttcacagccatagcaaagtaagtcctgccagtcaccaggactcccccagcccagggcctgaatcctcattagagtccaggccatcgtgtccccttgtcacccccactccgcagggagttgaagcagcgctccatgaaggctcccagcgagccgcgcttccggctgcatgattacgttaagagggagggtcgaggggcctcctgctgccgcccttgaacctggctgagctcagtcctctggaggaagccgtccagtccctagaaggctggacagagggtctccaggcccttctgactttgttgcccagtggccaacgcccgagtgtctgttttcaggagccccaggtcaagccttgtcccttcctcctcccagcaacagtcccaacaagcaggcttctgagagcccgtggccgcacactggccgccacggaaaagcagtcttctgcacgggacggggagcggcaagtggacagactttgccacggtgctctgctgccccctcctgggcacgtccaggtgagggagggctggggctggcaccacgcacagtgcctaaccctagaaaagccatgtcttcagccgcacatgctcaggcagctaagggaggacgcctgcccacgcctgggacagaaggcttcactgctaatcacatcgtgcatctgtgtgtcctgggagctgcctgctcccggcccaccctctaggaggctctggctcaaacagcaatagggtcttcctcactgaccttggaggatgcctgtggccttgtgataaaatgtgggaaatcacagaaaacaccagaaacaacaactgccagcccggcctggccacaggtgaggtctgtgatttccgagcacgctccaccttgcactcaacttggccttttgattgcacaagcctttgttttcagtcctagtgaataaagttgtgttttctggagcgtctgtctcatctgttgaaaaaaatccacttctagagcaggatgctggagtttgagagactcagcaaggcccagaaccctcagcaggtgtgtggctaccattcctccatggcccatggctgcctccctaaggaggcacatgggaaccctaggtggtgtcaacttccctccacaaatctcaaaagcctttttggactcaccctggggcaaaaggcatgaaaaacagtatttgactgggcgtggtggctcacacctgtgatcccagcactttgggaggctgaggtgggcagatcacctgaggtcaggagtttgagaccagcctaacacggagaaaccccgtctctactaaaaatacaaaattagccgggcgtggtggtgggcgcctgtaattccagccatttgggaggctcaggcaggaaaatcgcttgaggtggaggttgtgccatcgcactcccgcctgggaaacgagcaaaactccgtctcaaaaaaaaaaaaaaaaaatcacgggcagaaatggagaaggcaatcccaagagatgaaaagtcactggtaacgagcttccgttttcatgtctgtacccttttccaagattgcctgtggatcagccagacctctggggtgccagaataggaaaataaagacacttgagagaaaaccgaatcaactcactacctttctttattgctaagcacttcaatagacacagcgcccaccttaccgctaggccctccggattgaggtttacttaggttcaaaacttgcagccggctcgcgacgaaacctgaaagtcagcgccaaaatacagacattaagtccccactccttcgtttcgggcaacacctgtttccactctcagctccccgtcaggagtgcgcaccctcaagcctcagtcttgctaaataatcagactgcacgtgcagttttcatacgaggtgtcagaagtcaaagcaattcatcacagactgggagaataagggaacccaagcccggcccagtcttacctgcaggtagctgagggcctgagattcgggaagaaacctttaaacgctaagggacaaagtggtgcgtaggccaggcctggacgcccagggacctggccggcctgcagcgttcggacggccctcaaagccacgctcgtggctcagttcgtcccaagatcgtagcacatggcgaacgtattaacaaacctcttccccctcggactcgaccccgaaaagacaggggcgggcgaggctcaagcttttatagaaactgtcccacctctgtcattgggctatcctggcggaagtgcccgccttcccccgccgctggtacgctccgctccctgccgcgttgtttccaccaatcgtaccgtggcatttcttttggagacggtctctcagacccagacccgaagctcctcccttatgcagagtccgtgaagcctaacggtgagtgacggatgaacaaagccaatcagacttcgatctgcaacatagagtgattctgaagctgccattcccgccccgcgacgacgaggccgccggaagtcgtagtttcggaagtgcggcgcgtgaggcagccgtccgggcccggagaggcggggaactacacgtcccggcgggcgcagcggcctggcgcttccggctcgcgcgtctagtccctttcccggccggcggccgagggggcatcatgaagcgggctggcggcgctgccgctcccgggcggccgcgggcgggtgagtgtccccgcggcgcgcccgacccggggctcgcgcctcgggaccgcgcggtggggcgggatcgggcgcgtggagatcgaggcgaggcgaggcgaggcgaggggtcgggccggggcggggaggggggggcggggctgagacggtcggggtcggggtcagggtcggggtccgcgtcgctgtccgtccgccagtcagtagtccgtccctcgctccgtcctgttctcgcgcagttctttactcattccttcttcctgcattccccgagactcccgggtgccaggcactgttctgggcgccgggagaccgcggagaacacggtcccagttctcctgtgctcggcgtctgctgcagggttccccaacctccgcaccatcgaccacgcggcccgggtcgctttttgctgcgaggagctgccctgtacattgtaggatgtggaacagcttgcctggctcctggccgctagataccagtaaacaccaccccttcctcaattgcgataacaaatgtctccatgcattggcaaatgcctcctgcggaacaactccccccatcccccatctagacagacagggtggtgggattgacaataggtagttaaaatcatggggagcagcggtatgtgctgtgaaagaaagaaagagggtgctgaaaaagtgagtactggccgggggtaggggcggcgctaccgttagccaaaggcctgttggagaagcagccagtcccaggacatgcaggaggagcattccaagtagaaagagccagatgtacataggcctggggtgagaaggggcctgacgcaccccagcaagcactggcaagtggagaggtgaagtcgatgaggccggaccaggctcacagggtgcatggtggggtggggcgggggggttattatgctggcaaatgacttggggttgaggaagcgctggagaggcggtccgatctaggtccagtaaagagctttctaactgtgtgtggaccacagacttcagagttcactggggaagcaggagagagggaggctaggccatcgtctcctagtccccactggggtcctgctgtcaagatacggttgtcttgagccaggccagagtggtcagctggggttgagtctggagtccaggggcaggggcctgctggagcccaccctgctcttgggggtgaggggctgctggcttgctcaggaatttcatgccgcccagcctgtctgcccacctttctcactacccctcagaccccttcctgggcacacacaggccccctagccctcgccaagtgaggagcctccctcttcctcattccttctctttgggcctctcccttcctagaccccttccctgtgcctctctgttgcgaatatcctgacttcactgttctgggcattcatagttctctgtggaagcctcgggccccgtgtcctgagggggagcagtggtatgggcagcctggcctaaggaggggaggggctgggagtcagcaccccaacctgacgccccaacctgagggtctctggtgaagtgacttccaccgtggcccactggggccaagtgttacgatatttctggaagtgaatggaaaagttcagggtctttggcacccaccgaaaagtgcctttggcagattgagtggcgattggtggggctcctgcccctctgtctgcctgtgtcccccacaaggctcctagctcctcccgggtcagattcgtgttcagccgtcacacatccccaccctcccgcatggggcctggcaccccgtggttggtgtgactctcggccagctggttggacaaggaatgagcagtttggggaaaggaggaagatgcagttgaagagcctcctggccaggaggcctgggcagcctggctctgggatgcagccactccccggcttggcatgggactggctcaggcgctgccggggctcctggatgtgtggcagccgtggacgaagcagaaggaatgtgactctggtcacagcggcacagcctgctggctgtgtccctgggccggcctctccgccttcctcagcctccatggtccactcagcagaggagctgctgtctggggtgccttcactcttgacggatccatcttctctcggctccttccagacagggttctggctctattccgtttttcgagaagcccgaggccaggagggcaggtacacagctgtgaagtggtagaagtggactttgaacccagctctgtctgagcccagtgcctgtggccttgaccacggtgtcacagcatctcctggatggacaccctgcggggtcagggagggcatgtggggagggccgagagctgttggctgcgtgtgtctcagtccggccttctcagtgggtgggcaccgaggacttcaccaggccctctgtgtggatcatgcggggggaacctgtggagagggacccaccaaccccttagtctttgacagatccgctgctgtccccagccttgctccctggaggaggagggtgcagccaggtggggcaggtgaaaggggaaagcgggcactggaggctggggctggtcacgtgtagacccggacaccctcacccggctggaggaagccggctgcctggaaactcggggtggaggtgacccaaccccagaagcacccaggtgggaagtagggggcagcgacgcagagggccaggactgagggccgtgggacggtgtgggaaaggaggtggcagtgcggtggcacgctggcatgagggcgctgggtgactgagggggtcagtggtctctgccctcacattcctgttgcctcttcgggcccatgtatggccagtgtttatgtcagctccctgctgctgcagggcagaaggaaggagggagcccgggagaccgagccacacaggaagcaaatgagaacacagcgtgggactgggaagcgtgggctcggcgggggggggggggacactgccacccttggctcttgggcaaagctcacgacctgtttctgagagtctgaggcccacttgacttgggtgagagccaggaacgcactccccagcccagagctgtgaagctggggtctcttcctgtgccccaggatactctccccactctggatcccagcagcct

SEQ ID NO: 62711 - DNA, 1681 bp, Homo sapiens
cggtgtggatgggcgggcggtgtgggtgggcgggcggtgctcgggcaggcgtggtggggacatggaagggaggggtaggggggctgatggggaaagccctttctcagccactagctgcccccatggcttttcccggtttgggaagagtctctcattctatggaacacacccccacttccccagcactgggaactggagggcagagaggccagagaattgaaggggaattctcactccggttgacaacttcctgcccggccaccccccagcctcgatgactgtggggtggggaaagaggcactctccctctggggggccagggcatgcccccagaaaagcctcccagccatcaggggatgctgagctattgtgctttccagttgtggcccaaggggtcctctccctactggggaaacttactgcaaaacccagtccctggggactgggctgaggggaggcctcgggcatcttgctcaattccgaggtgcggggatggatcctgccttagggcgggacacaaacgttccctggcctccagccccagggtcccgcccgcctccatgtccctggctggggctgaacactgaacccgagtgaactgggaagcagcctcctgtgcagagtatccccctccttccctccctccttccgtccccctccctccctccgtccccctgcttccctctgccccctccctccctccgtcccctccctccttccgtccccctcagctggcgctcgatggggtcttgcgcacaccccacagatcctgtggtgttgtccccgtggcccggctgctgttggccagctgggactttctggctgatttgcacattgccctgcgtgcctttctgttcacctcacttcagagtgagggggaagccagacagttgctctcccagactgtgagcaacaggcactgaggccagcccgacccatcccaggggagtgcctgctggggtcctggccacctgggcccccgggcaggcatcactggcagggcttgcagctggccctggggccccggaagcttgcagtacagggagctgatgggtttgtaaaatgcaggtcagtgtctcctagtggctgcccggtgatcccctccctgctcccagagggcaggagccaacctggggctcccaaaagggctgaacctcctgtgccgagtcatggcgccctgcacttcaggctatcagggccttaccccagctgggacatcctcaccccaagcacaatggcaaaaggcaagccctggccagctctccccgaccttcctgccgggagctgctggagacgggatagacatgtgccagggcagagcagccttgtagacacaccacgaccacacctctgtcccagggctgactcctctgagcctggctgcaggtgtgtggcactgcccacactcaggagcccctgcctcttccacaagagaagtcccccgagagcctagtctgggtcacacagggccaagcccctcgagtcgcagtggggcctggggaaggccgagggaggctttggccaggccccatctcccgagaccatgggacgcaaagatcaggtggggccaggtagctcgtggcgctgccaactgcaggggctgagatgtcgggttgagcccgagtcctgaaggctgagtggctccagggtgggtggccttccaggtggcattggaagggac

SEQ ID NO: 62712 - DNA, 1795 bp, Homo sapiens
agggacaagatgcaccccctctgcggccagaggaaggggtgcagccaggtctgtaagagcagcaggaaaaaaccatgcgacagcctgtctcaagggtgagggcaccggcgtggagctcacagagctggaatgagggcctgtggttttgagggggaccctgggctcagtgggatgtcctgagggtcaggctggggctggggtgccagatctagcaagtaaaactacaggatacccaataaaatttttttagcataagtatttcccatgcaatgtcctggatatacttacactaaaaaaaaaattattcgttacttgtctgaattcaagtcctgtaattttcagccaatcctagcccagcgtggcgcagtagtgggtcagggagggcaccggaacagcgcgacccgacagcccgggaaacggacagccgtgtcagaagggcaggtgccagtgggcaggaggccggagagaaagccgcagcttccttccacctcgcgccgggcccgcggccgcgcacggggaccgctccgagttcctcccggcgggaaccccccgccccagaactttggtctcgtcccacccacccccgcccgcgccatggtctcgccctagggagccatcgataactctacgctcggcctcgatcgactcgctccggctcccctcgccgtcctggacacggcggagtgcggagccgcccgtaaggtacggaggccgcgagccaggggccgggaaccggctgctgggtggctgggagagcacggccaggggaagccggccagcaggacggagcaagggcggtcaccggaggaaaggggagctcgggggtccagccagactgcgccctttcccatcagggcctgccgctggcctgctacgcatgcgcagccgcagcgctcggctttccccggcccatccgccgccttgcgcacgcgcagcccgcccctgcggcagagtggcgcccgcgcgtgactcccccctgccggctgcggaggtgggggggggacggcgcccccgccgtgtgcgtggggcggggatggagcacgcgccctggagccccggagccaggtatcacgcgtgtgacgcgtgtccctgaacctacctgcgcttcttgtcccaactctaaaatgggaatgataagcgccattcggcagcgccttgtgggtctataatctacttagcacagagagtgtcttctaagtacttcacatccttctctgcagatgctctgacctttgacccctgccgttcagctctagggcccgtgcaggccacaccatgaacacctccccaggcacggtgggcagtgacccggtcatcctggccactgcaggctacgaccacaccgtgcgcttctggcaggcccacagcggcatctgcacccggacggtgcagcaccaggactccgtatcctccacccggggcgggcagggcggcgctggggggatgcctcgtgtggggaccacagcctgtgtgaaggccagatggtggaggcctggggggccctggcctcagggctaccttcccgtcatcctccttaacagtcccagcaggtgaatgccttggaggtcacaccggaccgcagcatgattgctgctgcaggtatctgtgatccttgatctctaaactcctgagctctggtgggtcgacctcagcacagccaagcttcagttcagcctgtgtccctaggttaccagcacatccgcatgtatgatctcaactccaataaccctaaccccatcatcagctacgacggcgtcaacaagaacatcgcgtctgtgggcttccacgaagacgg

SEQ ID NO: 62713 - DNA, 2269 bp, Homo sapiens
aatttgggtaactggttttcaatttctttttttttattctgcagattaaagacactcaatctttaaccttgaagggcaggcaaaaggtcggctatgctgtcaacatagaagtcagggaccattttcttcttagacacgcagtcactttcctgattattcttcacatcccctagagtggagactccggtgagggtcaggatggtcttcaggccacaggtggcgcctaggaggatgtctgtgtccaggcggtctcccaccatgacggtgcgctcggggttgatgccgtattcctgggacacgcagtcgaaaatgaagcggctgggcttcccgatgatgtcggcctggcgctgggcggccatctccacggctcggaccagacacccggtacctgcggggcacaggggaccgggtcaaagggcagggagggggcccgccgcccgccccccagcctcccgccccagggcgcacggacccgcgatgaagcggccgttctcaagcggaagccggttgtccatgttggtgcccacgagcaggcagccgggctgctgcaggtagcgcagggccttggtgagcttcatgtagctgaagtgcgggtcaaagcccaccaccaccgcgcgcacgtcgggctccagcggcgcgtgcagccagtcgccgggaccctcgccctgcagtggctcgggccccacgcccacgctggcgacgcccacggcctccagctccgcggccagggctgggctgcccagcacgtaggccttgggcgcgggggcgccggccaggcgctggcgcaggtagagcgcggtgcagtaggccgtgccgaagacctccaggctggcgccgggccccgcggggccgccgaagcccaggcgccgcagcttctcggcgtaggcagcgcgggtcttgctgctgttgttggtgatgaagcccaggcgcttgccgcgggctcgcagcgcccgcagggcctcgggcgcgccaggcacggcggtctccccgcgccacagcacgccgtcgcagtcgaacagcagcgtgtccacgtcggccagcagcgcctgtgcccgctcggcgctcagccgcacgcagcgggcgtcgtcgccaccggcctccgccgccgccatcgccgcccgccggccgccgccgcccgccggccgctcctcgcagccgcccgccgcggcgccctccccgcccccggggcgctcattggcccagcgcctcgcgcccgccgcccattggcctgcaccttcgccaatccgcccccgcctcccgcgggctgcgggagctcagcgccaatcggtgaggcccggcgcggggagaggggcgatcattggctaccggccttgggacgccccggtgattggctggcagggctccaaccggcattcggagtgaagcgctcgctgcggaaatgcgccagaggggagagcagcgcaggcgcaaggccgctgttcccgggctgccgcgggccgctcacccattggaagcgagtggtcagcctaggtgacgaggcccttcacggagtgacccgggccaggccggctgtccattggccggtctctcccgcgggcatgggcggggctctcgcaggagcgccgcgggagggggccggggcaccttcgtcggccgtgcccgtgcctctgtgccgtggacgcgctcgggacacggggccaccacgtgggtcgcttaccggccagtcccgcgagccagcccggggctccttccccggcaggcgtgagtacgcgcctcagtcctttgcaaaaacgcgttcccggttccttggaggtaacacgaaccagccattaccaggctgggggattagggtctaaggacactgtctagaacctggtactcagtgattgctcgccgtcatcgtcatcaattattaggtatttaattgaggcaaaacattacagtaaagggcatgaaaaccgtgcagctcgatggaagttttacatttattattattttatttacttatttatttactttttgagacggagtctcgctctgtcgcccaggctggagtgcggtggcgccatctcggctcactgcaagctccgcctcccgggttcacgccattctcctgcctcagcctcccgagtagctgggactacaggcgcatggcaccacgcccggctaattttttgtatttttagtagagacggggtttctccgtgttagccaggatggtctcgatctcctgacctcgtgatccgcccgcctcggcctcccaaagtgcttggattacaggcgtgagccaccgcgcccggccttttat

SEQ ID NO: 62714 - DNA, 1480 bp, Homo sapiens
cgtctcaaaaaagaaagaaaaaaaaattaaaagtatataaaagaataaaacagcttcgcagagctacccatgagccatccccgacccgtgttcttttcccgtgacccgggtaaccatcttgggaggctctaacaccctaggcggtcagtgggcagcaggcaccacacccctggttggagctgtggcggcttcccagcagcagccgcgggcggggcgacctgtccttaggtacggaagcgctggggcgcggctgcctagcagccgccagtccgctcgcccctcgcgttctctggctctcaaatccgagtgcagcctcgaacataggtccttctgccgccccgccccctggctggcaatctgctccaccgtaaccacgccctccccacagtcccgccccatcttcgctctcagcgcgcccggccccgcctctgccctttaaggccacaccgctatccaggcccggctccccgcctgtccgtcaatccgctccggttctgccccgccctcctcttgccgttccctcacgctggcctcggcgcggcccgttgttatgacgacatggtcgtaaatccgccatcttcctgcggcgcgttgcgacatggagggcgcgatggcagtgcgggtgacggccgctcatacggcagaagcccaggccgaagccgggcgggaagcgggcgagggtgcagttgcggcggtggcggcggccttggcccccagcggcttcctcggcctcccggcgcccttcagcgaggaaggtaaccgggccgacccggagggtgcggccggggtgcgggcagttcatcccgggctggcagaggcccggatggcccgagctgcgggctcgaccgaccctcccagacccagacacctcgcggatctcgcgggaccctcacagccctccacgaaacccccaggtttgctgcgaccctcacgggcctctcctgcggggcgcctgtcatcccccctctctggtgtgcgtccacaagtgctcgcgggttgctgagcccccgggcgcccggtgtagacattcgcagacgccggcgtcccggcccttctctgcctccgatgcctgagcctggccctcccctcctctgggccccttcctcctgcacctgatgggcgtctagggccctgttggtggttccaagagggtggggcctcggtttctccaggatctgggctctgggcctgtccgtagggaggcagcagagcctagtgcaagagggctggtgcactgcagccagcctgtggccccttccagtcccacacttgccgctttctagttctttgatcctgggtaggtgaccctacctctgtgaacctctatttcccctacagaatggggcggcggcttctgccagtaatgtaacaagcccttatcctgctttaggttttttcattctcaaaccagtcctgacaggtggatgttattgttattctcattttggggatgaggaaaatcgaaggttggagacctgaa

SEQ ID NO: 62715 - DNA, 660 bp, Homo sapiens
aggagtccctttagaggttgctgggcctgcttgtggccttgtctggtgtgaaatgggctgggtgtgtccccttctggggtagggggttcttcagtggcaatgccctggagccgagtgagacacaggagtagggtgggaaggggaagagggtggtgggcaccttagagcttggtttgtgactgggagccatcaggagaggacgactctgttgggtggcccctgcaggcgagtcatagctgtggtttggccctttctccgccctcaaattcaacagtaaacatttgcccagctccttcgggcatcaggcctgggtttgatcctgccgagggactgaaggtgaatggtcagagctggcaggcttttatggaagcagaagaaacagctcctatccctttgtgtaaacaggtactgtccctgacactcagccgtttggtgaccttgaacttcaggtcattttcctaggatgggaatagttctctccatttccacagggtgctggcaagatttggtgacgtccccagtgaggtgcttggcacacagtgagggggtggtctcttctgcacgaccggggtccggcacagcaatggtgacgggctcaaccttgggaaccagtaaagtcccaagtcagtgagcagagtggttgtgggtcagctccctgca

SEQ ID NO: 62716 - DNA, 2545 bp, Homo sapiens
cccttcagaaactcagtttttacaaaaattagtgggcatagtggtgggtccctgtaatcccagctatttgggaggctgaggagggagaatcgcttgaacccaggaggcacaggttgcagtgatcggagattgcgccactgcactccagtctggcgactggagagcaagactacatctccaaaaaaaaaaaaaaaaaaaaaaaaagtcagtttgaagttggtcttagtttgtccctctcaagtttgtagagagagcccaggcagctccctcagcccagacagagaggacggaaccaagttcagaggcaccaggagcctggagtcctgaagctgtgcaaagttgggcacagccctgagtctggggggttggggagggcaggggctgtgacttacttgcggagggggagggcctcctctcaggagccacagcagggactgctgcaccgggaggtccaggtcagcatgtcctggaagcagaactgctggcgcctaggcgtgccctctcggtgccctcagctcggcctcctgtctggagggagcgcacaggcttctcttccaaaagtactttttctatcctttccagtgggttttaccaagggttctgacgggcgggtaggtacgaggttctgtgccacatgggagtgttaacaaacgtaattttattccaaaagattccaattcttttccacttccaattgaataacttagataacagctcatatccccgccaactttatttttatttatttatttattttgagacggaatcttgctctgtggcccaagctggagtgcagtggcacaatctcggctcactgcagcctccacctcccagattccagcgattcttctgcctcagcctcccaggcataggcacgcaccaccacgcccagctaatttttttcttttgtatttttcagtacagatagggtttcatcatgttggccaggctgatctcgaactcctgacctcaggtgatccgcccgcctctgcctcttaaagtgctaggattacaggcgtgagccaccgcgcccggcctccgccaactttaaaaacagaaacttttatctcatgacgaacgaacccaggtagagcggcaaggttctgtttcgaaacttgggttctaaacacaaaccgagcgtcgacagacgtggttctccgacagcaccccgcgagcgcggacccccgcgggtcctgaccccacgcccgccctccctcggcgccgcccgctcacctgcgcccgcgtccggctccaccagcacccgctggctcccgaagcgccgcgcgccgtctccgccgccggccgcccgctccgtccgcccgagggccgcgcccgggagccgggcccctgcgaaggcagcgtgggggagcccgttagttcccggtcctggccccggccccggcccgatccctgcccaccccgggtttcgcacccgcgcggagcagaacgcgcgccgggactcgcacagaagccaccagcgccatcttgaccgcaacgcgcgggataaaggtcgcgggctgagctcgcctcctggggagggggcggagcccccccaactaggtcccgccccgttcccagaggctggtcaacgcctccacctaccggccgaaacagccgctcgccgccctccggcttcaccccgggcagccgcgcgcttccggggcaggcacctggatctgggccagggctggcctacaaggaggcgcaggcccactgctgaagcagccacgaccagctcagcgccagggcaggctcttctacagcgcgggacactgtaggcaagaggctgccggtgttcgtgaccgcgagctctcggccgggcccagctactgcagtatcggcgctggaaaggcgatcaaagcacggaacccctcccgagggggccgtcagggaggccaggggctgcctggggtgagcccggcctcctgcccctttgggaacaggatcagagctgcaggtttagtcaccgaaatgggggtgggggcagcagaacccagcggtaagaacaggccacccgccttgctcagcacaagggcaagtgcacaaaggccggaccgcagtggcacctttttatttgcagagaaatgccgaaagataagaatacagtctgttcccgctgggccgtaagcggcagctcgggagtgggcctttgtactgtctggtgtggggttttggtcagaccactgggagcactgggcagtaaggtcccagctgtgttgggtggtctcaacttttgttctcatcttaagcatttccaattcttccttgtgtcccaaaccaatttttgaggtggaaaaatggccacttaacggaggaggaagcaagcctggcatggtgacacacacctgtaaccccagtgactcaggaccagctgggtaacatagcaacaacttgttgctacaaaaaattcttaaaaattagctcctgctgctgggcgcggtggctcatgcctgtaatcccagcactttgggggccaaggtgggcaaatcatgaggtcaggagtttgagaccagccgggccaatatgatgaaacgccgtctctact

SEQ ID NO: 62717 - DNA, 1431 bp, Homo sapiens
cgcgcccgccgacaccggcccgacacgccgacctcgccgctacccgtccgcgttcactcacaactcccccgtccaggcgccgggccgcgagcgcttccagggcagggcctggcgttgggggcttgggtctccggcccggcgggagggccccaagggcggaggccgcgctccccgctggtctgagtcccgcgggcctggctgggccaccgccgagcggacgaagcacaggcgcccttccgtccgcagcggccccgaccacttccgggccacggcctcgacacctcccactccgcccgccccgggccacactctttcttctcggagcccgcaccgcgctgccaggccaccgccgcactgcggggctgaggagtggaccggcttcacgaggcgtcctgccgggcctgccgggcagcccccgaaacacggatgcagtcggattccgccccaacttacatcttcccgccgccgccacctcctcctgctttcctcagccgccgaggccggcgccgctctgacgtcagagtcaaggagcgggaagtcgccgccgcccggcgcgcagcgatgacgtaaacgcctggcccaatgggcgccagcgaggaagcgttaaagagtcaaggcagtttgtgggagtcgcgctggggacgttcaaggtgtctcctagccggtaaagtccctgggactgaccgggctggttgcacgcttactggagcgggcacatgggtagcctgttgaacctgggagggcagcgcgatgaccgaggctcgtcctccggcgcggagggtgttaacgcgcccgtgccccgcccctttccttgcgcgggcgcactgggcccgcccgggcagactccggcccctgtcgccggcggtggaggcggggctccgggccgggctgtgctgaggccggcggggtggtagcacaggaggggttcgcaggctctgcggccgtgcgtggcggggcgtgggggcccgcagggcggaagtagctcggagagacgggctggggcagggcgtgcgttcgtgcggtcaaaatccactggtggcgtttggggtgttcccgtggacgcggcctcccggcaggcggacctccaccgggtgggcgcggcaggcgggctgtgcgggcaggaagagcgacgagcttgagagtgggagatggggtgcaacggcgggcctctccggggaggtgacactgccgctgagacccgaatggaagggcgcgcccggcgggggaacagcaggcgccgaggttcgctggaagcagggaagggaggcccgggtaccggctcgcaggcccgcgcgagcttcgcggcagcggcacggagcgtgtgaacggcgcagcgccgaggcttcatccatcggccggtgcagggtccgggcagggagcactgtcgaccagggtccgaccctgggagagtccagaggtggcgcctctggc

SEQ ID NO: 62718 - DNA, 1855 bp, Homo sapiens
aggcagcgcccagactatctgaataaaatgacgggatgcccaggagaagagtgaacctctcccacgtgctccctgcctgggctccatgctgtcgcggggtctcggctactcactcagcgggcatttctggagttccaggaacacaaaccccaacaagatccaatcgacgccttcccggagtgcacagtccaggacgtaacccggagaacaagcggcaattaccccctgaggacatggcttcatctgtgcgacagacaccaagcgccttccccacgcccctgaccataaggccgtcccggcccttctgaagcgtggagccggcttggaacagagccaagacacacggacgcgatgcacacaggcgtcctgaccgagggcgccgagaacgcggcctccggcgactgccacaagcccctccgcctggactagcggctcccctttcccgttcccacacagtggagggcgcagcaaacgcccgccgcggaccgtgggccttggattcggatttggaggctcctcggaaccagagggtgggagcaggcggaatccaacccgggcggctttgccaccgcgcgcccggcatccctgcggccggaaagcggcgccatctccgcaagtgcgcggcggacgcctgcatccctcggggccggggctgtcggtcgctacatatccaccttctgggcgcacacagagggcccgggccgtgccgagtctccgcagggtcgagcttccccgcgcggcgcgggctcaggcactgcccgcagtgcgggacacgcccaaggctcggatgggagccgacgctgagggagcggcacctgcagggagcgcccggagccgaggccgcggcaggaggggcgggcgcgggcgcggccggaggggatgcggggtcgcgggaggggcccgcaggccaggccggagctggggggggcccgaggcccgagctggccggcgagggtgggaagggcggacccgggtggggaccgcaagccccgggaacgagcgcgcgagcggcgggtcccggcggcactcaccgagcctgggcgccggggcggcggcggccggcgcgcggccctctcgcggggtcccctccctcggccacccgggctccgctccagcctcgcagtggcggcggcactgacagctgcgtggccgccctggaggggagggtgcgcctgcaacccgctactggcggacgcagcggccgctccggctcctgcagggggcgccgcggatggcgcgtgcgcagtcggccgcccctgcaggtgcccggtccacccccggccgcctcggccgctccggccagcccaaccccgcgcctgcgcggtgccccctgcatgtcgcccatgcccggcagagggcgctctgacttgcgcgtgcgcagtcagccaccctgcgagtacgcggttcgcacccggccgcgcggcagcccgtgcttgcgcactgctctgtgcccgcgcctatgtccagcagggggcgcgcagcggcggtagccgagcgagggcgcggtggcctctgacaggaatgactctgcgcacgtgcgtttcgcagcagtggaagtcttcacacccggaaactcgactttggccgtttctccatttctcctcacgcactgtctttccttgggccctcgtcactcctggcaccgggggaagggcttccccgcctctggccgggcgctggggcgcgaccgaaggcgaggcggcggcgaggaaccttctggaattcggccgtcggggcaggcgtcgagtttacaggagaaggcgcggtgtcccgggatgagcggagtcgccctcacttaaggagcgagggaggcctcgggggtccccagccgggtaggagtcacctcaggcaggag

SEQ ID NO: 62719 - DNA, 634 bp, Homo sapiens
acttgctgagctgagaaggtagagatgagaggtcagagctcctgaagtgtctggactttgtgggactaggacaggagaagagaaagctggtaagagagggagggccccaaaagtctctgtgcaggttcacttgaatctgtggctgagggctgggctgtacaagagcaggctaagagttcatggtgcatagcacagagcagctactgtgagcctgagctgttgactcagctgtgctgttggctctgctgggctgttggctctgctgggctgttgactcagctgggctgttggctgtgctgggctgttgactcagctgggctgttgactctgcgaggctattggctctgcctcttaaatagtgtggatacttcgtttttcatgaaagatggttgacatttgtagcagagcagcttcatttgcctgcttcctgcttgtaggaggttgactagaggccacttttcactttgaactctctctgtccctttttgtgtaagctgatacaatttatttaaatactttgtaggtttcctatgtatcacattatgaaatacagtttgttagactatggccacactcacaatatcttcaacacaagtctgtctaccttgggctgagagccatggagatatgggac

SEQ ID NO: 62720 - DNA, 718 bp, Homo sapiens
cagcggccaatgttcgaattcgcgtcctggcgcggccaatggcgggtcccggagcaggcggggagggcgtggagggcggtaaatgaggcgagcacagggcgggacatgggcggggccggcggcggcccccccgggcaggccaatgggagggccgggtgcgtttgaaaactggggtgggcggcggggcggggtctgcgcctgcgcgagggctacgcgcgctccggccggggcgcgggcgcgctctcaggcgggctccggcggcagcgacgcgagcgcggcgatggggagcggcggcggtgagtgcggggcgatgtccgctggtttctgccccacaccccttctgcctgccctgcggggcggacggtgggtcccgcgggaggggaggccctggcggcctgaagagggctggctcgagctctttaacccggggcggatgtcgcgtcccgcgcagggagccccggcggccgggcgcgcggtttaaatgcccggcgggcgcccgagcccctcggagccttcccccgcggcgacgttttccggccctttcctggggcaacgatcgggtcccggggcagcgatccggcgatcgggtcccggggcggcgatcgggtctcggggagccaaacaccagcgcctcctggtcggggaaagggctgcggagcgcgtgggggcgaagcgatcccgcagcccggccgggccctgaccgagcctcagtccagcg

SEQ ID NO: 62721 - DNA, 1840 bp, Homo sapiens
caccacccaccgagcgcggccaccgcgttggcggcatgagcgcgctcgagcctcccccagcggcgcccgcctcgccccccgggccgggtctggcgcacccggaaccccccggggccctgcgcgccctgctcttggccaccggcggcgctgggggctcgtggcctcgctgcattctgccgttcggtgccgtggccgtgctggctggtgcggctgccacggccatcaccttctcgctgcggggaccccgcctggacctggcccagggctcgtcgctggccgcgctcagtgcgggcctggggcttctgaccgccgccttcctgtgctggcgcgctcggcggaggcgaagggccgggcgcagggagccgggggcgccctgagccgcgggcgaggccccctcccatcgaggtcaccgcgagccggccgcccctccctccaacctcgccccggccgggcgggcgcagtgccaagcgtggtcgcagaggccgccccccacaccccatccccaaatcgtttcttctggaaccctttgggcagagaaggccaccggccgtttccctccctccctctctgctttccctctcttccctcctccgtccaacgtcgcatttcagcttttgacttggcgcgcagagctggcgcgaccgcagagcggcctggctgggcagcggtctgcgaggctgggggatcgacccggcgcgagggtgctgggtgcagggcagcgcgacgcgggctcggccacaccacccgccgttgggagccggcgctgtgtctgctcctgggctgtctgccttcggagctcggttggaaaccccccgaggcataataggcgctcgataaatgtgcaataggtgaacatgtggtggcttgcaggcgtctggggggagacagcaggttctgggctgggcagggaattattggatcaacgggcatcttacaggaaagactctcagctccctgccgcctaggactgtccagcccatctatgccctctccccagcctgtgccccaaagctggagctgccactctaggggtgaggggtggggtggggagggggaggcgaagcactgcggcctgagttgcaggtggggggaggggaggcggagcttctttgttgcagaaggtgccaggagggggcagggccagtggagaggtgggaggtgggagaggccccagccaggggctgggacaggtggctgggtccctggggagcaataagtcccgcttgggcgctgtggggaggcccttcctaactcccaaacaccatctgtgagggctgggggtgggggcagagtagcgtgtgcagaggactgttcctggggagaggccctgtgaccagcggcctcctccctggggagctggcggtacaatggccctctgggcccacggcctcccgccgctgctgctgacccagatgaacaattggggcagggctgagccccaggcacctactttcccccaccccagaagccaccagacgttctgcagaccccagtcctggctcacagggaagctgagctggagacaaagccagcccctctgatgagggtggaagaggctgctggccactgtccctcttgcagcctggctggcagccagtctggcagtggccctgacgtccagagacagcttgggtttccccagaggcttgtctctggccagtgggacccctctgtcaggcctgggcttttctctccactgtcccagaatgatgatctcagcccccatagtccccccagggttcctcccacccttagggtggggtgtcggggggtgggggttgggagccagaaggaccttgaagagggtggttgggacgtttcaggttctaagcttgaccca

SEQ ID NO: 62722 - DNA, 1620 bp, Homo sapiens
cccagcccccttccccgctggcccagcccgcgtctgaatctgcttctgattccagctctgcgatgaggccccctcccctcccctgcctccttcccgacccgagcagccccgcccccggctgggcccgggcttgcgcctgctgcgccccccaccccctcctggcacagctcgtccgccctcgctgcagccgggaggaggcggcggcccgtgcaccgcaggccccgcccgcccacggcccttcccgggaggccgggagacctgctccgcccggccctcggtgggtgagtgcgagcggcgggtggggcctccgcgggcggaggcaccgggagcgggggcgacgcctgtcatcgctctaggcccagcgggaggacgcgccaacatccccgctgctgtgctgggcccggggcgtgcccgccgctgctcccacctctgggccgggctggggccgcccgggggccctgttcctcggcattgcgggcctggtgggcagagccgcggagagggcttcttttccccaagggcagcgtcttggggcccggccactggctgacccgcagcggctccggccatgcctggctggccctgggggctgctgctgacggcaggcacgctcttcgccgccctgagtcctgggccgccggcgcccgccgacccctgccacgatgaggggggtgcgccccgcggctgcgtgccaggactggtgaacgccgccctgggccgcgaggtgctggcttccagcacgtgcgggcggccggccactcgggcctgcgacgcctccgacccgcgacgggcacactcccccgccctccttacttccccagggggcacggccagccctctgtgctggcgctcggagtccctgcctcgggcgcccctcaacgtgactctcacggtgcccctgggcaaggcttttgagctggtcttcgtgagcctgcgcttctgctcagctcccccagcctccgtggccctgctcaagtctcaggaccatggccgcagctgggccccgctgggcttcttctcctcccactgtgacctggactatggccgtctgcctgcccctgccaatggcccagctggcccagggcctgaggccctgtgcttccccgcacccctggcccagcctgatggcagcggccttctggccttcagcatgcaggacagcagccccccaggcctggacctggacagcagcccagtgctccaagactgggtgaccgccaccgacgtccgtgtagtgctcacaaggcctagcacggcaggtgaccccagggacatggaggccgtcgtcccttactcctacgcagccaccgacctccaggtgggcgggcgctgcaagtgcaatggacatgcctcacggtgcctgctggacacacagggccacctgatctgcgactgtcggcatggcaccgagggccctgactgcggccgctgcaagcccttctactgcgacaggccatggcagcgggccactgcccgggaatcccacgcctgcctcggtgaggccttggagggtggcctggggaccttggacacaaccagcctgcccctgacccatccctccctgcagcttgctcctgcaacggccatgcccgccgctgccgcttcaacatggagctgtac

SEQ ID NO: 62723 - DNA, 2504 bp, Homo sapiens
ggccgccccttcctgaccccgccccctctcgctctccccgcagcggtgcaggtggcggtgggtgcgcgcggcgaggcgcgcggcgcgtggacacgcttcccggtggcggtgctcgccgtgttccggagcggagaggagcgcgcgcggcgcgggagtagcgcgctgtgggtgcccgccggggatgcggcctgcggctgcccgcgcctgctccccggccgccgctacctcctgctggggggcgggcctggagccgcggctgggggcgcggggggccgggggcccgggctcatcgccgcccgcggaagcctcgtgctaccctggagggacgcgtggacgcggcgcctgcggaggctgcagcgacgcgaacggcgggggcgctgcagcgccgcctgagcccgccggctgggcagggcggccgctgctcccacatctaggcgcacgttcaccctgtgccttcgcctgccaaggagtccttgctcgcgtcgcgcgtgtcgccacctgggccgccgccccgtccccgccggcagctccctcggtacctcccgtctggccctggggggatgtgaccggcgcagcgacagcccgccccgcacagaggcagatgatatggcacacccggaggaccccatggtctcccgccctctggctgtcggccctgtcccaggggcactgggatacccggaaggctgtgaatccttcgtgatgccgggccctctcggggatctcagatcatccccggggccgctgtgatgcacccccacctgtgcggcgacccgccagggagcgcactgacctccccaaagactgtggccaccgcaggcgccttggacccccatggggggacagggcgtcccctgcctcctgcagccccacgagggcggcggccttggcccctgcgggctgggcgtccgcgtccgggcgccccgcggcgtctgctgccgggtcccgtaactttcttggccgcctgtgtccccgtctgccggctccgtccggccgtccctctctctgccgcgtctctgaccctcggcgccacagctcctcagctcagggcccgtcccagaacctccttccagcccttctcccccgactcgggaagggacgtcgtgcccacgcggttccggatccacgcgtgacccggccggaccgcgactccgacaggcggctgtccgggcccccgatgccctcggcagggccgtgccaccccccgccccccttggcttgtccccccgggaccgcactgccgttgcctcctctccgcacgggaccggttcccggccggccccagcttccgccgctgcggccgccgaccgtcagcgcgcatgcccagagccgggcaggccggagccccgcgggctctccggggtgggcacagggcgacagctcggcgggggcggggccgagcacgcgcgtgcgcagaaaggccggcgcggcaggctgaggagaaagcggcgcgcggaggtgggtgcgctcggggcgtgcggggggcgcgcggcggggtggcgggtggcggggccgggtccccgctgtcaccgcggtcggcgcgtgctgggggcgggagcgtgggggccgggctgcgggccccattcgaggcggggatccccggccacgcgcgggttgggggctccagagcccggcaccgcccggcgctgcagctgcggcttggcctacgggagggggcgcaggagcgggaccccctgggcgcgaggcccgatccccgcccggtcgctggcccgcggcccggcccagggcatggtgtcgtctggaagagtgactgtgtcactgtttccttggggcgctttccgtctccgcagggtcggaaatcctcttgggggctcggtgagattgcaacagattctgatacgccctgccctgtggacctgcagcggccccgggccccgccccgccccgcccagggatgacacacgcccccaccgaccacccgcttgggggtccgccagcccccggccctgtccagtggggggcccctctgggtgcgccgtgccaggcggccgctgtccttcgggccctgggaggtggaagccagggactcccagccctgagccagcacagcggaggggagagccggccccacctgggctgggctgcacctgttcccgccccctccaggcgggagtccccgcggcctggccacaggccttctttgatggccgtgccccgcagggaaacgcgctgtggcccccgggttactgcttgcgggggtgatattaaaggtcaaaggttgtctaaaagccacctgggtggtgtggaggtgcaggtgggctgttaggttggtggctgtggttgtgaagccgatgtcactgtctttacccagcagcttattccagaaagggggcgtcagcctgcccttccagtgccgatagaagcactagcgggtgatttttccctgttttgctgtgtttgctctggagtcaccaggtgacttccaggcagtgtgcagaaggaaccgtcccattatttggcacgtgggccgtttcctccacccg

SEQ ID NO: 62724 - DNA, 812 bp, Homo sapiens
ccctgaagcagaagggcatcaccgtgaagcagaagaggtaggtcgccggcagcctgtgaggggtacacccagggtcgggggctggggcaggacgtgtctggcgtgagctcatcctgccggcctccaggcggcctctgcccatggtccacccagccatctgtgcatggctgaaaagacactgaaacaggaagggccttcccagttacagccacagacgagggacatcgggtcctatcctctggggccaggcccacggctgagatgaaagctgatgctggccatggggtcgcaaggcatcgtgggaggccaggcccactcccagggtcatttcagggcagcctctgctccacccctccggctctgggctccgtggctggtctctgctgtggctgctgggcgtggcctccccgcctggagcacagccccaggggagcagggtcaggagttcatggtgtctgtcctatgtggatttggcagccagcgctgtgatggtgccacgctgcggcctgttggcgtgcagccctctttcttctgggccagcaaaggcctgtcgggggatcggtactcacactaacctctctttgtctgttttatttttcttctccatgtccgttgctttctcctgtttttcagtgtgtcactttctaaaaggtaggtctgaaactgtatctgcacacctggcctctgtctttccaccaggctgactctaggccagctgcttgctctgggtctcagggctgctctcgtgggccagcttcagcagcgctgcctctgagccggactgatgctcaggcgccttctgtctgtctgtc

SEQ ID NO: 62725 - DNA, 2074 bp, Homo sapiens
cggacgctgtggcagaggaggcccgcgcgccgcacatctgctgggacccttagctcgcccaggattggtagggagatcctggaagaccagcgcccggaggggtgaggccccgtcttgggggcaaggccgcgaaaccacggcctgcagcttcacgccaggggtacaaagaaaagcgtcgccgggaacccaacacctgcagacgacgcgcagccgcagaggaggcggggcgtccgaggccccgccccgtatgctaatgaagcacacaccacaccgccccgccccggcgcgagaccggtccaacgctgcggagatccagaggccggcggcgcccggaaacacccgcggaggccgaggcagggcggggccgggcgccggggccgggtcgctgggcgggcggcacagcccgggggaggtcaacgggccggccgggcgtcccggggacgcgtctcccccacggtgcgaagtggtacggctcgcaggggcggggcccaggtcatgtgacgcggccgcggccgccattttgttctgcggtgctggtatttagagcgcagcggctgacgggccggatcgccttcgccgccgcccgcccgcaaaccttcgtgcccggcccgtcctcgcccccgcctccgccaccgcctcggcccgcagagcttgccccctccccacccgcagacatgtccgagtccaagagcggccccgagtatgcttcgtttttcgccgtcatgggcgcctcggccgccatggtcttcagcggtgagcgcggcggcgggagggactcgggggcgggggcgcgcgcgttgctcatgcccgcagctcgccggggtccggtgtgtgacgtcactctgacgtaatcccgagctgtcgggggcgcccgggcctcgtgtgacagcgggcgggggtcggcgccccgagggctgcggggagccgccgggggtccggggcgcagggcgtgcgggcctggccggggtgtgagtctcgggggtccgggccggcggccctgccagccgggtcgtgcggttgcgggggtggggcggcggcgccgctgccatattagccccgggagcggcgagagggaggctggggtgggggcgcgaggggggcggcgcgaggggggccgattctgcgggcaggtgacatcacacctcgaaggccccagtgcgcgggcggcggcgcgggtccggcccaggaacgcccagccggtcgctggagctttccggctggtggggagcccatgtcccccacgggaggtcctcagccctcgcccttatggcggccggccccgagggtcaggtgggtctcacccacaggcaggtacttccggttggagctggttacagttgcccaatacccgtgtcgctgtgtgggctgtttgggaaagctgggctgagggcttggttcggagagcccgcggagacccgggtgggagtgtgtggaagtggagggagcggggagacagcagcatcggcgctggcggggctgtgtagcttgcagagggtctgtgctctgaggtgggtgagagggtggcatgggtgtccgagtttatgggatccagtcgttgccctcaggactgaggcttccagttgtggtcctaatgaatggaggggtgaatgaatgaccttcctttccctccctgaggcctgaagttgggaggggcttccctgggcttggagaaggggccttctagggttcttggtggcaccctgcttttgaaattgggccttgacaggtcctgggcgtccaatttagtgacaattggtctccctgggagaatggcacttgggctagggctaggcccaggaatgtgggtccgacgagttaagttctggcccagtctcagcctccgtggactggcctggcctggtctgatttccgcctccgtggttaggtctggttttagctttgatgaccgtgccctgccccaccctgcctggtggcctggggaggctcctagtgcagatatgtggagggtttgaactccaaacagtctctgctgactgtaaacacctgtggggtgggggcttggagctctctgttctcttgcgggcctccttctgcctgggcctgtctgccattc

SEQ ID NO: 62726 - DNA, 1217 bp, Homo sapiens
tgttcctgcgtctgcggagcggcccttgtctcccagctatctataaccttagctagagtgtcgccttgtgggttcctgttgctgagacttcctggatggagccgccctcaccgccgggcccgtggccctgcgcggagctgtgtccaataaagttcttggatgtgacgggcctgtgtctgctcagcttgttgggggcgggggcgggcgggcgggcgggcgggcgccgggcgctgccggtcacgtgggctggctcgatcacgtgggcgcggcggtcacgtggcgcgccgcttcagtcagctgaaggtcacgtgggcgcggtctcagctctcggctggggttcgtcactgggcgcgggatttggccgccgcggggctccggagccgctcgctcccgacacggctcacgatgcgcggcgagcagggcgcggcgggggcccgcgtgctccagttcactaactgccggatcctgcgcggagggaaactgctcaggtgggcgcgggccggggactgcggggctggggaccgggcggggtgcagggtgcggggccggggaccgggcggggtgcagggtgcggggccggggacagggcggggtgcagggtgcggggccggggaccgggcggggtgcagggtgcggggccggggaccgggcggggtgcagggtgcggggccgaggtcaggcccgcgatgcgagcgcccacccactgcgtccccagggaggatctgtgggtgcgcggaggccgcatcttggacccagagaagctgttctttgaggagcggcgcgtggccgacgagcggcgggactgcgggggccgcatcttggctcccggattcatcgacgtgcagatcaacggtgcggcccggggccggcaggggaacccaggggaggagctctgagctccatgcgacacttccttttctgtggctgcaggtggatttggtgttgacttctctcaagccacggaggacgtgggttcgggggttgccctcgtggcccggaggatcctgtcgcacggcgtcacctccttctgccccaccctggtcacttccccaccggaggtttatcacaaggtgaggtgaggctccctggctgaggtggagggggctcccggagcaaccagcgccctcattttcaaactcacgccccaccccccacccccagcacgtattccatggtcctgagtctggcctcctttgatgaccggatctgggcctggg

SEQ ID NO: 62727 - DNA, 2474 bp, Homo sapiens
ctggcagagatggttggtccacagggctagccctgggtggtgggagaggggcccagggtcagggtgagagagagctgggccagggagctgctgcaggatgattttgaggtgtgggggaagcactcttggttggttttggtttgctttttaaaaattgtggtaaaatacataacaaaagtaactatcgtaacctgagcagttctgtgacatgaagtgaattcactgctttgtgtgaccttggccaccatcattccccaccactcactcccgctgggctcccagccctgccccaccattccgctccctctacagctatgggttttacaaagaaggatgcagggcgccctgactgcggggtgaggggcaggcctgcccgcggtgtgggcattcgctgaagggggacgcccaggtgtctgcctgagttacgggttggggggtcgggcatgtggggagggatggagttggaggtgcatgctctcagagctggtaggggtggcccgtttcgtcccgtgtgtgaactggagatgagacccggcgcctgcgatcccgcagaccgcgcccggccgggtgtcacttgtgggcgcacgctgccgggatgctgggccgagcccgcggtttaagacccagatctcagccaggtccctttcgccgtccgagcctctgcacctcgtgggctccgagcacatccaggccagagactgcgtttggggcgtgggcacgggagaccgtcatcagccaggacgctctcgaccgatccggccgcgccccgcccagcctcgtagcgcaggcgctgagtccaggctgacgcgcaactctgggagcgttgcggcacgcggggccttgcctactgtgggaggggcttctgggggcgggcttctgtcgggccaattaggatcgccgcagggaaggcacgcgccgcggctgagcaacaggggcgcgcgtcaccttctctagttaacccgcgcggccccgggcacagagcccgaggctgcgcggtccccggcgggcccgcggaccccccccatctctgcgccccccacatctctgcggaccccgcctcgccccagccctcccatccacaaccctcacaaccttgcataccccgctacgctccccaccgcgccctcacattcctgcagaccccgtctccccacaacgctccccgccaacgctgcggagctccgcgtcgccccagcgctccctgccaagccccccacacccctgtagaccccgcctcgccccaaccctccgagctgctccccttatacccttgcggacctagtttgtttcgtcccagtcctccccgtcgcgtctcccacatccctgcggacctccccgcgcctcgcctctcccttctgttacgtatcacgcacaggtggatcccactacgacccagcttggctcctgtcccgcacctccgcacctggcctctagccccgccctcactgtcttgggaaatgaagcggaggggtgggccggacactctagaagcaccctggctcggagcttccctagctcggagttggtttggagcccaggctagggacccagggtgggcgcagcaggggagattggcaccagaagcgtggaggaagggcacctcttcagcccggcttttccgcccctggagtctgggacagctccggagcgtccgggtactccctcccagactggccctgttccttttatcacatttatgtcacacacgttttttctaaatgggtttacacttttgctattactttgcagttcggtttgtgtgtgtgtgacggagcctggctgtgttgcgcaggctggagtgcagtggtgcgatctctgctcactgcagcttccgcctcccgggttcaagcgattctccgcctcagcccccttagtagctgggattacaggcgcacgccaccacacctgactaatttttttgtatttttggtagagacagggtttcactatgttggccaggctggtcttgaattcctgacctcaattgattcgcccgcctaggcctctgaaagtgctgggattacaggcgtgagccactgtgcccagcctttttttttttttttttttaacacggagtctcattctgttgcccagcccggcgcgatcctggctcactgcaacctcagcctcctgggttcaagtgattctcctgcctcagccttcccagtagctgggattacaggcatgcaccaacacgcccagattttttttttttttttttttttttttttttttagtagagacagggttttaccatgttagccaggctagtctcgaactcctgacctcacgtgatgtgcgtgcctcggcttcccaaagtgctgggattactggtgtgagccaccacgcccagttttttttgtttgtttggttttttttgagacagagtctcactctgtcgtccaggctggagtgcagtgatgctacctcagctgactgcaaactcactgaacctctcaggttcaagtgatcct

SEQ ID NO: 62728 - DNA, 1315 bp, Homo sapiens
tccagcctgggcgacagagactctgtctcaaaaaaaaataaagttggccgggcgtggtgactcacacctgtaatcccagcactttgggaggcggagacagacagatcactggagttggagaccagcccctggccaacatggtgaaaccctgtctctacaaaaaaatacaaacatttgcctgtgtgtggtggcacatgcctgtagtcccagctactcgggaggctgaggcaggagaatcgcttcaacccgggaggcggaggttgcagtgagcagagatcgagccactgcactccagcctgggcaacagagcaaatttccatctcaaaaaaaccaaaaacccaaaacaaaaaaacacaaaaaaacattatcgacattaacaactacaaggcgcccggctaattgtatatttttagtagagacagggtttctccatgttggcaggctggcctcgaactcctcacctcaagtgatccgcccgcctcgacctccgcctcccaaagtgagccaccgtgcccggccgtgaatgtgacttgatagcccagatttccttccgtgaacgcttgttagttgtgaaactagcaaagttgcgcctctgagtttacgcagagccggctccggaatccgagttccgggttcgagcacagctccgccgctacctcgggcgtgaccttggccggagcctggtcccctctgagcctcagtttcccggtctgggatgccggaatgacagctcgccccctgccccgcccagccccgcccagccccgccccgcaggccctgggattggttcgcgcgaggtccccctccccaggcggggtcgggcctctcccgcccgccaggccccaacccggaaatgcagctggagcggaggcggagcccactaaggccgcggcggagcgacgatgggcgcggccaatgggcgcgggcgtcggctgcggcgcgacggaagtcctgcccggcgccgcgcgggggcggggcggcgccgggggcggggggcggcgggcgacggggcgggcgcaggatgagggcggccattgctggggctccgcttcggggaggaggacgctgaggaggcgccgagccgcgcagcgctgcgggggaggcgcccgcgccgacgcggggcccatggccaggaccaccagccagctggtgagcgcgcggcggcggactggacgcgccggtttgttaccctgccgggtccggcggccgcccgggtccggcgaggcggggcggcccggggtcccgagggccgggtgcctccttacctgcagccgggcggccgggccggggatggcgggcgccggccgagggcgct

SEQ ID NO: 62729 - DNA, 1380 bp, Homo sapiens
gttgtatgtattgatgtacagccttgaatgtgaataattattgtaaactatattttacaactttttttctggctttattatataaattttctattgggtcagtgatttaatcatataatttaatgaatctgtttatcctttttttttttccaaatacttgtgctttaggtgtagttaccagatgatgaattttcctcgtatggtcagtagtcttgtaataaaaagcatgtagagtgtagaggtttgctggcgtggctcttcctttgaccccgccacggagtgggggcgcggttgggggcgggtgtctgccattgcccgctagcgttggcgccccaagctcggtttcactccctccggaagtgggaccagccggctgcttttcccggatggaacttccgcctgccatgtgaccggcgggtgttctacaagggctgaccagtgggcgggacagaacgcaaagggcgatattaaaagccggactcttccggtgaagcggaggtgtggtggggcttgctgggatcatggcggggaatcactgcgagctcctgccgctggcccgtggcaggctcggggcggggttggggtggcttcttgtgcctcccttaaagcgcggggctcagcgtcctggcccagcgccccagcagcaggtccaagtgggtccggctctacagcggcggcacctacttcctcaccactgggcagacgccgctgtgtcaggacccgaaatccttcctgtacctcttgagccaggccgaccccgacccggactcggacaaggtgaggaccacgtgggccagtcgaaagggcctgggccatttcggcctgtggccgccgcacacgccctgctccacgccgaggagagctcagcaggagagggcgactctcctcgggcttcgagcccaacactcccttgtcgccagctcatccccagcttgccccgatcccctatcctgggaggggagggcaaggatggcgccctggtgtccactgcctttgagaatcctgagtcgcttcaccttgggggtgtctcttcctcgccctctttgctctttggtggaggaggcttccgagaccccggactttgctgtgattctactttctttttctcactaggttcttttgcccagggtgtgtgaacgccttctcttctctgtcccagggtacttgctggctctggagacagaacccttggcgtttcacattctggacgtttgaattaacgctgacgtgggggttgatatgggcggccctttttttccctggtgacttgtatttagagagttggcgctccatcctttccatccacagcacgcagcacccactcagcacctcttagaagatgcgtccatagtatatactgtgatttttcgaaggggattt

SEQ ID NO: 62730 - DNA, 932 bp, Homo sapiens
gccgcagccaagcagcgccctcggccggcgcccgccatccccggcccggccgcccggccgcaggtaaggcggcacccgaccctcgggaccccgggccgccccgcctcgccgcgcgctcaccagctaggtggtggtcctggctatgggcctcgcgtctgcgcgggcgcctcccccgaagcgctccgccgctcggggcctcctcagagtcctccttccctaagctgaactccagcaacggcggccctcacgctgtgcccgcgacgccccgccccccgcgatgcccccgccccccgcgacgccccgcccccgcgcgacgccaggcaggacttccgtcgcaccgccgccgccgcccgcgcccattggccgcgcccatcgtcccttcgccgcggtctgagtgggccccgcctctgccccagctgcatttccgggttggggcctggcgggcgggagaggcccggccccgcctgggcagggggacctcgcgcgaaccaatcccagggccccgggggcggggctctgcgggggtggggcgagctgtcattcccagctcccagaccgggaaactgaggctcagaggggacctggctccggccaaggtcacgcccgaggtaatagcggggctgggctcgaacccggggctcggactccggagccggctctgcgtaaatgcggaggcgcaactttgctagtttcacaactaacaagcgttcacggaaggaaatctgggctataagtcacattcataaagcggaaaacaaccaatcctaccactgtccatagtcctggaggcagcctcagaacttctgtccttacctataaatgattttgtggcggttttttttttgtttgtttttctttttgtagttgttaatgtcaatcatgattttttgcttgtgttttttgtattttaggtttttttgtttgtttgtttt

SEQ ID NO: 62731 - DNA, 1773 bp, Homo sapiens
agacatgagccaccgcgcccggcctaaattctaatatatgaattatttgtattgaattcatgttcggggccacgttgttatatgtattgatatacagccttgaatgtgaataattactatatattttacaacttttttctggctttattacaaaaactttctttttttttttttgagacagactctcgccctatcaccaggctggagtgcagtggcgagatctcagctcactgcaacctctgcctcccgggttcacgccattctcctgccgcagcctcccgagtagcttggattaccggcgcccaccaccgcgccaggctaatttttgtattttcagtggagaccgggcctcaccatgttggccagcgtggtctcgatctcctgaccgcctgatcctcccgcctcggcctcccaaagtgctgggattacaggcgtgagccaccaggccccgcccttattatataaattttctattgggtcaatgatttaatcatataatttaatgaatctgttctttttttccccccaaatatttgtgctttaggtgtagttaccagatgatgaattttcctcctatgctccgtagtcttgtaataaaaagcatgtacagtgtagacgtttgctggcatggctcttcctttgaccagttcatgaactggagtcagggtgggggtgaaggctagggtcgaggtctgggtcaggcgctcgtgcaccgctcgtgggaggtcgaggctgatgtccgctgctccccatcagcgttagtgcccagatcaccccgtgctccgctcccgccggaagcgggcccagcctcctgcttttcgggaccggaacttccgcctaccgcgtgacgccggggcgggcgctctaccagggcggacctgtgggcgggacagaactcagaggacgctattaaaagccggacgcttccggtggaagggagctgttgcggggcttgctgggatcatggcggagaatcactgcgagctcctgtcgccggcccggggcggcatcggggcggggctggggggcggcctgtgccgccgctgcagcgctgggctcggcgccctggcccagcgccctggcagcgtgtccaagtgggtccgactcaacgtcggcggcacctacttcctcaccactcggcagaccctgtgccgggacccgaaatccttcctgtaccgcttatgccaggccgatcccgacctggactcagacaaggtgagggcctcacgggccagcccggagggtcctggccttcccggcctgcggctcctgcacacgccctgcttcgtgcggaggagacttcagcgggagcgggcgactctcctcgggcttcgagccccgcgctcccttgtcgccagctcctccccagcttgccccgatcccctaccctgggaggggagggtgaggatggcgccctggcgtccactgcctttgaggatcctgagtcgattcaccttgggggtgtctcttcctcgccctctttgctctttggtggaggaggcttcctagaccccggactttgctgtgattctactttctttttctcactaggttcttttgcccagggtgtgtgaacgccttctcttctctgtcccagggtacttgctggctctggaaacagaacccttggcgttgtttcacattctggacgtttgaattaacgctgacgtgggggttgatatgggcggccctttttttccctggtgacttgcatttagagagttggcgctccatcctttccatccacagcacgcagcacccactcagcacctc

SEQ ID NO: 62732 - DNA, 1105 bp, Homo sapiens
tcttatcttagcccaggagctccgagaaggcaagggctgcatctggggggcctgatctcagggaatgtgtggatggacacaagtgtggctgtgggggctgatgggaaatgggggatgtggacagctgagcccttcagggtgggcgccctgtgggggctggaagcaacagccaggggtgccgggggtgtcaggagcattgtttggggcctgggcctgtgattcgctggtagctggtggggatggtgaagcttagtgggtaccaccagccagagacctggtgggagtgccaccctcgggctgggagtgaggacgtgtccaggagtccagcctctggtcacagctgttagtgaaccgactgcaaaactcattgccaaagagttttggcaatgaccttggttcctcaccccgctcaggggcagtcacagccttccacctcctgtgcacatggcttgctcagagggcaccatccttgtgctgggagactgggggcatggggtgggggaggccgggccactgaggggccactggtgccctcccacccaggagaacaaggaagcctggagtactggctaagctgcagcctgggatgacctgacccagccctgggaggtgacttgaggacagggaagtgtggtggctgccagactggctaggctagcccaggaatgtgagaggttttccctgacagagagtgtcccggcccgcagggaggggcctggcaggtggggccccctggctggcacctgctgtccctgacccaggactgggagagggcacggtggcgcatcaccggttcctctgtcagcaggagacagggccctctgccacctacaccccctgcccccagctctctactgagcctgcagccagcctgctggggcttccgggcacaggcagcagccctcggctcggccaccctcccaccccgagtatgatggtccaggcacttggagcctgagttcacatcctgcacgtaggaggcccctgtcctcacctagagaatggggggagaggccgaggtggcaggaagcagggagcctggccagagctggcacaccagtgcccgcggagaggcatgggaggaggtgctgcccagttatgccgg

SEQ ID NO: 62733 - DNA, 1398 bp, Homo sapiens
ttttaattttttgagacagagtctcgctctgtcgcccaggctggagcgcaatctcggctcactgcaagctccgtctcccaggttcaagccattctcctgcctcagcctcctgagtagctgggattacaggcaggtgccaccacgcccggctaattttttgtatttttagtagagacggggtttaaccgtgttggccaggctagtctcgatctcctgacctcgtgatccgccctcctcggcctcccaaagcgctgggattacaggggtgagccaccgcgcccggcctcattcagtattttattgagcgccgatggaacacagtggggctgggccgcgctggtgggaaagtcaaggccaggggtgtttgcggggccgagggcaggggaggcgatgggacatggggcggggtccggagttggccgcagcgaccctcctcccgggacagcaggccccagaagttcctcaggcgcgcgccagcgcggcccaggcggccgacccgggccccggctgccatcccttggaaggggcgggggcttcctggcaccaggcggggcggaagcggctccgggaaggccgggccggggttaccgtttcggtgtccccgcctggctctgggcgcggcgccgcggcggaagaggctcggggaggaagttatttggggcacggcgctgacgtcagagacagagtggggccgggccgtggggtcgggggcgccggacctgtttccccgccggcgccgggggtcggtactcgcgggcggggcggggccgggcggctccgggcggggctgggggtgcggccgttcccgcctcagccttgtccgcgcgcgtcgtggtgctgccctctggtgggcgcggggcgcggcgcgggcggccaggggtgcagaaggggcgctcccagcctcatggtccgggctccggctccccgcatcgccctccctagccccgccctcccgcgtctccgcctccgcctccaccgcctcctcccacccttccctccccgtccagtccctggagttcccgggtcgggggtgggaggcgggctgggcagcccctgggggtctggagggaaggagggagggcgaggagtgggaagaggggactccaaacgtattcattcatgtattgatttattcattcagtcagtcagtcatttctgagcagatttgagcccaatactgtccccggtttggggaatacaaaggtgacccaaacagacctcacctcagtgtgagagagagaacatcatttagcagagaaatctctaattataaaccgcgacgggctgggtgcagtggctcacaccgggaatcccagcactttgggaggccaaggcaggcagatcacctgaggtcaggagttcgagaccagcatggccaacatggtgaaaccccgtctc

SEQ ID NO: 62734 - DNA, 2711 bp, Homo sapiens
cacttcaacctgagagacaggttgcagtgagccgacaacacaccattgcactccagcctgggtgacaagtgcgaaaccacgtgaaaaaagaaagaacaacaacaacaacaaaaaacaagggccagatagggtgtcatgcacgggtagtcccagctacttgggaggctgaggtcggaggatcgcttgagccccaaattcgagaacagcctgggcaaaaccctgcctcttaaaaacacccccaaatcgtaataacaaatataaatccttgcactcaaatggacagttcattacgtggtaccgcgtcctgttgcggatcaaggccacctgagttggttaggacagctaagcgggacgtccagggctgctcgccagcggtgggtctagatatgaacttgtgcttgagcagcccagcgtcttacaactctgctgtgaggacggctggctgattatcaggcccagaatcacgggcttagaaacattaacaggaagtacggtaccgaaaagtggaaactttaaggtgcttattattttcctcctgccttgttcctgtatgtgccgcttcaccggtatcacgtcctgggtctggtgggaccccggcctggctgccctaccggaagctaagaaaactcctcccccaggggtggccgtcgggcctcagcccggtctacagcgggagaacgtggcccatgctacgggtaactggttgggcccctggtgcaggtctagggcctgcagccaggctcggggcctccgggggtgcccgctggctggggtctgaggcggcttctctcgggtacgggaaggcggactgctgtgcagctgcgggctcgctcgggaaacccaaagtcacacgaaagcggcagcaccaccgcggctgggatatcgtctcccaacatggggagacaaaatggccgccacgccccgagccgaaattacatccgggctccgcgacacgcccgaaccacaactcccagaatgctctgcatcgacagcgggagacgagacgcgctcgggcgtcgctttgctgccgctaggccctgtgctcctccccgcagcggaaggcctacgaatacgcggtgtcttacgtcgcttcctccgttcttcgttgcactggccaacgggacgcttagtctttcggcaacggggtgaaaccttccttgtgcctgaaaaaacggtacttcgcggtgtggcttcggcgcctgcgcaaaaggccgcggggcgcactccagttcccggcaggccccgcgacgcgcgtttgcgtgctgacgcacgcagttagtcgtgctgacgtgcagcgcggcccaggcggggtgcgagtggcgcagttggagcccgttgcggcccctgaggaagcgaggaggcgtcggcgtcggctgaggcgggcggaccggcgaggcgaggcggcggccccaggcccgagggactcgggagctcgagcagcggcggcggcaagacctctccccctcggaggcggcgggcggaggcggcgggtgagagggtgagggagccagcgagccgggtgggggaggggcggcggccccggcgcgaggccaaagcgcgcggagaactgcccaggccgccgagctcctccgcgcgcacgcgcgctcgacgcccttcgctggcgcggacgccctcgcctcccttcccccttcccgccgttcctgtcgcgcgcgggcttcacccccccccgcccctcccccatgacaacggcgttcgcagccgcctgtactcgggttcgcgagcgcccttggtgaggggggagggcgcgcgcctcggcttcactcctccccccaacatgtgccgccgaggtggccttcctgcagctgccgttttcggcccttaagtggcggggaaggggcggcggcggggggcttgctcctggacccttgcccccggttccagatctcctttcctcgggcttctcttcggcgttgggctgcccgtgtcgggggcctcccagactgcgggacgccgcgcagccccctcccccattccgcaaggccgaaaataggcccccggcgctgcggggagggccttgaacttcgtgggccggatttaaatggtttaggattcccggctatcagcctttgagttgttagtggcggggagaaaccccaaatcttaaaaactgtgaagaaagtgaacgtgttcagtttacatttgtaaggtagaccgtgcgttccctttttacactttttcaacgtctcccgagaattcgtgttcaaactaaggaggcttttggagaccttcgttgggaagaaaacgccagactcatatataagttttctggttggtttcaggcgttctttggcacacagctcttctgaagcttggtttccactcggcttcagttaggacgaatctggatcagaatttcagagtgttgtgttgtctttcatcctaagtgcgtgggcttagggctcttctaaagctactattttagctttctgggttctttgtgtccactcagccgctctggagcgccccggtgctgagctggctgtgcttgctgatgtccatttttttcgacaacccttgtctcccctttttctccccttttggtaccgttttcttttttgcatattttactgttgaattcaaatatatctttctacttcattgttagcttaccactcggataatttcccaacagaaaagggtgtttttgtcttcctttgtactttttactttctgcttttaacttgggtaac

SEQ ID NO: 62735 - DNA, 2795 bp, Homo sapiens
ctctgtcaccctggactaggcatttgaacatttttttattttagagacagggtctcgctatgttgcccaggcatgcagtggcacagacccaacataagcgctatcatagccccctccagcttggaactcctgggctcaagcaattctcctgcctcagccttcagagtagctgggactacaggaccatgccaccacggctggctggtagttgagccttttgatgcaaagtttcctcatctgtaaactaggaattaccagaattctcaattcgtagggccaccagagggtttcaatgagctaggaagaaacataaagcactaagtagacatgtggcacacgggacatgcacaggcacggtcatttaatatttgctaagtcccagtagttatgagtgaggaaaggcctttagagaccatgggagctgaggctctgagcctggagctaaaagtcagtttcccagtttccagctctagaatctgaacaatgcacttgggcgacaacctcacaatgttgggagacgtaaatcagaggctgatgcatctgactccccaatgcagaccccaaaccccaagccattctgactgaataatctcagttcgtttgcaaggggaaaggggggcttctaggacatcagcaggaggtcgggaggtaataacaaacggttgcttggtgaagaacgagtgggacctgactttctttgcattcactgagttccccaccctccacccgaaggagtgtccggggggacagcgtgattccgatgggcctgcgaagaagggtggggattaaggggtcgtggttcgaaccctggcgctgccaatgacctttggctggttaagcgaccaagccgaacctcaatttcgtcaactgcacggcgcgggcgataccgttgcaggggttgcatgccacggtgccctcggcgcccggggcccggcacgaggtctaaacatcgcccccggaccggagatccccgcggcgagcgcagctcgcgcttcacccgcacaacggatgtcccagtcccgcggctcgggcgcccgcaggcgtcgccggccgctactgtttacatcgcggacagcgtaggcgtcagccccgtgcccggcgccgggtacccgctcccctcggcccgcccgcgggacccaccttgtacagccgctgctcgtcaggaggccgcttgaggatgccctcgacgatgcgcttcagttcgaacaccgtgctggactccttggcgtccgtgaagatggtggtcttgtggcgccggatcatgaggaacacgtcctgggggcggcgggccggcgtgagcacgaagcccgggccccccgcgcggcccagccgccccccgccgcccccggcccggcccggccgcccctcccccacgcccgctcaccatcgcggctgctgcctctcccctcgacgcgccggcgcagccgcgctccgccccgttcccggcagcccgcgcgtggcccagcatgccccgcgccgcgtcccttcccccggcgcagccccgccccgtgccgccccgcagccgccgccattttaagtgatctggaagcgggcggtatcgaggggcgtgcggccgccatcccgacggcgggcatggcctttggaggcggtggcgccgtcttgggactggcagaggggaggtccccgtgttggtgcggtccggcgggctccaagctcgggcacaccgagctcggggccgtcttgtcgcggcgtagtcgtggccgccatcttgggcaggctccgcatttggggtcttctggccgccgtgctggggacagtcacccccgctccctgacccgggctggatgcgaggactgtcgccgctcagaggggcttatgacctgtgaagagccctgggggctgctgttgggcttagggatggcccgggcgaactccttgggctagaagaggaggcacgggagcggttggcgaccgctcttcgcaggaggagggaaggggcagctccttgccccaggagccctgggcgcctgtccgccttcctgcttggctgcatttcggctctgaaaaggcctagagacttgattctcctggctggccgctctttccaccaaggccctgtttcctgaatgctggacactatcctgcatcgccccaagttacatttacatgagagtgagggccccccacttgacctctcccttgcagagacaccccaggctgggtcgtgctgggcgggtgtcggaggcggcgttggagagatgagccagagggtggccctggacgccaaaccgccctgcagtcctccgagctgcgctttgagggctgttgagagaggggtggaaggtggaggtgcgatttttgcctcggcatctagagaggcgaaggagcagccctgggctccgctgctgactgtggccatgggccgttaacctcatcaaagcccagtttcctcctgttgtagatgggagaggaacagtttttgaactgcgtagaacctcggcaagtcttagcgctgcatttgtgttttctaagctgtaattctagttattgctacttttgacttgtggaatgtggctcctccctggggagtcctccaaagtcccttccctcgtgtgacttccttcactgcggttcactgcagcccctacccccgctcccagggtcctcagcatcgcagtccctgcagaacctgtctcttcttcatgacgtgagtcatgaggcattggacaggtaattgctgggaagagctcttggccaggctaaaatttctttctcagtcgcagtgtctggctgggggcggtggctcacgcctgtaatcccagcactttgggagg

SEQ ID NO: 62736 - DNA, 2000 bp, Homo sapiens
tgggtgggtgaatgggtaggtgggtaggtgggtgggtgagtgggtagatgcatgaatggatggatgaatttatgagtcagtagatgggtgggcgggtggatggatgtacaaatgggtgagtggatggatggataagtgggtgggtgggtgaggggatagatggacagaaaacacactagcgggaccaggcacagtggcttacacctgtaatcccagcactttgggaggtcgagacggatgatcacttgagcccaggagttcaagaccagccaaagcaacacagcgagaccctgcctctacaatctacaaaaatacataaccaggcgtggtggcgtgggcctgtagtcccagctacttgggaggttaaaacaggagaatcacttgagcccaggaggtagagactgcagtgagctgaggtcgcgccattgcactccagcctaagaaacaggagtgaaaccttgtctcagaaaaagaaaaaagaaaaagaaagaaaggaaaagaaaaaaaagaaaaggaaaggaaagaaaagacactagcattcatcacgatccaattttggaccaggcgcaatggtgagtgcttacacaaggactgcctcatttaatcatcacaaacacccttgcggtgggtgttaatctcacatttttaaagacaaggaagcccaggctgagcgagtgagtcatggaattccaaccgcaatcccacagtcctcctgccacttcctgctcaggtgttggcccagtcccaccattgtcgggggaggttctttcctgagagtccctgcgtcccaagtgcccaaatacttcagccaccacaacatgtgattttcttgtcctggaattctgaggtccacatgcatacagtgccgctggcagagcctgctgtaatcctgagaattccttttcatcgactcactgcaagttcagagacaaggcatcgactcactacaagttcagagacaaggtgcgtgccagacctgcaccctgggctccagggtgaggaaggaaccgctcgtcctacgctgggtccctgcctctgctcctgcttgtcacccttggccaaacgttccccaatcccgagcggctctggcctttggacagaagtcagcctgtcagccttctggaacacctgcgtccattgtggccacttcctcatccccagaccggctcagtcttgcaggggcgtttgaattgtttcctcctacacaacactgaactgtgcagctcccgccccgacctgtctctaaacagtgtcactagtcccaaggcctcctgcaggccactgggcccacagacaggccaaccagcaaactgggggtcccactgagagacacctggtgctggttgccgtgcacttagagtgggccaggcagctggaacctaagaggagctgctggaggaagtggagcaccttgaatgtcacctggactcacgtctgcccctaccgccccctcggacccgcacccaccccccggcccaggcaccaggtgaaccctctgtgtctttccaacaagccccaggcaggaggggcttcacaagcagaagcaccagtcttgtaagtcctctacaaacagcacctgtgtgaggggccagagaaagagaagacaaagagggctgtgtgcgcaccacagtccaggtcaggcgcggaaaatccttctgtagcttttgctgttggctgaggccccttccttctaactcaccgttggcagaagtcggatgcctcggagagaaaagaggctcagcaggcttcccctgcccgtgggggtcaaggagcgttcgtgctgtccactgccaggaaatgtggggggttctgaggaccacacagacacacacacacacaaatacacacccattcaaacatacacacaaaatacacatgcagacacacacgcacacaaatacacacccatatacacatacacacaaatacacacccacccagagacacacacaaatacacacccatacacacatacacagacaagcacatacacaaatacc

SEQ ID NO: 62737 - DNA, 1379 bp, Homo sapiens
caagggtcttaactatctggatgtactcattgtatgctaaacagacaccaaaaggattgactaatctcatttttatgtacagagaatcaattcccgaaaaatgctgcaggttttgcatttgttttaaaattttaaaggtcataatatttattaatacatatttatacccttagaattcccaatctggcagcaaatagagtcccattctattatgccattgaaagtaatgataaaaaccgcagttacttttgcaccaacctaataaaaccatgattaaaaaaataataaacatttaaaaagcggtggggggagtggggcgcgggggcgagccggagaagcaggcgtcagtgtttgctaaagaaaccaaggcccagaagagagttaaatgttttgcccaaggtcaggcaaagagttggcaggaggtctagaggagaattcaggcttcctcatctaaactccaagcttttccgcccaagcagggcatgccctggggccaacccctccaggaagcctgggtagtgtccttccctgcatttccccagtggctgctgcctcaaggtgactcagaaggaagctgttgtctctagttcctcctcaccaatccagctggtcttaggatcgggaaaaagataagctaattgtctggtggttaattaactccagccaactaatgatctgaacttgccgcggatacccagccagcggaagtgcggttaactgcccgagggatgccccgaacaccggccgagccaacttccggccgcagaggctgccgggcaggggttatggcggccgccagagtgagccagcttggtgtccggggacacttggggcactgcggatggacagcgctggttttcaataccagggacctaagtccgggtggggagcggcccctcagcgccccagacccctgccacggtgccggtgacgggccacgcccaaaatatcaggaaaagcgtctcagtcctccttgtgggcggagaagagacccagcggccgagcccgggggcctcagatccccagctgctcattggcctgtgtctgtcgccccccggtggccgcgtgagggactggagcccggctttgctcctcccgttggcctcgtttctcttcctggctttgcgtgtcccgaccactaaaagccccaaacatgacgaagtaaaatgggcaccgtcaaaaaccgcatttgaagacagtgcgcatgagcgcatggttaagttttcagacgttttgcaagctggatgttaaatacattttttgacgtcattgttaaaaaataaattttatgagcctacaattaaatacattatattaaaaacaaaggtagacgcctgcgcggtggctcacgcctgcaatcccagcactttgggaggccg

SEQ ID NO: 62738 - DNA, 1123 bp, Homo sapiens
aggcagtggcttccatgagcctaaacaccttccctccgcacgctcggtatcgcgacgggggagagcaaaacctttaaacaaatgctccagttttccccgcagagagccggagtcaaatccgtgaggaagcccgggggtcgcagtgaagcccaacccactggtgctgggataacctcgcccgcaacccggatccaggccgcaggtcccccgaggctccgcccctgacggcgacactcaatcccgggtgtccccgcccccttactgaattttggccccgcctccgccctccgattggccggacgccagctctacgccgcacgggcaagacgcggaggagcggccccagccagaagacagggcacccgcggccttgctgcgcatgctcgcgctgtgaccccggcttgaggtaacagcgcgagctgaggctggggcccttggcgcggaggctgagggacccgccgcggcgctgtcgccggagagggagggcaccgctgtcgtcggtgaggacgggccctggcgggcggggagggtcctgcgtcctcggcatggacgagtccccggcccggctctctcgggggtcccgagggctgcgggtgctgaggaggggtccgcgtcctggtgctcaggccgcctcctgtggggtctcccgcgattccctctttgcctctcgcccctccttccccaccccctccagtcccttgtccaaagcctcaacacccccacacgaaggaggtccgcactcgcccgccggtccctggccgtgtccgccgcgcccagcgctgccttcccggcaccccccaacccccgccggcctcgtcccacggttgcagctcgggaggtccctgcagggacggcagcgagttggaggcgtgagatactggggcgggggagacactcggggcctcagggtgtgggtattcttgagagaggagagagccggggagctgggaccatttgggcgcagcccagcccgcgtttgatgccaattgcattgggtaaaggagtgaaataaagattctgagccctggtgattaggggaaggagctgccatggctgaaattgccatggtggggaagctccgcgctgcacaccttagagtagcagttcttggccttcttggggc

SEQ ID NO: 62739 - DNA, 1749 bp, Homo sapiens
ttctagaagtgagattgccgaactggaagaatgcaagttacattcaacccacgtcctgcgaatgccgatctctccggcatttgtcaacacctggttttatcatcaagaagaaaacagtaataacgcgtcctccgcttggccctagcgtgcacagcctctgcgcttttcacctcgaggtctcattttccttggacagcaccgagcgctgggcagggcctcatccgggttcagggccggaatctggagacgttctggccgatgctcctgacggccgggagagggcgcgcgcggactcagcggcggcccagcagcctccccaggacccaggcagtgctggcagccaggagtgcggttccgccccgcagcctcagtcccgctccgcccacccgcctgacccccacccgggctccttacggcccagacaccggctctaaggtggcttctgcagggatgggaggtgggcgactgggaggggtggagggggcctgtgtgttgaccctgcgggtggcagccgttgggaaattgcaatggcgtccacactgtcgctgcccagggcgcgagccgcagcctctcctcccgtctcgcttcctccgacaggcgcccgactcggacacacggcgcccctgtggttaccacatccactgctttttggtctcctcacccaaccccttaacataaactcgacaccagggaaggcatcttggacgattttggtccctgagggtcctagtgcgaagggcagggagagagggagcggtgtggtgcagggggatacagaacgcggaggacatctaggggctgaggatgcggggacgaggagcgcgcggaagagccgaggttccggggttggggggtgcggatttcagaggaaccgccggggatgtggacggactcggaaggaaggggtcccagagaggacgcgggcggctgcaggacacaagaggtgcgggacgcaggaggccgtggggtcgtgcgggagcccagggcacctcgacatggacccgccagacctgtggctcctccagcggccgctttagagcgagaggaggtgcgcaggccgtgaggcgggtctccctggggtctcccagggaggagcggcgccctccccgagccagccgaggacgcgcagccagaggggggtcgggcggagagaagagtgcgggcggaccgggacgacccctgggtgataggagagccgcagtgagcccagggcacggtgctggggccgctctggccgccgccgccaagcgtcacaggaaaacagcaaccaggaccccgcggctcctggcgcttggactcagcccggtaccgcaccgcgttgctggagaatgtgtccttggcgcgcgctgagccaggaagggacagcgggaagggcggggcccgtgggcaggggagggaccagtgggcggggaccgaatcaattcgctagcggtgagccagtggtcgagggctaaaccaatgggcaaggcgtggaccaatgggcgagtgctggacatcaatgaatggggcctgaactaatgggcggggtggggccaaggggcggagctgagccaatagaagggagcggaaccaatgggtggggctgaaccaatgggcggggcggggccaatgggctagggctgggccggggcggggccaatgggctagggctgggccggggctgggccaatgggcggggctggaccaatgggcgggccgggccaagggcgggcactaagccgacggaaggggtggaacaaaagggcgggg

SEQ ID NO: 62740 - DNA, 1372 bp, Homo sapiens
ctgacaggcccaagagtgcatctcagcaaacgctccgtttcctgcgggcagcctcagatactggggaccgtcctggggtctcaattaagcgccccctaccccagcccctttacgccaagagcgtcctgttcagctcccccatcctagctccgcccctggacgccgccgtccaatctcgggatggccccgccttttccgtgagttacgtccccgcccccatgcgctgacaggccaggcctgcggctcggcgccgcgcagggaagacccggagcagcggtttacctaaggaacgggccgcgcggtcttgctgcgcatgctctgaagtagcgcgcctgagcgttccgcaaggccggctccccggcggggtcgcgcgcgcggtcacggggctcgctcccgaggggcaggtcggggctgggagctggtgcccgggtcggggtggcggcggcggcctgggtcgcggggtcgacgctcgctgctgcagcggcagaggctgaaggatccgccgcggcgctgtcgcgggagagggagggccccgctgccgtcggtgaggacaggcccctgcgggcggggaatgtcccgcgtccccggcgtggacgcgcccgcagcccggctctcccgggggtcccgagggttgcgggtgctggggaggggtctgcgtcccggcgctcaggccgcctcctgtggggtctcccgcgattccctccttgctcctcgcccctccatccccacccccccgtcccctggcctaagcccgacacccccacatcaaggatccccgcactcgtccgccgtttcctggcggtgtctgccccgcccagcgctgccttcctggacccgcagcatcagccccgtcccacggttgcagctcgggcggtcccagtgaccttgcacttttgcgggtcgggacgcaccccgctcccgcttctgaccctatagatctccggtgacggctttcgaactttgttgacccacagccgacactgagaaatgccttttacgcgtgtactctgtgcctgtgggtctggatgactgaagcacaagtttaaagggagacgcttgtttaagctcacatgacgcagctggatctgttcggattaaattccgttccattctcttccaccccgttccaaaaggctgctgctaacccatggagcctgcacataacgggtctgacgtagttgaaaccctcgctctaaaccctgcctgttgttcctttattccttgtactggaagctgaactcccatagtcagataatcatgtgcaaactccaattccaacgaaatggcttatttttatttgcatatttctgctttccaagggccaatatgatttccagggcttgatctagattttctcgtgtgattatatcat

SEQ ID NO: 62741 - DNA, 619 bp, Homo sapiens
gtgttcttgagggtcttgcagtcgggttaagagcaaggcagtttggagtcagacgggctgcgcctgcatccctgccctcatcacggccagctctttgatcctaaactacacaacctcttccgagactacacgggcccacgatcccttatctccaattccaaagtgaaaacccggaatccctcaagtgtctttctttttcataactgtcgtgccaaaacccagttagtggtgtccacttccagaatggcagtgtgtgcagctccgtggacccctgccccagtgaaacagcacaactgatgacgattattcaaaagcaagcactgaaagcctctgggcatggtgcccagggcacacagcaaacaaaggtttacacaagaaaacctgccaaggcctgggaataatggcaagcctgttggcacctgagccatgacactcctgccctcccacctccagcacccctctccccccgcctagcactgggggcaggtgtggccaagaagaagggctccctctcccccagctccccgtcaagggttagggtgtttgcccaggagggccaggttctcagcacttctcaaccctcccagctccacatggcagaggctaaattccagctgag

SEQ ID NO: 62742 - DNA, 971 bp, Homo sapiens
gggcggaggactcccgtgagggggaacggcccgtgaacgcgcgcggagctgctcgcgccaaaaattccaaaccggcctcgaggctcctccccctccccagtgcagcccgtcaggggtgcccgggctccgaggctccgcccctcgtgctgcgtgcgcgccgccgagccgccccgccgctcactgcgcaggcgcacaggattctccgcgctggcccggggcgtgggtggcggcctggttctgagtcgctgcgcggggcttcagccgcccagtccctgggacgcccactgccctccaggcctcgcacccgacacccaccgccctcgctgggctggcgtagtgtttgggtccataaaagggaccgccatcccggtgctcggagcaggcgtagccccagggttactccgggtaggaccaggaagtccctacggcctcctgggtcccggcaccccccttctcactccggccgtgttctgaaccagggtcgcggtgggaggccagacgcacgacccccaacccctagcgcacggcttcgggagccagaaaaagccgcctcttccaggaagctctccagataggcaggactctgcttggcctgacctcgcctgcctgcagcttccctgccaacaggcctcagatacttttttttttttttttagacagggtctcactgtcaccaaggctggaatgcagtggtgcagtccccaggttcaggcggttctcccaacctcagcctgccgagtatgtgagatcacaggcgcgcgccaccgcactcggctcatgtattttatttttagacagggtctcattctgttgtccaggctggagtgcagtggggcgatctcgactcactgtaacttccgcctcccccgctcaagcgttcctcccacctcagcctcctgagtagctgggaccacaggcgcgcgccaccacacccaactaatttttgcatttttttgtagagacggtgtttt

SEQ ID NO: 62743 - DNA, 4224 bp, Homo sapiens
ggcaggtcgaggcttcactgagccaagaccgcgccactgcaatgtagcctgggcgccagagtgaggggctcagtccccaaaaaagccacctaaaaaacaaacaaaaaaaaaattggtgaggcgccgcgcctcggtgtcgcagcgaatccgcagatcctcaagccaggtgggggcgcccactgcgcgtgtgcagcgcctgatagccaggctagctgagggcggggagcagctgcggcacctgggacacagcgattggctgggaccaggagagggcgggaagaagaacttggcggagcgcgctcatatctctgattggctgccaagggtagcccttgacagctgccgggtgggacccgtagaccgcgagcgcactggcccgtgattggttggggtgcggcggcgagcatctgcgattggctgggccgctcggagtgcggcgcttggccacctcccgaggtaccaggtcacggctggcggcgcgctctggggccctgggctggcggccgcaaccggggtggcggccgcagccaagctggcggcgcggctgccccgctccagctcgcacccgcggctcgcccgcgcccgcgcccactcgcgattgggccgggcccgctcgacgctgccgcccaccccgctgcccccgccgtccctgccgcacccgccgttgcccggcctgccgcccggcctgagccccgggccgccgacgccctccgctctcgccctggccgagctgccaccgctgcccgcgctcccgctgcggcccgagccgctggcgccctggggccccggcgcgcatctggcactgcccgagctgccgcccgaagcctgctcacccgcgctctccgccgccgtgctcgcactgcaggacctgccgcgcctgcccgcgcccgcgcgctccgcccgcgctcctaccgctgcttccgctgcccgtgtccgccgtcgcctcagcccctgggcccgtgggcgcgctcgtccgcccgcccctggtctccgagccgccgccgcatccgcttccgccgctgcccgcgcgaccctctcccttcagcctgctgacggcccccgagacccgcgacccatggctgctgtccgcctttcccctgccaccgcccgtgcccctgtccccgcatttcttcctgtcgccgccctgctgacctggcccctcccgcggcgggtgagtaggcagcccccgacagggccagtgcccgtagccaccttccccgggcatggattcagaggacgggggttagagcccagtttggggaagagagaaggagaatcggaagcagctcaggtttggtagagaaaggagcgagtctgaaaatagacttgtctaaagattcgggtcttccattttcccctgctgccctccagcaggcctcttgctaggttatttgagaatgtaacccgtcccctgggctgataacctggctagtgatcagggcagcgggcggggcccacagcacgtgtccaaggaaatggggatcaagggtatgaaaacaaaagtttaaagtgctgggccgggcgcggtggctcccgcctataatcccagcactttgggaggctgaggctggcggatcacctgaggtcaggagtttgagaccagcctgaccaacatggagaaaccctgtctctactaaaaatacaaaattagccgggcgtggtggcacatgcctgtaatcccagctactcgggaggctgaggcaggagaatcgcttgaacccgggaggcggaggttggggtgagccgagatggtgccattgcactccagcctaggcaacaagagctaaactccgtctcaaaaaaaaaaaaaaaagtttaaagtgctttaactatatccaaatatttcatttctcttataaataaagggtctggatgccatggctaaggccatcctcagtgtatggctcttgaaaattctgatcctgccgcaaaagtctttttttttttttttttttttttgagacggagtttcgttcttgttgcccaggctggagtgcaatggcataatctcggctcaccacagcctccgcctcctgggttcaagcgattctcctgcctcagcctcctgagtagctgagtttacaggcatgcgccaccacgcccagctaattttctatttttagtagagacggggtttctccattttggtcaggctggtctcaaactccagacctcaggtgatccgcccgtctcccaaactgctgggattacaggcataagccactgcgcccggcctttgaaaagtcttcagaagtcaaattttcaactgaaacagatccaggggtcgggctggctgtgcgcaccagggaagcagtggtggggatcgatactggacccaagggtcacatgcaagggctgtgaagtcatccccatgggacaggagagcttcccccacccccacccgggctgggccctgagaggaagctcctgttctctccagctttgcctgcaccccacctgccagtttctgtgcagcctctacaacttaataaagttctctttgttccctaggtggcctgagctcaggtaatcaggcgaaaattctttctcagtgggctcttctccagcagcctaggactggtatcagaaagccaaccttgaccctgggggacctcggagagcccgggacccaccaccaagaagggcagtgtactagttctttgtgactgcagtaaaaattttattttttaattttttttatttttggtagagatgcggtttcaccatgttagccaggatggtctcgatctcctgacctcgtgatcttcccgcctcggcctcccaaagtgctgggattacaggcgtgagccaccgcgcccggcctgaccgcagtagcaaatttatacacactgcatggcttcaaacaacagaaatgtattcgttacaattctggaggccaaaagtcaaaaataaaggtgtgggcaggaccctgttcccttcacaggtgctaggggaggatccctcctgcctcttccagctcctggtggctccaggccctctgtggcttgtggccgcatcacaggagttcctgcctccgtcttcacatggccttctccccatgtctgtctccaatctccctgtttttatgttgtaagaggttggattgtcgttgaaggtaggacccgcctgaaacctaggataatctcattttgatatccttagtttaattacatgtgcaaaggcccttttatcaagtgaggtcacattcacagattccagggcttagagggtggaggtatcattttgcgtgcccccatctggacatgcagtgtcctctcccctgtggggctgacctaccttcctagccgtcttcccagaacgtaatgtgtcttaaatccgtcatgctgacctggggccctgggtgcccttgggcaggagctgatggcactagtaccttgataaagttcttactggcaccagaagagaataaagtaactctccttccccttctctgacttatggccaggtgcccattcccactggcttgccgctccccagctccctgcgctttatattgttgaggcctcctctctcagctaagaaacaggaagtacacagatgtgtattcttaaagacagcattagccacggggcccccaccctcaaagggtgggagcgataactgctgctggttgaaactgacagttactactgataataaagttaattgttacccagtcagtggagtctgcccaggtgtacaagtgaaacctccattatgcttttgacaaaatatgcttgtcttgagtcaatacccacctcgatccccaaggtgccagtccagggatgtgccagggttgaagcagagctgtctcctctctgctttacagccaggagcacctgaggtttgggcagctgtgacttgcccagggagccctggggtggggctcgcatgaggttctgggagtccagcccgctgccccctgcaagtggggagcaaagggcacttcccttgccagggacatggcaatgagagtgagccagctggtggagggggcctcttccgtaatcagatccaaatgcagttttctgcagaggtttccctgtactgggagcctcgaagaatttgggacaaggaggaacgggatggtgcttgggaggcccagaagaaggagaggccctgccccgctgccctgtcgggaaagaggttcaggaggctctcttagcccacctaggggggctagctccaaagtcagggtctgggttggtgtcaggtgtgtcctgc

SEQ ID NO: 62744 - DNA, 4732 bp, Homo sapiens
cgtttcaccacgttggtcaggctgctctcgaactcctgacctcgtaatccgcctgcctcagactcccaaactgatgggattaaaggcgtgagccaccgcgtccggccgttcgtgtctgatttctatatgtgctgccgaagcgagcactcgtgtctaatttttgatttccccacaccacgcacgctggactagatcaccggctgggcaaggaagggggtctgcgtccctgcggggtcctggcagctcccgcgccaggactttgttgaatgaatgactgaactgagcgggcgccgcggggcggggcgtcccgaagcggacctcaaggcgggcggaggcgagagctccgccccggaaggcgggggcgggggcggggcggcggccgtgggtccctgccggccggcggcgggcgcagacagcggcgggcgcaggacgtgcactatggctcggggctcgctgcgccggttgctgcggctcctcgtgctggggctctggctggcgttgctgcgctccgtggccggggagcaagcgccaggtacgcgggactccggggtcggggaaccccgggccggggctcgggagccggactgggtgtctggagaacagcgccgaactgggggaacaggcggatgtggggatctggggtcaggtggccttcaaacagctcgctcccggctgtgggaagttccatcactctccaagcttcattcacaatccgggcctcagtttctcccaccgtccaattggggttggggggggtcttcagttccacaagtccgaagtacttcgaatggagagagaaagtgagtgagggcgggatgtttagtctaggaaggggcacgcccccagcctggtccgtacagggtctaactagccccagtgatcgacgagttggggaggccgtcgagaggcactagggtctgtgccctctataccatgtggggtgcccccttccatccggtgacttcagtgcccagctatgcggggggagggactggggtcgggcccggtgcccaggagtgagtcacccgccggcggcaggggggttgtggggacctgaccccccccacccccagcgtcccgcgctacgccctccctcccggagctgccgtgtcccggtcgggccgtgcggtcacctgtgaggaatgcgcggggagggcgccggtgactcacgttattcgagccggccgaccctgacctcagaccccagaatagccgagtcccgcccccagcctctgacccgaggccccctccccaggcaccgccccctgctcccgcggcagctcctggagcgcggacctggacaagtgcatggactgcgcgtcttgcagggcgcgaccgcacagcgacttctgcctgggctgtgagtggggggcagggccagtggccagcggaccccagactgggagggagggtggctggtgcgcagagcggggccgagagctttgcatctgggaaatcattcgggaggaggtgggagctgggagggggctccggtcagggaggaggccacgtttgggagaaggcagaaggctcagtcttagggggcggggctggcctggagaggggcgaggtctgactccgagtcccgcccccaggcgctgcagcacctcctgcccccttccggctgctttggcccatccttgggggcgctctgagcctgaccttcgtgctggggctgctttctggctttttggtctggagacgatgccgcaggagagagaagttcaccagtaagtgtgccctggcctgcccagccctgtcagcactcgaccttttctctgctgctgacgaccccacctcttatcttgcagcccccatagaggagaccggcggagagggctgcccagctgtggcgctgatccagtgacaatgtgccccctgccagccggggctcgcccactcatcattcattcatccattctagagccagtctctgcctcccagacgcggcgggagccaagctcctccaaccacaaggggggtggggggcggtgaatcacctctgaggcctgggcccagggttcaggggaaccttccaaggtgtctggttgccctgcctctggctccagaacagaaagggagcctcacgctggctcacacaaaacagctgacactgactaaggaactgcagcatttgcacaggggaggggggtgccctccttcctagaggccctgggggccaggctgacttggggggcagacttgacactaggccccactcactcagatgtcctgaaattccaccacgggggtcaccctggggggttagggacctatttttaacactagggggctggcccactaggagggctggccctaagatacagacccccccaactccccaaagcggggaggagatatttattttggggagagtttggaggggagggagaatttattaataaaagaatctttaactttaaatggtttggagaggcagtgatccccgactgactcccctgagctggagggagggagtgagtcagccagccgcgggggcgggggtgaggctctgactcacacattctcaatgcctggaactcagccggcaaggacctggctggccctaacagttttccagggaagatcttgaggagaaaccccagcatcccgcgcctctgccctctccaccatccccaaaagccccaggttccagactgaagccttcctttgctcagcaatctttattcagttcttcttgggggtgggatgcctcccttcccatgctcccacccctcccatcccagaactccgttgggctcagtgtcctctgttgagggaaggtcttggtgcccagatgcctactctgcaggagagggaggaaccttgtccctttgcgggagtcgctggtctcttctgttgtggggaagaaggaaggtgggaggggcactgtccaccagcactcagagctccattatgtccccagctggggttgcagggtaggggggactgggggtgtcccccagcctcagcagacggagggcctcagggatgaggctgccaggatagcgccagagaagcagctcagagcaagggctcctagaagaggaaatgactgtcagggcatggagctgaggctggcctagctgagcacctcccaccaggtccaggtccccaggggctcctgggttcccagcactttccaaagagccaagatgggaaacaacccagaggtcagctagagctaaaaatggcacgatgaggcagggcctgaggtcagctgtgaggaccgcctgtgattctgcagaaggcctggccagtggaggaacctacctgagtgggggcagggctggggagaaggtcatgggggggctgcagtaggggtggtcattgtgcaggctgagttgagagaagtgggtggccatgttctcctcagacagaaactgcttgcgcagaggctccctggggagagatggcagagaggcaggctgggatactgacacaggaggcagcctgttggggaccagaggtgacagagatcttgttgggagtccctccctgcccccaaactcactgctcctcctccaggcgccgcttggtgctcatgggcacagctcctcggagaggggagctgggaaaaaaagagagcctggtgcaccccaccctcttggccccttcccaaggatctgcccgcctaagcctgcagcatcagccaggagccccaagcccattcctgtctcagctggtgccggtccccgctctcctggaccatccagcagggtacctcggaagtctcgaccctcagccgcagccccagtcccatctcagctcacgcctaagccccgccgattcgccccaccccgtattcatcctgcagaccagtcctgagcacccagccaaagctcctgcggcccttggtcaggcccaccctggtcccctacacgcacctggcgtccaggccccaagtcacccccaaggcggcccgcgggaggcgctgggcccctccctgggggcctcgctgcaagggctgctgcaggatcattgggttttggggtcctgcgggtgggatctgggcgacaggggaggagtctctgagggcgtggccaagagaggatgggcgtggctttaggcgggcacagccgcgaggttctgcgcgggcgcggaagacgggcggcgcgtggcggaaggcaggcttgctcctcggggtgggggagggtatccggcttaagggggctgcggtggacaccacttcttaatgtcgggggtcttcgcggcgctcacctcggctcctagggttcgggacggtacgcaccagccaccttcgcgccgaaggcggtagggcgccacggagaggaaccgctctaggcacgtaaggcctcgtgaggttgcgtcgcgcgcggagcactctgggacttgtagttctggagatggagcgagctgtgccgctcgcggtgcctctgggtcaggtgagacggacgtggtgcgcgttgccttctggggtttgtagttcacgcatggctgggacggggcgggcagggaatcgtgccctgagccctgttttgcctgggctatttgtgggactcagactctgaccaggggggcgggatagtaacccagaagtgcttcaggggcttaacgcaagtcagagagtaggaattataaatcagtacgtttttctatgttggggtagtagaggtactttttttttttttttaattttctagttcttgcaaagcactttttttttttttttgagacagagtctcactctgtcacctaggctagagtgcag

SEQ ID NO: 62745 - DNA, 2622 bp, Homo sapiens
ttgcgcccttgatttccagatgggacccctccccacccagccacacaccctgggggaggagacctcctgctgtctcatgccttcctgcgaacccctttgtcccctgcaggcccctggttctggcgcctccagccctccggacagctggtgtccccgcgacccgcacggctgcaccgcttctgggaggggctgcccgcccaggtgagggtggtgcaggccgcctatgctcggcaccgagacggccgaatcctcctctttagcggtgagtggggccggcggcggggcgcgctggggccggcgcggggagcccacccctgacctcccggcctccaccctgcagggccccagttctgggtgttccaggaccggcagctggagggcggggcgcggccgctcacggagctggggctgcccccgggagaggaggtggacgccgtgttctcgtggccacagaacgggaagacctacctggtccgcggccggcagtactggcgctacgacgaggcggcggcgcgcccggaccccggctaccctcgcgacctgagcctctgggaaggcgcgcccccctcccctgacgatgtcaccgtcagcaacgcaggtggggagcgcggtgacctgcgggttactgggcctgggggtggggagagggatgtggggaatggggacatggaggccaccctgcggggatgggggtccttgggcatcagggagcggcggggcggggagggaccgggactcaagctctgctcctccaggtgacacctacttcttcaagggcgcccactactggcgcttccccaagaacagcatcaagaccgagccggacgccccccagcccatggggcccaactggctggactgccccgccccgagctctggtccccgcgcccccaggccccccaaagcgacccccgtgtccgaaacctgcgattgtcagtgcgagctcaaccaggccgcaggacgttggcctgctcccatcccgctgctcctcttgcccctgctggtggggggtgtagcctcccgctgatggggggagccatccagaccgaacagcgccctccacggccgagtcccccgccgctggacctggtcgggggttgtgaggcgctgcggaggccccttgtctgttcccacggacgggggctcgggcgcggactaagcaggggggatctcccgcgcaggggcggcggcggcggggaccggtcgcctggcgctgggctcagtctcctcagggtctgagaccccggcgctgccaccggaacccgccttcaggggcgcacgcgcgctgggaccatgcgtcggtcgtcgcccccgtcgttccctcccggctgccgccagggggcggtcggaccccgcctcccgagcccggggaggggcggggaggacaaggggcgggcccgcggcctcacccggagggacggcagccccggtcgcgcgctggccccgcaggaccttccttttccaggaagagccagcttttctcggagcgcagtcctgggactctccgcagccccgccccgcctggccactgcgtctggcattcctgggtcgttagaggacaggcctgactgcgaagctgtgccttgcccctctcccacccgcagtttctcaccccgttctgctcccacaaggcccccctacagtcactgccacactggtggggacctgggacccagacccggaaccagcccagatatcacccctgaggacccatgcgccacgtcctgggtggtggaatcagtggctggagggacgacccttgctctccaggctgttaaccttttccgttgctcccccgccacccacctcctcctccccaggccacccaacttgggcacctccctgggcccagaactgccttccattcaatggggaacccttctatccccaagaaccccttccctgcttgcaccctggagagaacagcttgactcccatcaactcaacgctggtggaaagacagggaccgaaccctggctcaggcctggtcattgcctcctcagcactccctcctgggaggccttagctctagagtgaggggtgggtggaacctgggggcacctcgttcaccctgtccccactccccacagttttaggatctaaatgattgcctctggaactattcttctagactatcccacatcagaatcactgggaaatttaagtttgcagatcccacactcaccctgaatcctcactcagggtggggtcaggaatctgcattttaactagtcgcggggattgtggggggcagtagctggctgtttcgtggcatttctgtggctctgcagtgttcctccaccccaggaccaatatgttcaggccacaccgatggcctgaaccccatgggtagagtcacttaggggccacttcctaagttgctgtccagcctcagtgaccccctagtgcttcctggagctgaggctgtgggcggctgtcccagcaaccatgcgaggggttgccccagttgctcatacaaacagatcagcatgaggacagaaggcaggagactttggtcagttacctgggaattctgggctgccaggaaacgatttgggcctctgtcagtttcttttccatgtatgaggagggggaaatttgtatattagaaacttattcatc

SEQ ID NO: 62746 - DNA, 2583 bp, Homo sapiens
tcaagtgattctcctgcctcagcctcccgagtagctgggaatacaggtgccggccaccacgcaaggctaatttttgtatttttagtagagacaaggtttcaccatgttggccaggctggtctagaactcctgaccttaggtgatctgcccgcctcggcctcccaaagtgttgggattacaggcgtgacccactgcgcccggcctagggtggaccctatttcaatatgactggtgtcctttggaaaggggaaagggggacagtcacacccaggcagaacgtgatgaagatgaagatggccatctacaagggcaggagaaacctgaacagaatcccagctccgggccctcagaaggaccccacgctgcccacattgaccttggacctccagcctgcagatcgtgagggaagagacgtcttcgacttagggccccttgtcgtggtacttccttagtttggccccaggaaaccatcccaaaggcaagggcgtggttgtgctcagctgggggaagggggctgggggccgtgaggaggaggtgggaggcccagccaggctggagggtcagaacccgtggagctagaagagcccgtaggggagccccaagattgctgagaccagtgaccttcggccccagatggccttgccttggcccagaagggtcagaaggacctggtcagccaagctcagacagccggcaggatgccttccaccctgcagagggtcctatcttgtcccacaggtagatctacatcaccactagccacccctccaacgtgcacaggcccctgccctcacggcgcccctcttaggtccggcagttcctgcctccttctgatccagaagtttctctggcctctggagccggggcacacctcatgcaaggacagggtccaaattcctttgtccttggatcccacttggctgacgtcaccttcctgtactcagggagtttccccagccagctgtcccgagtctggactttccctctgcccctccccactctcaggctggtggggtggggaaagcagcccattcctgggctcagagactcccaccccagctcagagggagcaggggcccagccagggacggaccctcattcctcccagggaccccagacctctgtctctctcgggtaagtctccatctctgtctgtctctgtctctgtctctgtctctgtctgtttttcacgcactcagcaaggcctcctgccctgagagaggctccgcccactaccccccactttccccataaaaccagctgagtatttgtgccaggaagactgcgtgcagaaggtgactgtctcagtggagctgggtcatctcaggtggggagttggggtccccgaaggtgaggaccctctggggaggagggtgcttctctgagacactttcttttcctcacacctgttcctcgccagcaggccttggctccttgaacttttggccgccatgtgcttcccgaaggtgagtgagaggctgcgtgtgcttttgtgggcatgtctgaaaacagaccgtaagggtgcgggtgccctcagtatttcccgaggtgcctgtgtgtcagggctcagtcaggggcacccagcggcaggaggatagtgatggggtgagagtgtcagtggaggcgctggaggtcatatgtgtcgggggcgctggagaacggcaggggtgtggatgagagggagcacctgtcccaggagcccttcacagcccggaaagcccggggcaggggtggggcagggctctgctggaaacgactcggagaatgcttctctcagaggccggctcagctgggtgggcccaagagcaaggcctgtgtgggtcctggtgtctcttcctcctttcctgggttccctccgacctcccatcctctaccactgccccaccgcaaatgctaggcccaccacaccctccagggagctcttcggcctgtgacaataggggtttccatgatgtggcctggctcaggttcaggacagtgacccggaggacacatggctcccgcatgtcggcacggtgctgctttcaccctggttcctgggaaatcaggctagcgggatgggaccatcgctgcctgaaagtgtgcagacagctgccctgcccagaatatgtccccaggccctgcgcactctgtgggtgactgtcaccactctatagtgggggaaaccaggcatgtcacccccgagactaggcccttgacgtgggggctcagcggggattctgtggggtgcctctggcctctgtggatgcagccacgtgtctgcaggcaggaatggcccgggacctgtgggtctgcatgttggcagtcgggaagagtggcaggttgtagggtggacctacctggcaccccaaatattaatcagctcatcagagaggaatggctgctgttaccttctcaattgtcatgtccctaaacattttttccttggccaactctcacctgggaccatagtggttgtgggaaacccagctgagccagcctgctccaggacagtgtccatcctcccgtgtgtgtacatgggggggtgtgtgtgtgcagggaggacaccccggcccacgcaggccctgctcttgtgaggagggg

SEQ ID NO: 62747 - DNA, 1256 bp, Homo sapiens
gctcttgtgaggaggggtcacctaggcccacgcaggccctgctcttgtgaggaggggtcacctaggcccacgcaggccctgctcttgtgaggaggggtcacctaggcccatgctggccctgctcttgggcctgcccagctgagccggctcctgagagaagcgctttctgagtcgtttcgaggacagccctggccggtctttccaggctgtgaggggctcctgggactgctgtctcctcttatcctgtacctctgccatgtgtctctgtgtgtgtgtgtgtgtgtgtgtgtgtgtgtgtgtgtgtataaattatcctggaggaaaggttaaggtgacacatggagactgagtgtcaccgttatttccgcaggtcctctctgatgacatgaagaagctgaaggcccgaatggtaatgctcctccctacttctgctcaggggttgggggcctgggtctcagcgtgtgacactgaggacactgtgggacacctgggaccctggagggacaaggatccggccctttggtgccaactctgcctctcttcacagcaccaggccatagaaagattttatgataaaatgcaaaatgcagaatcaggacgtggacaggtgggtggatttcccctcaggcaccaggtcacatgtccccgcccccaggcactccaccctgtgtggggctcagggtgagaaggatgaagagggacccacaggctccctcaccccttaccgtgggcaaatgcttgcacctgggtggcagtgagtgggcgggtgggggatctggacgcccggggagactgagggaggcatccaagccccagggctccttgaggaaacaacaggggtgccagacgtggcccgggcccctggctgggcccagttcggggtgtgtgggagctgaggactcactgggcttgaggactgactgatgtggggtgcagaggaggcttgggcctggaaccgagtgctttgttcctaacaggtgatgtcgagcctggcagagctggaggtgagccgtggcctccccctccaccaagcttagtccctgggtcttaggctccacaggacactgggtctgggccccgggtccccttgggaatcacctggaccagtgggggccacagtgggaagggggcaggcaggagcagcatgaaccccctgtgccctcctctccccaggacgacttcaaagagggctacctggagacagtggcggcttattatgaggagcagcacccagtgagtatgacacacccatctgg

SEQ ID NO: 62748 - DNA, 1472 bp, Homo sapiens
tccagatttcaatcccagcctgtgtgagagtgtaaccacctcccaaatcaagactggcctggtgccccttgcaggtctgcccgtctttcctttgggctaagagctgccatttttaaatgcccacagtgtgctggcttctttgctaggcttttcattcacgtgactactctttgcaatggcctcctgtgtgccaggcactgttacaaagcaggggctaaggacacagagagaaactgaaggaatgaggccctgctctcaggggcttacattctagggcaaaggagcagcgacggtgctaggaaaaaatggaagaggaggatgtgatggggcagagtttgctccatctacacggtcacctaaagtcctcccaagtcctgccaggtggcttttgtcccaactttaccgatgacgaagcaagggctccccgggagggaagtgacctaaccaacagcgtttggccccaaactaattccatccctgtgcttaaggtgccttcttgggttgtgcccttggctgcagctggtgccttcctgagcgttctgagcccccggggagccaggaccacctctcaggtgttggccgttcccccggcctagacccctcggtccgttggggccaggaccctcctgactggctcatctgacgggtctttgttttcctgcacttaacacctgagctcatcctgttcctacttcagttgtctagtgctcccttcgtacgacggtctttctccttggtctgctctgcattccccgcgtcccgcgcctcgctctcccagtcgcgggctcctcccactccatagtttgttcaggggcggggccagaaaaccccgcccccagggaagtgggcctgaaggccaaggggcggggcggggttctgtagggacggagggggcgtgtccggggcggggcggggtgctgtagcgccggagcgggtgtggccttggcgggaccaggcagccattacagtctcggaagcgagaggcgtggggcctgtctcatcatgcccggttcatttttttttttttttttttttttgtagagatggggtttcatcattttggccaggctagtcttgaactcctgaactcaggtgatccacctgccttggcctcccaaagtgctgggattacaggcatgagccaccgcactcagcctctttaatcacctgaggtcaggagttcaagactagcctggacaacatggtgaaaccccatctctactaaaaatttttgtttcttttaaaattgtaattttcccaattccacttattttattttattagagacaaggtcttgccatatctcccaggctggactcaaactcctgggttaaagtgatcctcccatctcggtctaccaaggagctgggactacagctgggactccatgccatcgagcgttctttccctctcgttgctgaatgattttcctcattacatcagttattcattctgctatgggtagcccgtgg

SEQ ID NO: 62749 - DNA, 1347 bp, Homo sapiens
aaacaaaacaaaagaagcacctggtgttgttgcctagggatgctcttcctgtcctcccggggtttgttcaagacgggaataggctgtttttcccaactgtgagaggcaggctgcccaggctgagatttgtgagccaggtttaggccagaagcctggggctgaggacactcctgcgggagcgtgaggatagcctctcttcccgccctatttgcaagctcagatgtctgttcattcactagaaagccaccaaggctccatggtagtagctgttggggtggttcctgttactgcaaggcaagggtgtcaagacgtgggtggtgagcagaagcctggttaaggaaattgtaacagactcatacaagagaatgctacctagtttaaaaaaaaaaaaaaagagcaaggcaacgatgcattttttttctatttttctccttttctctatgttttttattttgaacaatctctaagatatatgtcacccacacagagggggcaagacccaggtagaccatatagtatagtcccattttttaaacaaaaccaaacacccaaagcaggggagtgtgaggccgaccctcggccggggaggctggacccgggcgcccgggcgggggttggcgcctcatggatcgggatcctcgcccgggagggtggactctcccttcattaagacccccaggtcccaggcatggaggaggcctcggcgcttccccgtggaggccttcgaccaggcagcctcagtttccccacgggcgaaagccgactcgagggtggggtgccctcgccccgcctgctcctcacggcgattgcccccgcgccccgggctggacaggtggggcgccgcgaaaaggcccggcaagccggaagttgcaatggggcagccggacgcaaaacgcggggacaccggccggggtccgccaagctagggtgagctgccgatcggggacgcgaacgggagcgcgcaggtgagggcggcggggcggggctggggcgggggcggggccactgaggctgcggccaatcaccggcgcctcccgtgggcggggcggggccgttgcttgggcgacaggctccagcgtctgcgttctgtgaacctagccgctgggctgtgcggacaggttcgcgtggggctcctgggcctcccgcagccgcgtaggtttcgggaaccgggtcgcctccctgcctccggattctcacgcgctggtgtccggtggccctgggaaatcttttcttttaacaatgtgtattccttgggtcctacctatctaacacttctgctggtttctttttcttctcttttagagttcaatatttgctctgctcttttttgttgtttgtttgtttgag

SEQ ID NO: 62750 - DNA, 1526 bp, Homo sapiens
attaaccaacttcttcccaaggtgtggggcatccggattggggggagttcccagcctgtttcccaagttcactcttagggagagagttctgtgccagtcttggggggacccagagggcccttgactaggagtccctaaatgaattcagggtccctcaggagacaataaccttcagaaaccccgagtgctaaaataaatggtcctgccctctccaccctgcaaaatgcccttctttctacctgtgaggacaactgcagtgctcgctttgaaatttcaaataacacaatctttccacaaaatgcatcttccatttttctgttttggtggctctgccttgctggcatcatgaacgcgtcctgggtaaagccatcctcatgagctggcattgcggctctgggagtcacctcccggccaagagcaggtgcaacccaggctcgagactccacacccggaaccctcaaaaccgggaacgctgtagggctgcggctgcatggggaatgggatctgggagggacttcctgtcttccctactcccagtctccacccaactcccccgcccgccccgtgcaggctgtggagactcccttcccgggggagggggcccccactgccgcaggtgccccctctgcctccaccccggtgagaagggggtgctggggagggcatctggatcccgagaccggcgcagatgatcagcttgcaggaggggatggggtcaaaggtggaaggcttcaagctggcaggagagaagggggccaggaccgggtttgggaaggagaaggacattgtctgccaggaccgagagcaggatgggcatcccaggcctggggcaggtggttgcagctgcaggggggctgctgagagcgggcaggttgatttctgaattcctggtgggcatgggagtcaggtagggacacacggtgtatgtcctggggtcgggggacagcaggtcctggattaccctggccttgacgggcggggccccaccagcacctgttctgcaggatctctgcagaactttctgctcctgatgacaggaaatagcgattccaatttagcctcggctttccctgagccggttacactgagatgcgaggctcttgcttcagcaataaaggggacaatacaaaatagcattctttcaaaaataggacccagaaaacatcacagagagtgggaccatcggataggatctgggagactttctttccgattgggaccagggagcgctggtactcgtggggattttcagggctctttgggggtgtccaggaagcgagggctggtttctgtctgctcttctaggctcctggccagaagctggagggggcttggccaaaaagagggagaaacaactcagctgttctttctagctctgaaatagaaaatgtctgcagacggcggaggcatccaggacacccaggacaaggagacacccccggaggtacagatggggctggctgagggaggtgtgcggtagaagaggctggtgcggaggagattttcaaggcacagagtctggaccc

SEQ ID NO: 62751 - DNA, 2087 bp, Homo sapiens
ataatatatattcacaggcatataactgtctgaacagtaaaactgtaagaacacactaaaacatgaatagtacttattcctggatggtcgtattagaaatgttttttaccttcattcattaaacaaatatttactaagcatctaccatgtgccaggcacaattctaggtgcttgtcatagggcattaaaaagtgtctgccctcatgaacacttatcgttgagtcgtgggaaacacgtatatgtcaggtagtgataaacattagggagaaaagttaacgccgagcacaggttgtttacagagctggggaaggcctccttgagggggtgacatatgagcagaatgagggagcaagccttgtggctatcacgagaaagctatctttatggttttccaattaattttctaaattttctcttccaagcatgcaacacctacataattaagacaaaacaaaccaaaaaaactctttccatttatgaaagagatctggagcctgaaatcatctccgggtcgaggcgtggagagagtgggagaggatccgagggtatggaaaggaccccgagcccccctgctctagatccctccgggccgtgggacccctgacgcccagcagcaactcgtggacaaagcagctggtgagagaacgcgggactccggccaggtcagtgtcccgcttgccgcgtcctgctaaggcgacccgaagacagaggatcgccgcaggaggctccgcgccccttacccgagggcacttcccagcaagctcgacgcctctccagggaattgggaggagcgggacccaagaggctagaaaagagtctccccggcccgagctccacggcccgcggcctttcggccctcacctactagttggcaaagaaagaccgtggcagaaggaagaggccgctccagcgcatcccttcgggcggagcagaagctccacttgtggctaggccatgtgccctctccgttcctcgggccagccttggcttcccctttttgtcgctcaagggccagggtcgcaaggaaatgtgaaaaaaaagcggagacaaaagagaacgaggtaaatctagatgcagagcctcgcctttcctcccgggtgcaggtgtatgacgcgtatggagtttctgtcttctaataggcagcctgagaattcttcctgttcattggccatcggtcatggagaaggcgggctcagtggacgaacggctttctgggagctggggaatgcttgcgtagcgtagtttcccagcgagccccgcgaggacttccggcgccgggagctcgcggcggaagtgggatctcctgggccgtagtgggcgttgtgtgtttcgggggcgggggcgggggcgggggccggggcggggacggggcctctggccgcctggctccaacatcaagcaccgggctccgagtggccgggatcagcgccccgaggcagaggccggagggcgcgcgcactgctaggaagtgctggtcccccgcgccgctctgccagcttggtcccccggcagacgcccctgtacgatcgccgctcgccccgcgggcgaggctgcggtggacagcgcggggctccggctggctcgccttcccgcctgccgtgtcctgctgagcgaccctggtgagtcctggccctcttcgaggaaagtcttcttcgaagtcaccagaggatgagaatggtgcgcgcacctttcaggggtcttgtgaggagcagaataaataaagtgcttaggatggactaaagaattggaaacaacccgaatgcatcactcgagtattgattaagaaactagagcatatccataccgcggaagctcatagtgccgctaatgtctgtgcagtaaggtctcatttatgtagaaacacatcaagcaccttttctccccgctatggatgacttttttagtaaaagcacaggaaaaggtctgggacgtcatttgtcagactgttaagtcggggggtacaatggtattgaggaagggagagttttacagatttctatattgtttgaatcttcccttttttattaagatggtttgtatttttttcattttctttttacttttcttttctttcttttttttttttt

SEQ ID NO: 62752 - DNA, 930 bp, Homo sapiens
aaccttccatgcacacatcatcctgcggtcactgtcatggtctccgtttcccgtaagaagcaagcaaggtctcgctgtggacaaggctgattccagttggtgatttttacctctgggggcctggtgctgtgtgcatgcgtgtggcgggtggccgggatggtacaaggacttcttggtggcggtggctggctccaaatggagacactcgggtgtaacgagatcagataagcacgtaggccaggagctaagaataggattgagcacaggttcctggctcgggtaggggcatgtcagtgccagcaaagaagtcaccagcaggagccagagaatgaagcccaggctgggagagcggggccaggacccagggttccagggatggggcagagtccagctcagctcataagcagagctgatagtactcgttagggtagagggcaagggttaggacccagggcactgagagcccagggccaggaggtgagctccgagcttggtgcttggaggaagccccgtctcgccctatggccttcctggtggctgggaccctgcggctggccacgcagatggcagacactcgagacagcctggggagaaaggtagcaggaggcaccgcctagcccagctgctcctgcctccctgctgagccccagcccagcccagcccagcccagctctggccttgcctccccaggggaagtatgacgtccagggtccaagggcagccctgatgctcagcagccctggggtggcggccgctgtagtcactgccctggaggacgtgttccaggccctgggctttgagagctgcgagaggagggaggtcccggtccaggtgagcctctgcctcttacatccaccctcaggcccagcaccgaccccttccccactctcccctgacccagaatctcctccccacccaaaacctccccgg

SEQ ID NO: 62753 - DNA, 1686 bp, Homo sapiens
ccggagggctgtaaccccgggcgcaggctgggtgtggtcctcaggtcaacaggcgggtgtgcgagcaggaggtgctgggccccgactgcgatgaactccgcaaggcctgcctggagatccgcagctcgctccggcgccggctctgcctccaggcctgagggtgcggcggccacgggggcgctgctgagacggtggccagatcccagcgccattcttgcctccatccaccccccatccccccggtttcctcatctgagagcgaggcgtggcagcgtgggggtggccgtgcaataaatatctgccgtgaacagtgcctgttctcaaggacgtgtgaaataagtgagataatgtgtgtaaagcgcctggcactgcatatggacgcaatagtgtccatgggaaccgagttggggcctgtgcccagcttccgggacttaggaacccaacatgggctggactgggctgggctgggttggcagttcggttatgggagcgtccagggggagaggggtcccaggaagaggacgcatatccctctcccagacatgtccctgtgtatgcgcgccccacctccaccccgcgctgggccatagaaactcaggagacacggcctccgctttccaggcggccagaataaagtctggggccaaaagcctctgaaacacacctttgcaggttcaccgtgatggagcaagcacaggggctgggcaagcagcttgcagcccctgacccaaagcggcgggaggcacatgggggaaagcgctcccaaacggcgtctcggaggggcctgctgcggggagggtggggtagggcgggctcgccagggctcgaactcacagtcccgggcccgcggcggcggtttccacccagcagcctcagcggcccggcgcggtggcccagctcggagtcccgcccaccgggagcctcggaaggaccggcctcccctcactctaagcatgcgcgttaaagcgacagcataggctatagaaagctttatgagaatagctgggagccatacagccgcagggccgcgtggcctaatggataaggcgtctgattccggatcagaagattgagggttcgagtcccttcgtggtcgttgccatgttaacgttttcttccagctccacttaaaatttcttcacctgggactgcaccctgggcgactacgacactcgaactgagtgcgccggtcgctctcccctcacccccgtaggaacactgggacctcgccctgcgcctccagtcgcgaagctaaggacccagggccagaatagcagcgagggcgacttagagaacgccggcagggccctggcggactgcggagcttgaagccagagaacgcaggtcctgggatctggtaggggattgacttcacaaattaacgttcaggtgatggaaaccgtgacagacgcggggctgggattgcttgctgtgaggagttgccccaagggatcaaaggacacctgtagttttttgtttttgtttttgttttttttttgagacggagtttcgctcttgttgcctaggctggagtgcaatgtcttgatctccgctcactgcaacctccgcctcccgggttcaaacgattctcctgcctcagccttccgagtagctgggattacaggcatgcgccaccaggcccggctaatttttgtatttttagtagggtgggggggtgggcggggg

SEQ ID NO: 62754 - DNA, 1040 bp, Homo sapiens
ctgagattaacacctagccagctggggatgtagagggcggattttggagggtcattattaagaggcttccgaccactgggcggcacccttggtctaacggacaatgcgggggaggaggacgaagaccgacacttccagaagcggcgggctcgggatgaggagccagttgctgagctggcatcgcgtgccccttcccatacactctacccatcgcaagtgcatcattcgctactaattacccctagacttgggttgtctcctgagtggagacgacggcttgtgaaggagttgatccaggcacctctcgcaccctaagcgaagatcatacccctagaccaaagagcggagccaaaaatctgacgttcggtgtctttcaggtccctctgcacgtgcgccgtctctttggggtcccgaggatgctcaggagcggacgagatctgaaccgaagcttggattgcagtggaggggcgggagaaaggccagggtaggacgggcaggctgtgcaggaaccaccgcggagtgatggagaaactggtctaagacaagcgacagcgttttgttatccgccccggtggcctaatggataaggcattggcctcctaagccagggattgtgggttcgagtcccacccggggtaaagaaaggccgaattttagtgttccttatcgggcagaagagttagaatgcggtatactccagtggaggtgcggagtttccgaagggttaccaaaaaggctctaaatcagaaacctctacctgttttcaaggaagacgagcacaatttcacgttacagaaaaaaggagccgaatcttttacaggatgttaagtaccatccatttaacttgatagaaaggaatgattgtttatttttccaggtttgttaattctattatggttacaaatattttttaaatccttttttttataaacacaattatttacagattaaattacaagacaactggtttgttttaaaaatcataaaactgaggccaggtgcgctggcttaaacttgtaatcccagcctgtaatctccgt

SEQ ID NO: 62755 - DNA, 2511 bp, Homo sapiens
cgcccggccaatttctttttattattattttgagacggagtcttactgtgttgtccaggctggagtgcactggcacagtctcggcttactgtaacctctacctcccgggttcaagtgattctcctgcctcagtctctggaatagctgggactacaggcgcacaccaccaagcctggcgaaaatttgtattttttttaagggccgggggtctcaccatgttgcctaggctggtctcaaactcctagggtcaaagtgagaggattataggcatgaaccacgacgctcggcctcttttttttatgaaacaagacaaaggggatcctgaagccagttggttggtggagcgttttgcgtttgcctgaccaacaattcccgatttgcaaggtatacggagtcacttccacgttttcttatttagtttactttcttccaagttgcaagtctaatccatccgacaaaatctcacgcccaacgtggggctcgaacccacgaccctgagattaagggtctcatgctctaccgactgagctagccgggcggctatgaggaaaatggtttcccacacctctgttggagctctcccgaacttccctattctatataaaattggtggggatgagtcctggatccgagacatgagacatgctacatcctgagcgctagagccctaagctcggcgcggaccgaggacgccgccaggcccgtgcggtctgccgtccttcgcgggtgtgtgtcatatccgccgaccctcgtgggggtgtatcctgtctgccgaccctcgtgggcgtgtgtcccgtctgccgtccctcgcgggcgtgtgtcccgtctgcggtcccttgtgggggtgtgtcctgtctgccgaccctcgtgggggtgtgtcctgtctgccgtccctcgcgggtgtgtgtcctgtccgccgtccctcgcgggtgtgtgtcctctctgctgtccctcgagggtgtgtgtttcctgtctgccgtcccttgcggtgtgtgtcccctgtctgccgtccctcatgggtgtgtgcggcacctgcagctcccgggagcgggaacgtcggggacaagagctgaagggacgaaggacactggagatggccagggggaaactcggcgtgactctctcttagggctgtgtgagggttttcaaaccctcatccctgtttagggccggcagcgaggcctcaccacagggacaagcccggtagacctttctcctccttaggctcccagtaaaatgctgggtcccttgccagtggaaaacggaagaaaagtttggagcgtttctggagccgcccgtttgggaagaaatgaactctgaccccagctccggcccgtgtatcggaggtcccagggctgcgagggtcgcctgggcagagctcaggccaagaaggagctcggctgaggacaggagcccggggtctgtgtgggagacgggatcccttcctaggatgcccgggctggcctgctgggaggcggcggggtctcctcctcagggtcctgcactcgggtttcacatcgggtgaaatttctgggctggggctcagcacgcgagaccgctgcctcacgcgggccacacagaccacctccccgcgggccgcagcccctggtcaccggccctcctctcggtgctggggccgcctggagccgctgggagccgagtggccctcggggaggcggcgccgcggtgcccagggtgcggggtccgcctctgtgcgcctgagggcgggggtcgtacaggagctcttcccggggctggtccccgaggcgctgcacctcctaccagcttcctgtgatcgaaaccgaaacctccacctgcgcaaccctcccagatgggcttgaggttggggtgtggccgggacccgggcggggaggggtaggggtggagtgaaggcggggtctgggggggtgcgcgtggacggggagagtggaaccgcgggtgtggacctccaagtacagacgtcagagaacgtttgtcgtcctggctcgttggtctaggggtatgattctcgctttgggtgcgagaggtcccgggttcaaatcccggacgagcccgcttttttttttttttctgaacaccatcattttctcgcggtgaagattgaggagcttcacggagtctcggccgcagggaacttggtctctccgtggcagctgcaggcgccggggccgatccgacttcccgcttccgtccggcttgcggcccctcgccttgcccggctacaggaaggactcgcctgcgcctcctgactggagccttccacctgggagttctgagtgcgcctaaggcctggcgctgaggcagtggaccccagatccgggacccgaaaggagggcaaacacctccaccgccgcgtctgcctctgcggacgtggccctagatcccgggtggccatggaacttggtctgggcgtgtagttttcctttgagtgggtcggttctaagtttaaatttccgacgagcccagggtttcgaacttccttccttttttccttcgtttctctttcttttc

SEQ ID NO: 62756 - DNA, 813 bp, Homo sapiens
agccccaggctgcaggcctgaccctgagcatcccctaccaagcccagtgtggatgggctctgtctccaaggggctggttcaccagggtctccccgcagcgaccccagaattctgccaatcacttggggacggcgatgagctctatccacttcggaatcagccgatttgtgccggattggtggcaggtgtctgaaatgtcagcggaaatacacgcacgggaggctcgttggtctaggggtatgattctcgcttcgggtgcgagaggtcccgggttcaaatcccggacgagccctagaagtggttacttttcccttgtcattttagagaatatagagctagaaaatcggggaccgagcctgaagcctcaactaccagtcgcgttgctccgcttcaggtcggtccaggtctgtgcctcagctacaagggacaaggatgctcctgaggctggcctggtcggcacttgcctcagcctcgagggagtcccgcgcccttctccttcccaaccccagaccagagaagctgtaccctctgcagcccgggtcgctcagctccacatgggctccgggtatggtggaggccggtggttgggttctgagtgatcgagtagtgtgcacggtctgggcgggccctggagagctactcgttcctcgacctcccctccccgccctagaaacccacatctctgcaggccaaggcggagtcacagatgaagctcgttgagagcaggtcaaagctgcctgacccgatggccccctgctgcgctagccaggaaggtgcccaggagccacatatggctcttaaacacttgaaata

SEQ ID NO: 62757 - DNA, 1521 bp, Homo sapiens
gcctgggcaacacagcaagacaccgactccataaaaaaaaaaaaaattagctgggcgtggcgacacaagcctgtggtcccagctactggggagctgggaggattgcttgtgcccaggaggtcgaggctgcagtgaactgtgatcgcgccactgcactgcagtctgagcgacaaagcaagaccctgactctaaaaaaagaaaggaaaagagaaaggaaagaaggaggaagggaatcagggaagagaaagaaaataaaaggaaaaagaaagaaaagacagaaagaaagacggtgtgtaaaacccaccaggaataggttaaatcaggcttggagaaagagcaatgggctagaagacaggaaatctggggtcaataccgaggacatctgcctaaaagcaggttggtcactgaatctggccatactgtacccctcgaaccgaagctccctccggtgccctttgggcggggaggcggttggtgactctcccggggagcagatgcaaggccgaggaggtgtccacacaccgcctgccgactcctctccgccgtcaaagctctgctgagagcggcaggcgacatcccactaaggaccgccgggccaggctcactctggggcctcttccgctggtcaaggaacacctttaccgtaaagctcagcgtgcgcccctgcctgaggcgctcaccaggctccctacccggccttgctccctcagcaacggacacgctccgctccccagaggcggcctcagcctggttcccgccctcacggagcccctcacctctcggggcctctgcagcccctgagcgtttgctggggacggctcagagactcaggctccgggagagatagaaaaactaggcgcgagcggtcgagccctcccctcgcccttccgagtgccctcacaggtcgccggcgactattcgttcgcgccgccgccagttgaggagaacggcagggactcggtgccttctgggaagtcgggcgctctgcggctgtgacgtcacaaccggtgccttgtttccggtgcagaagcctggtctccccgttcggagccggcagtctgcgcttgagacgttaagacttgagacaggccagaggagctctcagggccggagggaggccaggacggctgtagcctctctgtggttctgcctggaagacggaaggcaggtggttggctctagtcatccacgacgggctggcacctctccagctgcggccagtctaaccccagggcctgctgggaaatgtagttcgaatgcaaacaaccaatggacgaccgtcaggcgcggcggttggggcggggcaggcccccccaccgccccaccccccgcccacccagcgcccgcgctccccccaccccccaccccgccacccccctaccccgccactcccccaccgccctactctccccaccccccacccccctactctccccaccccccaccccccaccccgccaccccccacggcgccaccccccaacccccacccccctactctccccacccccctactctcccc

SEQ ID NO: 62758 - DNA, 751 bp, Homo sapiens
ttggaatttttaggctgggccagaagaagggtgttgaatggggtatcactggggccagcacccgtccctgactctggacggtggcaacccagcacctcccaggcagtctcccactaccagatggagaaaggatgagactgtgcagtgacgctgtgggtgctgtgtgatcccatctcgtctggtcagaaaactcctcggagctgataccaaaaccccatgacagaattgggcagggaatgatactttctggtctaaagcaggatattttgcaattgcggtgacacgttttgcaacagaggctgctctgaggcaggacttctggaaggcagtgttttgatgccactttggactttctagggcaaggcaggctcacaaagcttttgtttggaggggttccagtaatttctcacagtgaaaatagaattattgcccttctaacgtcatttaagtgtttaataatcaaagtggaatggtcatgggctgtcttgtgtgcccctgccattggatgtgtgaccttatttggggtgacatggcaaatctaaacccaacaaagctgctgcaaagggtctactctcggctattactcctgggaaatgtgcggctcagacaccacgaccttcactccactcctggtcaccaggggtttcactttctatggcatttacttctgcacattttgggatttaaaaaaatgaagattgtattactttcgtaataagcaaaaaagatagttttaaaaagtctttcagac

SEQ ID NO: 62759 - DNA, 1877 bp, Homo sapiens
gacacgcaatccccggccaccaaagggctgacaggctagtgaaaggggcagaaaaataacaaaactgtgtctggaaggcagctactccctttttttgtttgtttgttttttgagacgcagtctcactctgtcgcccatgctggagtgcagtggcgcgatcttagctcactacatgtgcctccggggttcaagcgattctcctgcctcagcctcctgagtagctgggactacaggcgcgcgccaccacgcccggctaatttttgtattttttagtagagacagggtttcaccatattggtcaggctggtctcgaactcctgacctcgcgatccgaccgcctcggcctcccaaagtggtgggattacaggcgtgagccaccgcgcccggccctttgttttcttaccaactaagcagcagcactgacactgtttcctttgaggttccgtttgctgaatcctgccctctaaggtgctccgcccttccactccccgccccgtgctgctgtcattcccacgcctcaccctgttttgcaacttcttgtttatgagcctggaagccacgaagtggtgggaaatacgagattcaaatatctggtggccgtgtgacgtgagtaaattactcgatttttctcagtttccatttcctatcaaatgggttgttctgggaattcggggaagtaacagtgccgggaaccgcgggaggaaccgccagctgcgtcctcggacgtccccaaagcccagggcggcgactggcacgactgtcaggggcgcgtctgttaagaggacagggggtcccgccccggcacagccgtctcctccaggacccctcccgccgacgccccacggaccccacgcccgagcggagaccggcgcgagtccggggtctccggtccggcagcccctccctggcccggcgccccaaagggaagcggcctgggggaggagacgtgtggaaagagcggcagaagataaagaggaagtagcggtagagaataaaaaggaactgtccgcagtgtgcccggacgcggggaggcgctggggtcaagcgagacccgacctgcacgcaattcccgccggggtcccggcctgcctgcgggagggaaaggacccagggcggcttctgccaaaagtgcggcttctgccgaaagtgcgtcttctgccgaggggcccacataaggcgcgacagacactccagcccgaccccgacgccccgccctcacgcatgcacatgcgcggaacactcccagaaacacatctcccagagcgccccgggagcacgcgagccaattggagggcggattagcgggggcccacgtctcccagaggtctccgagtcgcggctctgttggtctgattggcagccgcaacagcctatagctgcttttcgccggaggggccacgcgccgtttgccgggactgagccgctgttgtcgctggtatcccgggagcagcgccggcaagtggagtcgtcgtattccgggcggcccgcggcccacggggatgggacgtcccggggctgtgctgaccccaaaacccttccacactttattagcctgtcgcccttctttcatgtttacagcaaatattttccgagtgcctaatgtgtcccacttactgtgccacgtgcgagggtgcacgtgtcaggcaagatcgctgttccaaggaggctgagaacaagtaaatggtaattaccagttatgaccaaagctgtgaaaggaacagatacatcagcctaacagcagcactgccgttttctcccttataatcagcagaggcgggctagagcaaggattctcaaactctgccccctcagaaccctagagtacggttgctgaaacttctgttttttccttttgaacaaatctagtaacatgctgt

SEQ ID NO: 62760 - DNA, 2337 bp, Homo sapiens
gagaatcgcttgaacccgggagggggaggtttcagtgagccgagactgcgccattgcactccagcctgggcaacaagagcgaaactccgtctcggaaaaaaaaaaaaaagaaaaaaactaaaatatcagtactcttttcacttagtcatcacaaacccctttaatcccatattaccctctactatcatggtagcctcacctttgacgacagactagctgtgtgacccaagtaaatgacttcagtgccaccacctgtaggaaggggctgctaatagcatctgcttcatactaacgtgttttcaggatcgatctgcatataaacgctcaatacacggtaactgattgtcacattctatcccaggacgcttccatttgcggatctcatggcccggaggacctgggccgcctcacaactgggcagccccgctcaccgacacaaagcccacaaccgcgcccaatagggaatcggccctgcggccctcctgccactcgcccccaactatcacagtccacggcggagctggaggcagatcccgcccttgcagggctgggtaagagactgaaacttggagaatgaactgcaggcgctgcacatctcgggcagatttaaaattcggtctaaaatcggaagcaggtgccgcgaacccagacccgagcgctcctctgggacgtccagccgcagaagcgagcccaaagcccagcagggttctccgcgggactcggggtttcagaaccgccgggctcttgggcgctcgcccagggcgcacgcgcagtcgcgaggccgcgccgcggactgcatctcccagcaggccccgcgcagcaggccacgcggcgccactgactgggcgggcggctagctccctggcctccccgacatgccgaggagcccctggcttccggagccgacgaggccgcaggggccaatgggaccatcttcagccagcccagagtagccgaagcgggtggggcctggcttgggaaaggattcatccggggaagctgattaacaattcagatttccgggtctcaccccgacactgacgcactggagagcgcgtggccctgggatctgcgttttcccaagcgctccggagtaattctaacccaggttgcccgccagtcacaacgacctcaggcttgttttcttcgcttggatccagctgccctgcccccagtcactcccagaatttcagggcgcgccccgtggccccgcctctcgtctccaattggtccctcgctcatccagtccccgtaggccaatcttcccttctcattggtaggcggtgagtgtgtggagaaacctgacctaatgggcgctggagttcgcaaaacgtgacccggaaattggtcacgagcaggcgccgtgggcttgtggacgcctaacttgcgcgctgagatttccggcgtgggagcagaggtctgagtcttgcgtgggtcctctatatagggtgagaagcgtggcgctcggttcctgcctcggggaagtcctggcgcagatgggccacggggccggcgtggcggcgcctgggaccgactgaggcctaggcgccggagccggccgcgcctgggctggagcggggctcctcggcctggactgggagcccccggccccgggctcctgctggcgccgtccaaccttacatgggttcagggcgccttcgtaggcgggcacggctggtttcgggctaaggcgctctggagacctgacgatggcgtcgggcccgggctcccaggaacgggaagggctcctgatagtgaagctggaggaggactgcgcctggagccaggagctgcccccacctgacccaggaccgagccccgaggcctcccacttgcgcttcagacggttccgcttccaagaggcagctggtccccgggaagccctcagccggctccaagagctttgccatgggtggcttcggcctgagatgcgcacgaaggagcagatcttggagctgctggtgttagagcagttcctgaccatcctgccccaggagatccagagcagggtgcaggagctgcatccggagagcggcgaagaagcggtgacccttgtggaggatatgcagagagagcttgggagactgagacaacaggtgagagagagagagagctgttttatctgtggtttgtttagccctgagcactgggacattgcgcccccggtcgaattcaagtaaattgccctgagtagaccttacgtggggaagaggacttgtgatttaacctggaacactcatcctccagattttcccccaaatgaacgaaagcagtgaagagtgccctgtttccacgcggaggcggtgtccctgcaacagttagtgttagccatggagt

SEQ ID NO: 62761 - DNA, 1853 bp, Homo sapiens
ggtataagctgacgttacaaaaactggtaattccgaaaccactcatactggacttattaaataatccctcaactggtacagactgacattacaaaaacggattaattcagagatcactgaacacccaaaacactcagattcttataactatgattcagtaaatatgtgtggaatgcctatcttaccaggtgactatgttaggcgctgcatgagatataagatgaaaacaaggttcccattttccagggaagaatactggagtggaaaacgcagaggataccacaacaggagagctatttccgattagcggccgccactgctgagctatgtgaccctgagcaagtcacttcttaggtctccgtttctctgtcaaggagagatagaaaaagaacctatttcacaggttcaaacctacctcaagaaaaaatagttgtggggaatgcgtcacgagacctagaaaacggtacaaaaccctcggggggccgctgtttctgacctagcgagtggcccgacccggacaaaatgcctcttcctcgaggaggcggcgacgagcccagcaacagctcgagcacggccggccgggccgcgggaagcccgagaacgcggcgcgcgcagctgggaggcgacccttacccggcgaggctcccgggaccaaacgccgcccgacagccacgcagaacagacgcggcagtgcgacgcctcccccactggggacacgagacagcgacagccacgcggtgagccggtacaaggccctctaggcttcagcgggtctggatactcggtggcattaacccttccctaccgccggggaagacagcagtttctctggcgaggaagtaggccgggctcaggcgccttagccagagggcgggcctgcgccaccctcggaaagcgtcacttccacttccggccggcgctctggctctgtacctggacagggctgcggtaggccagcggtgggctggcggttgcgctcctcagatcggcggcctttcgggcggtggcttgcgtttgagcctcagaaagcgaggagcggcctccacggaagccaagctggccgaggtaaccgagaagcggcttcccctatggcttcgaccctggagccgctggagcggcggcggccgcagggaggcagccattttccgtaggcggtggccgcggcgcttccgggccgcgcggctggagcctgaggcggggccaccgtcgggcacgagaaaccattctctccccgcttttcgcagctgtatcccagaggcgcggctgaagctcgctgggacactgcccgcttgcccagtgcccacgggcacgcctgtcgcagacacaggctgtggcgaatccgagtgctggcgggcagcagtgcctgcagctgcgcccgcagactctttcccgcctccgccggcatttccgtgtccggccgatgtcatgcggtcggttgagcctcagggctagcagcttctactgatgcaaaaacataggaagtgtctctttgcttctggaaccggggtgggcagcaaggagctggccacttctttgaataccggtggcatcctgggcagaatttcggtgccgtttctgctggctcacttcaggaaaagtgaggctcacggctctcctcagccccccttagaagtctaaatgacctttggagaaatacaaagtcagcagaaagtttcactttcatcgtcaccaactcctgttggagttgatatttcataaacatcagcgacagaaagaaaatacgacttgatattttgtaaataaaatatccttttttacaagttgatattttgtaaacagaggtcagctgtaattttctccagatcaagtaagcacagttaaaaattcatata

SEQ ID NO: 62762 - DNA, 891 bp, Homo sapiens
tggggggaaaaaaagccactggattagatacgagttctagtcaacgaaagtcacttaaactctgttttggcttcctcgtctggaagatgaaaatggtaatataactgactgagtagggttgctgtaagtatgagttagtgtgtaaatgtttacaattacgcagggcacacagcaagcgccacgttttctatcagggctactctcacctaacgcgtaaaacaggatggcatgcccagcgggatccgggccctgggttctcaggcattgtgattggtctcagcatatgacgcaaggcgggcttcattaatgaaattgctgtcaattagcgaagggcggaaaccaggcgaagagggcggtcctttagaaccacactcgcgcgactggctcctctctttacaggcttagctactgcgcatgcctctggccctcttgaggtcccggcgtgccccgcaacagcttccggcgtgctccgcaacagcttccggcgtgacgcagtagaaaaggtggcgtggctggcgattcgtgttcgtgagggccttttctggtgaggcggggcttaagggttgtggctctgctctctgtcctgagactttcagattgcactctgggttcctggacgcaaaaactcggagtggctgcgtgatgcagagtgaactgggtcctctggggacgcgtggggaacgtggcagtccggagtgccggctttgttgcccttcggagctccagtccgttcaggttccccagtgaggcctcctttgaagggctgggtgccttttgcccttcacgctaagaaaacactcgtttcctaaagctcgattgcgcccttgtgctgagcggtggggacacgaagacagcacagaaacgctgtttactttcagcgagcccccagac

SEQ ID NO: 62763 - DNA, 2004 bp, Homo sapiens
atttttttatattttaaaaatggatttgggttcccttttctcaaggaacttgaactgccttcacttaaattctctttacatttcagtgcttctagagatagagaaatcaagggcattattattgttagcactgctttctagccaaaaagaaactgagagcgatgaagtatcttgcctaaagcatcacacagcacagctcctaggcagcaaggccaggactagaaccagcaccccttgccttcattatgttcatcctgtgccttacctggctgaagaagaatttaataaaagctcttctaacttcatgcagaaggcggaacctgcacccttcttgaccccttttgaccccttacctcccactcatcgttaaattttaaaatgctgttctctgaaaattttacttcactctagcgatggcccaaacactcggaaaaaaatgtagcatgaggatggggagccaggttgataggtttttcacttagttaactatttattgagtactcagaacgcactcggtgccagggctaggcactgtggatgagtagggagtgggcgagacagggacgagatgagcagggtcaaggccagggggtcccggggcgccggcgctcaggctcggggtgatccgcacggtgggagcggggcacggtgatcgcggcgcgtctggggacgcccggcctgagggaggctgcctgtcccaaggagacgcccatcggggccggacccgaacgcctcggagaagactcccagcggggaggggctcctcggccgtcgcagggcccagcggctaatcccgccggccgcaaggaagcggagaactcaccggacaccagcactcgcgactccacaaactccctcagcctccgggccggaagtcagcggcgcgattcgctccgcccattacgcacgcccctgcgcaggcccgcaagccgaattgccggactgcagctcccgggatgcactgcgacggtattgacaggcgcagcaaccaatagacggtagagaatgcccttggcaggaggcgggccctgtcagtagttgtcctcagcagctagtgggcgtctccgcagcgagtggcatcggccccgcccccagcccgtgctcgccggtgtcgggtcctaagtccctcggtcttgggttcccggagaggtgagtcggctgcaggtgggtgcggggcgccgggctgttcggggtaccggtgtcgcagtcgccagtccgagctcacaccgggcgtggagttcagctgcgcatcgggttgcggcagcttcgccaggcctggggctggctgggccgcggggccgccctggaggccggagccactgggcctgcggcgcctcggcagcgagcagccgctttgctcgcgtgcaggaggctgttcgctacctcacacccccggctggcgctgtggcctcgcttagctctaccgtttagcacccggcgacatgcacccggtcggtttccgccaggatgcgggagagttggggcaagctacctgcgacagcttgaacttttcctagggattccgctccacccgccggttagagcgtattgctcattaaatccgagacctgtgtgcttgctactgaaataaaagaagtattttttccccagagtccttttaggacgttatgacttttctcctttgcaagactgcaaaaaactgacaagaagacaaaactcttcccactcccagggaccgcgttgtcttgagtttggctagtaaaggctagcaagtgaggctttgtctctgcatcccgttccccctaacatcctcagagaaccttcgtttctagaatctttctagtattcagagacttctccagggtcatgatcccaaaggcttaacccgtttacaaggagagagttgtctcctgacgcccaaaatggcagctaaaatggagataactttaagctccaacactgaagcttcctccaagcaagagagacacataatagccaaactagaagagaaacggggccctcctctgcaaaaaaactgcccag

SEQ ID NO: 62764 - DNA, 1392 bp, Homo sapiens
aagaacacttggtcaaagggctatttggggctcaggagcactcctaccacaacaggcatgcccaactctcctccaaaggagggggtcaggcagagaccgaaagcagcaataaacttggacgaaaaaggtacctcgactcacctgggcctcgggcgtcgggggcatggacgccatttggcgggtggggaatgccttcttcaagacgccacagggacttcgtgacaaagctgcggggggagagaacagttcttaaagggaccaattccgctgccaagttcctccactacccctagcctccctcgattccctccgaacccccccttaaaaacctacgccgactgctcctcctcttggcccggcctcgaaaggggcccacttaccgctccgcggttaataacaggcctcgcgctccctgacaggagctgcagaaagcgacgcccgaccgagacgcgacgaagaacgccacggccactgcaaaactcccacgctctcatgctcctttacgcaggagctgcgggaaaagccgccggaagcgacccgccctcagccctctccgccatcctgccctttgattggtcgaagttctcccgaaggggaagtccttcttttgtgttgaccaattgaacaccttaaccgaggacctgtagccactgggcagctgcgagaggtagttttcctccttttctctaagcaaccatttccgcttccgctggcggggtctcctccgtgagctccgggcctgtttgcctgctgaagtagagtcttagggtgaccccagggggacgtaatgtttccgagaagaaggacagaaagaagactgggagacaccggaactcgaaagaaaatcggtaacaaaatgtgggttcggccaacagtgccctgtaggcctgaaatttcggtctggccagagcaaggtgattgagagggcgggggttcgggcctagcctgggcttgagctgtcctttgtgtcttgagcggatggtggggccgtggaacatgaaggagtatctttgtgtacgttcacaacgttcacatcggtgtaggccaggttgctggactctgactcaaagtgttatagaggcattacgtattgtacccgcagctgcagcctaagcgagctgcttcagcttcctagtcacaggatcccacgcgagaatagagccataggttagcgtcgcaggacgttgttcgcccccggatacctcacatgcagcctaccctagagccagtcatttcctattgtgtgctgggggaggagggagtgccctggtgtaggcatttggaattggaaaattgagctcctccccaagctctgccactgattggttggtaatcttggccagtttacaactttgctttcctcagctgcaaacagctcagagtgcctctctg

SEQ ID NO: 62765 - DNA, 2744 bp, Homo sapiens
gggattatgggcacatgccaccacgcctggctaatttttttgtatttttagtagagacagggtttcatcatgttggccaggctggtctggaactcctgacctcaggtgatccacccacctcggcctccggaagtgctagaattataggcgtgagccaccacacccagccaagactcgaatcttataaccagttctcttcaaattggattctggaaagctcggagttgaaatatacagcccaggttggtcgtggtggctcacgtcagtaatcccagtattttaagaggcccaggcgggcagatcacttgaggccaggggttcaagaccagcctgggcaacataatgacattcccatccctacaaaaaaacaaaaaacccaaaaaacctgttttttaattagccaggcatggtggttcacacctgtagtctcggctacttgggagactgaggcggaggccaggagttggaggctgcagtgagccgagattgcgccccaggctgggagacagagaccctgtctcaacaacaaaaacttcgcgttagatcttgcattatagaacccctacaaccggagggcagcttaagttgcctgttttactcagggacagccctaaactgcctttcgccagaatcggacggctgagaatccagtgtcgtcgcggggtggtgctgccagctggctccgggtggtcggccaggagccagccttgtgcacctgctttcagttgttggccagccccggcgctgcaggccctcgcgagcttaggatgcgcctgccagggcctgtgcgggggggccactcggtagagccgcgggacctcggcccggaaaccgcgccaccggcgtccgcacacgctaggccggggagcccagaggtctggccggccatgtctcggcgacctcccggagcgagggacagggaaggagccggccctcaccagtgccccgcatacgggatcctgggcctggcttcgcacggagcctgcccgctcccaacctgcccgctcccaacatggcggcagcgccggcctcagggggcggggccacgtgggggcggcggccaatgggcttccgggctgcgctgccggcagggagcgggaggcggaagtgccgcgggctgccgcctccgtcccggctgcggcccctgccggttacataactcgttgcgggctccgcgcggtcccacttcccggctcccttcgcctccaggatgcgctgagccctacaacacccccagcggccgccggctcccccacgaggtgaggtggcggggggcggccgccggggctcggacctgcggcggggcgccgagggggcggggtaggcggggaggccgcgccggggtcaggggggccagcgcccaccgggtacgagcgcgctggtgaggcaggcccggccgcgcccgcgcccccggcgcacggtcctcccgggagccggtttcggggacggcggcggggagtgggcgctggccagggacgagggttgaggaggtcgcggctctcatgctgggtgggagtcgggccttctgcctgggggttgcgtcagtgtccgaccccgcgatgagtggtcgggacaatttgcaactagagggtggtcctcatgggtaccctgtggggtgtcgcgcgaggtgaagggccaggccatttccgtcgggtcagcgatttccgccttcgccccgctctcgcctggcctggtcagggcctgttttggtacttgttgcgccgattggagtcatctgcgacttgtttgccctcctctgaactcctgaaagccaggggctccgtctaggtctcctcctagtcttattctcccagctttcgttgttaagacaaattccttacgttcctggccctttacagaccggccctacagaacccacacccccagctccgactttcttctccagattgggtacttcccagggagtaaagggaatctgtagcttttgtggtttgtcctgctgggaaaatttgggggtaagtggtgggccttctctggacgaccacccacaaatctgtgtgcccaaacggagacaggacccagggtctggacatcaggcaaggggtactctgcagtaaacgtggacattggccgtttcgtgggtttgttttcactctgccaagtccttgaggcgtacacttttgtgtcactcatttatcttgaaagaaaaggttaacagcccaacagagtagttcgctttggtatctggagtggtaatcagagtgccagaactggagagaacattgccgtgtacagatgtttgccttttaccagggcactgaaggcataaaacccttagttaatgcttaactgagtgaaccatgaaagtcatgtgactccaaaggtcgactctagaaatgcggcagtccatgtagcactgtgatgtagaaattctatgatatatgggtcagtgttcacaggcagggagagggggagtcttcaacatctttgaattaaaaagcatctggggcaaaaacaaataaatacacacatatcagtgaactgctttaagttcagttagagaaggtgagattaaagaccagaagaaactcgagggagactgctgtataagtcccagttatctttccaaacagacaggttcatcacagcagtgaaggctagtcttcatctcccttcttgtgggattttctacattaatgtgcagatctgcccttggagaatggggcgtgcatgattgggctgtggtttgctggagtttcatcttactgaagttgcagacactg

SEQ ID NO: 62766 - DNA, 1085 bp, Homo sapiens
gggattgtaggcgtgagcccccgcgcccagccaagcatcgtgcattctttatagaaatgagggggaaataagcaatatggaaagcgcctagcgcaatatcaagcacgtagtaggtactcagaacctgtcacccagcgcgaaacgtccgcaaagcgtgtaaacagacgcccagaagctgggaagcttgcagccctcatagacgccggtatcgccacgccctctgccctcggcgtctcaggagcgctctctgccggcccgctctccccgtgcgtatgcacgtgccgccgcgtcttcgcttcgctttttgtttgtccctgaccgtgcgccgtccaagggtccattggttgccatagagatcgtcgagcgctgggcctgtgatcgctgaggggcgagcagttgcgaccctgggctcctggggacctgagcgttatgtctttccgcgacctccgcagtaaggcagccccgcgcccctgtgacctgcgggtcttccagagattcagggctcccgcccgccgggtcccctgtgtaggcgatccctgaggcttgcgctgccggaggctcctttcgggcctctgcgcctcagggaccgcctgacccgcggctgcaacccggccgagcgtcccaggcccttcttcggccatttctagcgaggatggaaagttctctatctgccactggccgcgtgtggctcagaacgcttgaaatgtggctagtgcagatgaataactgaatttttaagtgtaatttatttctgtttgtgtagctgcatgccgctcttcgctaccgtattggaaaatgcatggagagtttagagactattttttgagttgggttagcttagcgcttagaaaaccgaacagcaggccgggcgcggtggctcacgcccgtaagcccaacactttgggaggccgaggcgggcgaatcacctgaggtcgggagttcgagaccagcctgaccaacatggagaaaccccgtctctactaaaattacaaaattagccgggggtggtggcgggcgcctgtaatcccagctactcgggagtctgaagcaggagaatcgctttggaggttgcggtgagccgagat

SEQ ID NO: 62767 - DNA, 1612 bp, Homo sapiens
aaggtgtaggagaaaacgctgcggggagaggaaaggattggctcacaagggcctggaaggtcaggctaggcaaagtgaattttatcctgttggatgcggggagcggctggaacaaattccacctccacaactgtgttgatctccgcatctctgttgatatgaacctcacaacagtctatctcctcctataggtgcccagtcaagatttactgaatgacataacggatcctgcaagcctgcaggtttccagagggaaggggacttgtgcctccttgcttcgtacctaccgcagcccacggctcacagcaggcgagggatgaatgaatggatcggtaaggggcggaccctcccgcttcccccaacccggcgacctacggaaaggggctgaggggttccccgtctgggaaaagggctgccaaagactctaacggctctaaagtcagacggagaaccccgatccccggactggcccggacggagaccaccgtggggatccggatccgccaccctcctccctccaggcgggccccggcccctctccacccgagtgcggctcctgcctctccgtcggggctgcgggcctgccgaggccacggagccagcgagggagacgggcgagaaaggctcttctcccttaggaaagagagaacggcccgaaatgacaggacctccgcctcccgggtgccgactcccagccccacagcccggctcctcctacctccggcgccgccgcggcaccttcttaacggagactcgcgcgcctgcgcatgcgccgcccgcgcccccgcggagcattgcctgcgcgcaggcgcagagcgggcgcgcgcggtggtgcggcagcctcgcttccggtcttcctctgcggcgccgggcgcgggcccgcggcggccagcgcttccggtcggcaggaggcggggcgaggcggaagcggcgcttgcttcaggtggagtctgttagtttttgagaaagagttagggcgagtttaaggcactgtggcagctgtgagataaagtctggttcctccccagctggctcaggaaatgttcgcggatacaacggcggccccctctgggcatacctgcctgtggagcggagagtggacggtgtgagggggaccgggagaggcaccaaatctggcctgggggcccgagaagcttcctctcaggtggggtggcgtgagagtcgaggcctggaggtcggggagggttagctacgtgaagaggggattctgccgcgcttcaggtgcctggaggggatgcccgagctcttccgcagggctagggtgaagccagccagggcctgggggaaaggtagcagaggtttgccatggcttggtatttgagggactttacacatcgtattaagggtttgagcttcaacttggggtcgtcgggagccattgaaggttttttgttgtttgttttttgagacggggttttgctcttgttgcccaggctggggtgcagtggcgcgatctcggctcactgcaacctctgtctcccgggttcgagcggttcttgtgcctcaccttcccaagtagctgggattacaggcgccagtcaccacgcccagctaatttttgtgtttttagtagagactaggtttcactctg

SEQ ID NO: 62768 - DNA, 666 bp, Homo sapiens
agtgtccaagtgccacctggatgccctgcagtgtccactgtgctgggttctcaaggtttttctctggggggggtctgcggggaacctggagctgctgggtaggaggtgggcttgtggctcagctgtgtccagtggctggctgtggagcgcctcctctgctccagtaatattttcatgggcaagaaagaccactactttcttggccaccgcttcctggagcttgtgttcctggaagccagccataaataagccggccataaacgagggtaaacaggtgcctgagtaaacacaccagagcaaatgagtcatatgggccggcagagatgaacctggggccatggcgggtgtaggggttgggtggggagaggatgtcctctgaaaaggtgacatttaagctgaaactggaatgacaagaaggccccagctctgcaggcagagcggaaggctcagagcttagaatcacgtaggtcatggaaagcattggatttcgtgttagggacaatgagaaactggtgacagattttaagtaggggaataaagagatctaattacacatttgcgagatgttctgagagctgtggggacggctgggacatgtacctggaagcagggcagccaaagggagaggcagtgatgacgggtggtatggaggctgcagaatctgga

SEQ ID NO: 62769 - DNA, 2600 bp, Homo sapiens
cttaaagcactaggatgacaggtatgagccactgtacccggccttcaaaccccacagcttggttacctacaggaggtgtgtattaaactccccgtggcacaaacccggtagcttacagtaacagacacttattctctcacagtcctggaagcaagaagtccaagatcaaggtgccactagggctggttcctcctgaggctgggagggagggtctgtttgcgcctcttccagcctctgcagcctctggcgttgcttggcttgtgggtggtcatcttctccctgtgtcttcccttcaggacgtctgcccttctccctctacacatgtctgtctgttcaaatgtccccattttataaggacacagtcatactggattagggcccacccaagtgaactcatcttaacttgatcacctgcaaagaccctatttccaaatatggtcacattcacaggtactgagagctgggacttcaacatctttcgtggggagacacaattcaacccccaaccagcatatgtacagagaatgcaaagaaagcgggaaggggagagggctggcagagctgagggaacatgacacttccacatacatcttttcgtatgtctctcttagaaccatggtcaggtttctcatactcaaaaaacaaaccattacttagccagacgtggtggcgcacttctagttatcagctactcgggaggccgaggtggaaggactgctcgaacacaggaggtggaggttgcagtgagccgaggtcgcaccactgtactccagacttggcgacagagtgagactctgtctcgaaaaaaaaaaaaaaagaaaagaaaaagaaaaagaaaaagaaaccgtgaaaacaaaacagggcgcacatgaacacaaaatgaaatacaaacagcaaatatgcagagctgtgacgatgacatcaccactctgaaagaagaactaacctaagagacttcagaaaatagcactttgactgttactgtaaaactaacctcagaggacagcacaccatcaccaggctcgggcaggagatgtgtcccctgcggagtcagcaggtctgagcccgatttacgcatgtgccaagatcaagcggaaaagctgattgtggctactgagttggggtcctcacagttgaagaaaagtcactgataaggaaggggcaggaataaaccctgcggggcggcactggaggtacaggcatcagtacaggctcacaacctttgccatgtgtacagactggatgcagaaatcaataccggaacatttacacacacacatttcccagctctgtccactgacgcgtgacagggcccaggcgcgatgaccccccacttaggctacagagagcaaagtccaaaagctgttccagtttcagcactctaaagtcccacgtcccagggaaagcctttgtcctggcaaactaggacggctggtcaccctacctggcagccagatcttggtttgtgaatacctctctccaaaaacaggaaccagagatccctgcggagcacacagaggagcctaggacacccagtggtgtgcagaaggacgagaaaggacggggtgtgtcaggagaacacacagcccagccagaagggctcccagtggcagaatctaggacaatctgtgcggcaaaataacgaacgacaataatggattgtaagctgtgacccggcaaatcaagcaaacatcggtgcacacttaaacagaggaggagcagcagctcttcatcacagcagaattccaatgaataaacacaaggaatggcagaaaacagaaagcacaccatcaggaaacaccacagcaataactggctggtgtaagttactactattttgagacagggtctcactctgttgcccaggctggatcacaatggcacaatcacagctcactgcagcctcgaccttcccgggctcaggtgatcctcccacctcagcctcctgagtagctgggactataggccgtgtattaccactcctagctaattttttttttctttttttttttgactgggtctcactctgtcgcccaggctgaagtgcagtagagtgatcttggctcacagcagcctcaaccctccggattcaagtgatcctcccacctcaaccttccgagtagctgagactacaggctcatgccaccatacccggctaatttttgtgttttctgtagagacagggattcaccatgttgcccaggctggtctcaaactcctgagctcaagtgatcccccggcctctgcctcccaagcgctgggattagagccgtaagacaccacgcccagcctaaggttatgtatttgaagcagtggtagatactgccaagtcacactccacagagatcctatcagtttacgttcccacagcaatgtactaaagtgcatatcatcctacattcctgccaagtcagtgttgagatgaaactcttggatctttgcctattggtcagataaaattttcactgcagttttcacttacatttctcttattataagcaaaactgagcactgtcccgtatttttaaatatttcctatttccttttttgttaagggactgttggtatcctctgataatttttctactacattttaaatc

SEQ ID NO: 62770 - DNA, 2068 bp, Homo sapiens
ggtcactggaaggcacatggacctgtatacactgacatgaaaagatgtggaaagaatgctgggagcgttaaaattttctgaagtacaacgtagcacaatgcatacatggtttaggctttttagaataaaaaatacttatacgcagacatttatatttacacgtataacactgtgtacagccccgaagcaatgccgaaactttcactgttgttacctccgagtggggactgggaaagcagaggttagggtcgttctctctgttttacaaacatttattggcgcatccatcaattccaggccccgaggacacagctgcgtcaacgacatcgagtccacctgctctggggacccggatgactgctataggttttgttcactgtggcgtccccagaacctgcacggcgccgggcactgagcgggcgctcacatgtgcgtccaatgaacgaattaacaaatgaaccctcagtgcgctactgggaggcggggaggggtaaagcacgatccatggaactagcacgatcaccccgagtgagtccattccccgcaacatgcacccgcaaagactccgcgctccgcagcggctccacctgcacgtgcgctacctgactggaccgaagctccaggagggacgaccccgcagccgctccgcccgaccccgcgaccccccaagacccagcctccttcagggctcccatgggcgggtggcgaggggagtccagccgaggaaaaggcagccaagctggagctggcgaggagcggagcgaaagtaaacgcgtctgccgcgcttggcctcgccggacctcccacgcctgtgaagcaggtgccggcgcctcgctccccggagcacagggacgtccctgccgtctccgtggcccggcccgcccgctgcccgtccagccaggacgccctcacctcccggcacggccgccagcgccggcgcccgcagcaaaggccgcaggcggcggccccacagcagcagcgcccgcagctcgcgcgccatgtcgtactcccagagcgccgcgcgcagccacgcgggaccgtacacgatgggaaggggcgggacggggctgcgcggggcggggcttcctcgggcgcggggcggtgacgtcacggcgggcgccgggctgtccgggcagctgcctgctcgggcgcgtggcggggtactacccgtctcgtggacggtcgggcctgggggtgggacctccgtgaccttggatcgcgttgtcaagggcgacgggccttgcgcgcggaggtgggggaggtggccccgccgcccccggcccacgctggccggctgcgcctagctgtgcgcattcctggaatggggcggatgtcagtatccacgcgagggtgtggaggcgacgctggggaagaagcagttcccgtgtctgcgacctttgtgaatcccggccatccgtctaggccgctgcaagtctcttgcaaaccaagactggacaaaaagctaaagcgaatgaggaaggggattccaggcttgactggctactactccaaaacctgaacccagtgaccaataccaccaggaaaactgcggttattcgtttattccacttctcttgtccttgtcgagaagagtcaaactctaaagtatttagaaggttattctgagccaaatatgagtgtgcatggagggaggcacagtctcaaaaggtcctgagaacttggcccaaggtgcttgggttacagcttgcttggttttatacattttagagagacataagacatcagtcaatgcatgtaagacataggttggttccgtgtggaaaggcaggacaactcaaagggtgaaatacttagaggtcataggtggattcagatactttctgattggcaattggttaaaagagttgagttctggttgggcgcggtggctcacgcctgtaatcctagcactttgggaggctgaggtgggcggactgcctgcggtcaggagtccgagaccagcctggccaacatggtgaaaacccatcatctctactaagatacaaaaaattagctgggcaaggtggcacgtgcctgtagtcccagctcctggggaggctgaggcgga

SEQ ID NO: 62771 - DNA, 639 bp, Homo sapiens
tcactggtctgctacactctgaccaccgtgaccactttttcatcctatttcagtccaaatacatataccagctgtttgggtgaaggcagagttagacaaattcttcttctgtaattcaccatatgaatatgtgtaaaaccaaatatacaggtgtggctttttaaaaggcaagatagggcgcacacgtagtcgtaccatcacccttctgtttaccactgtcaccacatttccatattccctagttcagcaaaactgacaaaggggagtgaaggaggcaggccaggatattgcaacacaacacagctttgctttctacacaccaaagtgtcccaacacatgggttaagcaagagcaatctgtatcatcggaagttcctaaggttcacgattgacagcgatccagtcccaggtaagccctcttctctctgaccgttaccagggggcccgggagaatgcaaagaaaaggagactgtgggcaccctgcacccagagcatttgcacctcaaggaaacttcaccagccgatatcaaatagcgaacactgcctgtcatacttccatagctagggaaaggaattttcccttttgcagcttcctggctgccaaccaggaggctacccctttcattaagctgaaatgaga

SEQ ID NO: 62772 - DNA, 2522 bp, Homo sapiens
agtttgggttttgaaaaatggaatgactagttgactaaaaacacacacgcgcgcacacacacacacacacacacacacacaaaacaaggagttttgaaaataagcactaagcatctttccaaggaactcactcattccaagaaacttcggttctaactcgcaagctggcggctgctgtgagtgtcctctgaatgcagcctggtcaatgtgtcgccaatccagaaaacacactgccctacctttggccgcgatcttgctttctctaagcatcaaaggtaccctccgctgtcattcctctggacggccacgcgtgtggacacggccgcggatggatgcgtaggacattaccaaacaaacccacacgctgcactttacttcttccctcctggagtgccactagggtccccgcgaggagggctgatcgggtgcggggaggccgagtgcaccgggcgtgtgctgaccaactcgggcccagtgacagtcctgcgacgaacttccaccctcccgcgcggggcgaggggaacgggctgcggggcctgctccgagctcccggctcgatcggtatccgcgaccacgacccccggacgctctctttcaggtgggggtgacagcgcgccccgggcccccgccgccccggaccccctcctcacctgtgctgtcattcgccgagaaaccgggcgagctgagtttggctcttttggggttgggcggtccgtccagcaagttctcagccattttcacctgctcgcgaaaacagccccgggcacgggcggccgggccggcgagggcccggacgggggtcgggggccctgccggctgcgagggagaggagcgagcgcgggccgcgagcgggcgggcgggcgccgagggagagggagggcgcaggccgggtgggggaggcggcggccaaatctcagccacagcaacagcgccccgcagcgctcaccgcccgcccccggccgccgccgccgccgccggccgcggccccctcatcccctgcccgcctcccgagcgcgacactccgcggtgggggcgccccggcggcccggccgcccccccgggcccggctggcagcgacggcgcccggccgggcggctcaggcagtccccgagaacatggtgccgccgccgccgccgcctcgctccccccccgcgccccacttaatgaattcgctcgcggcccgacgacgagggggctccgggctccgctcccggcccgcggcccgccgccgccgccgccgtgaggaaaaacaatgcgccgagcggggtcgccgccgccgccgcggcccccccaccccccgttccgccgccgccgccgccgctgccgccgccgccgccgccgggctccgggaggccgagccgagaggcgagcggggccgccggggcgggcgccgagggccgggcggagcgggccggccgggcggagcggggtgcgcgggcggttgtggggcccgggaccggcggggccgagtagatcgcgctcgaagccccggtcgggtccgcgacaagatggcggctgttgattcctcaattaaaaaaaaaagaaagttttttttcttctctttccagagcctgaacggggagggggtgggggcggggcacgccggtgcgtcacccccccgcggcgtcaccacgcacggcccccgccccgccccctccacctgcgccggccgtggcggaaagagccgagcgtgctcgggccgaagggctgaaggcgcggccgccaagcgtagggaagctggcggcccggcgcgggccaggcctgcggggcgcctgggctccgggctgagccacagcttttgttctgatggcgaccaggcgtagagggccggggctccgggccccagcgggctccgggagcggcggcctggccgcgggctgggctctcgggcgcggattcgacgccagcccgggcccgcccgtcccgctggggcggcgctgcgtgttcccagctcctcgcgtccccttccccagaccctcctaggtggcgtcggtcgggaacggtcggggcgaccccagcccaggccgcgccactagccttcgccgccggccagggaagtggaatggcctctgcaggttacagaccgcccttgggtcctgccgacgaggtgggcggatggggaaactgaggcggggggcgagcaactgctccaaagtggtcgaggcaggaagtggcagggccgggattcgggtcccgccctacctcgtgacactagggagtgagggggcctcacgcctgttcgcatcccaaggcggcagggcagacaccctcacctgtgagagcggggtggcgagggccggcctgggcggagaagggcccgcgcatcggggcttaagcctggacgctcaggccgcactccccgccccaggcaacttgcctggcgcctcgcaggtgccccagacaggggtgcgggcctggggagtcccccacgcgagaccacagcccgcgggacacttctacgaatacccgaggtgttcccatcccagttagttatctgcccctccaaacttgcccggcttcct

SEQ ID NO: 62773 - DNA, 503 bp, Homo sapiens
aaatacaaaaaccagcagggcgtagtggcacgcacttgtagtccttgctacttaggaggcagagacaggaggatggcttgaggccagggaggttgaggttgcagtgagctgtgattgagccactgcattccagcttggatgacagagtgagactcttatctcaaaaaaaaaaaaaaaaaaaatgtccgtacttgattcctcatatctggaaagtcccttcagtttataagtggaattcacagtggtaaagccactgggacaagcacagcttctaatcacagctgtttctcaaatgctctcatgtattgcagaaaatttaacaacctaggtaaattaaaaaacctaagtaaagggagtttagggcattatatggcacacagtagtcgcttgacaaatactggctggatgttacttatctgttggaaataattcaactaacatatttgtgtactgaaacgttttttaagcagctcttcaaatatatttagataactcacacatta

SEQ ID NO: 62774 - DNA, 1208 bp, Homo sapiens
ataaaaacgcatgtaacaatgagtagcattaacatgccaaatcaggtttccagcggagagtccagaaacgctaggaaacctcatctgcagagagttggaatgaaaagtcatctctcctctggttaccgtggatcaggggcactctatttgcattcgtggactcctgaaattatatataaaatcaaaagatttggccgggcacggtggctcacttctgtaatcccagcacttagggaggctgaggcaagtggatcacctgaggtctggagtttgagaccagcctggccaacgtggtgaaactctgtctctactaaaaatacaaaagttagccaggcatggtggcacgagcacctgtaatcccagctactcaggtaactgaggcagaagaatcacttgaacctgggaggcggaggttgcagtgagctgagatcgcaccactgcactccagcctgggcgagagagccagactctgtctcaaaaaaaccaagcaacgaaacaacaacaacaaaaaatcaaaagttgtttttatgtgcattttttctggacaaagtaaccataaccttcatcaaactatcaaagcctttgcgagccaaacctgtccccaccccggaaaaaaaacaatgaagaatccccgctgttgactgagactctaacaggcacgcggattacttaactcacatctccttcagactttcagggccagcagggatacgagaattccctaagcttaaattactctaatattcattaacaactctttagagtcatgatatttaaaaaaacaatttttaaaaaggaactgtataaaaatagacacttgggaagattttaaatgtacatgtccattgcgtgcaagtgtgtactttttcttaatcgcttcctcttggctttctccggttagtttcactttcccagtacgcgggatctattccaggtggccacagccatagattcccacagtgggggaaaagcaaccatgtgaacaagatttcagatgaaagagaaaccacaaatgatcagttctggggctgattgcaaaaattagaggctgcctttcttggctgtttgagaaatcctctaagtcactgggtgccctttctagtagaaagacccacgttctggctgggcgcggtggctcatgcctgtaatcccagcactttgggaggctgaggaggacggatcacttgaacccaggagttcgagaacag

SEQ ID NO: 62775 - DNA, 1029 bp, Homo sapiens
tcagtttcctcatctctaaggcgagggcaggaggagggcttaccacacagctcgcatgtgaggcttaaatgatcaacacgcacgcagcaagcactcgacattagctgtgattatcgacgcagtgtttgatctgcgtatcactggaatctttttcatgcaccttctacatacaaaagcatttgcaaaactgttaaatcaataattgctcctgatttgtttctgacttgagtttttctttaggaagcgctgaatgaccaacccatagtgataacatgatcctactagctttacgaaggtcaaacacacctccgtgtccacaacgagcaaaatcgggaagtaaattatctttttatttatgcttcaatatggaaagctaaatttaaagtgaaaccttttgtcagaaccagaagggttatcaccctgacaggtaaggcagagcccagctgcctaatcacaaacgcctgagaaatacatcaggacaggttactgagttcaagcccagcgaaagtcttaagtcaggagactctgcaggcgacatgatttaatgaataaccacacacatggaccctggggtccaagttcattagaatggctcttttgcagcagaaggtccaaaaaaaaaaaaaagacagctaaatgatttaagtgtagtgtaaacaggagaataattaatatgatttcttatattctttcctggttatccattgattttaaacctcaacaacagcgatgtcttttatcagcttaattttacaaaggctacagagaggggtgggcatttcctaatgggctcctgtctgacgggggaatttgtctatggctgtgtgcgtggaggttaacgcagttaacgttcttaagtattcttaagtatagtgtcacttctttgaaaactaaaactgcactttgcacatagtggtgatcaggtttggtgacccaagtataggaagagtgactgacaaagcccattttggaaaagagtgatgggcgaggcccatttctggcctcatttgtcccagtctctttctgtgg

SEQ ID NO: 62776 - DNA, 1045 bp, Homo sapiens
ctctctctcccagtaatggctaaacagctgccatcacagccaaatgggaatgacaggcatcccctgagtgaccacattcccctgttttggccttttttttttttttttttttgagacagagtctcgctgtgtggcccaggctggagtacagtggctccctcagctcactgcaagctctgcctcccgggttcacgccattctcctgcctcagcctcccgagcagctgggactacaggcacccaccactatgcctggctaattttttttgtatttttagtagagatggggtttcaccgtgttagccaggatggtctcgatctcctgacctcatgatccgcccacctcagcctcccaaagtgctgggattacaggcgtgagcgaccgtgcctggcttggcttcttatcttctgtattccgagttaataaatgccccactgctaaatgctacattccagaatgctaacatagggagagtccaggagtccacacacttcagagaccttcgcctcccacctctaagaaacctcttgaattagggtttactagcacgagccttcacaaagactgtagaaatgagtctctgagagacgacacccagcacacccagcacacccagcacaccagcgaacagcccaccaggtgctatcgctgtcattcatttgctcattcgctcgttcatgcacccagcagactaaatgtttactgagtacttaccgaaggttaggatctgggctaagggttgaaagaaataaataggttaaaaaagaaaaaaagccacctaggtgactttcactccaatgcttgacctcagttcccttgtctagataatggaaatgctggccggcgcggtgactcacgcctataatcccaggactttgagaggccgaggtgggcagatcacttgaggtcgggagttcaagaccagcttggccaacatggcaaaaccctgtctctactaaaactacaaaaattagccagctgtggtggcaggtgcctgtaagtcccagctactcgggaggctaaggcaggaaaatctctcgaaccc

SEQ ID NO: 62777 - DNA, 495 bp, Homo sapiens
ttaataacctcaaggtgttgctgcacattccataagttgagagcaggtccactctgccacccagggatgtcccaggctgggcgatttgttctcccactgcacaccatgcaactgtcatttatgccttaagaaaatcccattgaagttgtggactcaatgcacaatcaaaactgaaagcaaaaccgaggcagtgagtagtgagtgcccaagcacgagaggaggggacaaaggctgggtccccggccatcaacaaacggagagctagctcataaaacagtgacctggagcttcagtcagcagccctcactcccaaaaggggtgaggagtcttcagaaactcccctgtcttatggcagaaagctgagctctgcacagaccctggaaaaaccactgttgtcaaaggagagatggaagtgggcagaaagcccaggaaggagggttccagactagtggaggtactagcctcaaacaagacagctgagtacttagagaagaa

SEQ ID NO: 62778 - DNA, 1739 bp, Homo sapiens
ttgacatgtcacacgtaaacgatagtaaacatgtcttggaagaggggctaagatgtgggacgaacgtgattattcaatgggcatgcgcttccggccacgcatcacacgcacatacaccagcgcggttatccataactctaccatttcaagtgagccgcaagagactgtaaatcgcagtgaagtgggccgtcaggcaatgattactaaataagcatgggaaacatctaagattaacagtgaagagagaagatgcgtttggaatggaatcctggagacagttaagttaccaggtgctttcacagtcgttttttcaaattcagtcactgagacataaaataatattgatctttgagaagagctctcgacggaaacagcagttggcagtgtccccagagcacttgcccttcctctggagcgcttcacgtgcgagcccgccgtctatttataacagttgggcacttgtcgccacaatggctgattgtgtggcccagctgtctgtgtctatcaagaagggcaggagtggacagcctgcactttgatgtttcccttttttggagactgaaaataacatttttaaaaaactgccaaccggcaaggtcacaaaatatttttggatggcacggggacccgattgcaaagctgtggttcacatcagatgcggaggcctgggaagaagccagtgagccccattgcacaatatcctgctcatgccaacttcaaaagttatttgcctcggagagctcccagacgactctttctcggtaataaaacacagcattttagaaatttgcaagggtcttctggatagggcattacccagaggagcaaggatttccctggccactctggttacagttgcaaccagcagccccaggcctcttgccacccttgccccgccccaccccacatccctcacccccactccacaaactcctgcccttccctgatgagctctcaagcacttaccagcgacacgctacatatttttctaatgcatgtgtcaatttcttgactcgcccattctattatagatggctcacgaaagcaggattagcgtctgttttgttcactgatgcaaccacagagccgagaatagtgcctggctcacaatatttactgagtgcatacttgtggaattaattaatttaaatagcagagacaatgggatcaggaaacacatggaaataccgatgaccagtattagatgtcagggttctgtcgcccttccctccgcccccgacgaagatcccagctttgtttacatatttgtggtgcacaaaaatagaaatggactaaacaaaattcccgattttcccaaactgtggtggattgcagaaaccaagacttcgcagggctcggttctgaaatgattttcactcaaaccatcttcctgaaactcttcctattactctctgcccatttcgcaaaccttcttgctggaggtattagatacgggaagcacctgtagtaatcaacaagtatggctctgattaaatggatttttttctttttttttttttgagacggactctcgctctgtcacccaggctggagtgcagtggcacaatctcggctcactgcaagctacgcctcccgggttcaagcaattctcctgcttcagcctcccgagtagctgggactacaggtgcccgccaccatgcccggctaattttgtattgttagtagagacgggtttcactgtgttagccaggatggtctaaatctcctgacctcgtgat

SEQ ID NO: 62779 - DNA, 958 bp, Homo sapiens
gggagcttgaggttacagtgaactatgattgtgccactgcacgccagcttgagtgacagaggaaggcctcatctcaagaattaaaaaataaaatgaagaagaaaaatgaccaaatcttgagttagagcggtggtgttctgtgatgctttggcttgaggggctcccctccttcccctcagctcacccatgctgctacatctaccagggtgggacgagctgtgaaaattggtggctccactgctggaggggttgacttgatttggaggagagcacatgcccaaaggcactgacataaaccacggtgatttcctgtaaacaacaggaaatgtacagaaggtcaacatctcagccaccctgagcctgcaatgccggttgtggcaaccaacagatcaggagaccagccaaaaacctagccggaagatacagagaataagggagctatcacgggcagtggtaaagtccctgaagtcccacacattcttcgtgctctggaaggctgcacacaggcaggaaagactgaagagggccctggttatccactcatccttggctaaagtgaggcctaccccacgcacaaaggaggccagaaaaggcctggcaaaaaggaaaaaccaagacaggctcgtataatatatgcctgaattctgaacatgtccctaaacgtacacacatatccaccgcaaactgtgaaaagcattagtagctcaaggtgtttcagcacacctctgaataatcattgcctgaccactaagctatgctgacctgggttaacccctgcaaagccaggcttaaacacattttaaaaataagaaaaaaaaaatgagcaggatcatcagcagctgctacagagacagacttcacagaattaatccaggcaagtcacaaacaaaaagaaataaacaacaaacctgcgttttgccaaaggtgatcataatccagagttgctacaacgtattaa

SEQ ID NO: 62780 - DNA, 1294 bp, Homo sapiens
tctgtcactcgggctggagtacaatggcacaatcagagctcactgcagcctcagtttcctgggctcaagcaatcctcccacctcagtctccccattagctgggactccaggtgggtaccactatgcccagctaatttttttaatttatttgtttatagagacagggtctcaccatgttgcccaggctggtctcaaactcctggactcaagcaatcctcccacctggacctcccaaagtgctgggatcacaggcatgagccactacatttggccagcaacgtggtttttgtttgcttacaaaaaaaaaagaagactacacaaaagaaaaaaatgtacaactaattcaagggctgccttaattattcctcactctttaccctcggcccacatcatttccctacaggctgatccttgcccagtccactcctgattcatggctggtgaataggtgagggaggaaaatggagagagcgaatacacagagtgacagagggaggagaagtgaaaggtcataggcattcgctgcagccatgcctgtagtacgtccatcaccaggcttcaatttatagcagctacatgactgcgtgtgtcaatctctaactggctcatgtgccagaccagaagctactattggaaaatgcccctctctcgtcatgtcgtttgcacagtaattcacttagatctgaactgagtacaaatgagtggtgctctaagatcaaagcaccagggtctttaaaatgatcttcactctccccgcaacctgccccgaacacgtgcatgctcctttcactttcaattccaaactgcacccttctaacgctggccgaaagggaaagtaagccctgttttcgtttcctttcaaatacttgatgctttccaattttattcctattttccctaatggaataatacttactacttggaaagcatcattcatctcctctcaagatcctcacagcaacaccatgttgccagaagggcaggtgcgaaatctgaaataatggcagaagtcgaatgtcgcacgtcaatgtacagcctcccatcgaggcccatggctttatttttatgtatttatttatttattgagacggagtctcactctgtcacccaggctgcagggcaatggcgctattttggctcactgcaacctccacctcccggatttaagcaattctgcctcagcctcccgaacagctgggattacaggcatgagccaccacacctggctaatttttgtatttttagtagaggcggggtttcgccatgttggccaggctgatctcgaactcctgac

SEQ ID NO: 62781 - DNA, 819 bp, Homo sapiens
ttgggattacaggcgtgagccactgcacccagcccaagttcctcattttaaaagtggcagaggtttgtcaaaaagttaaacagagttaccgcgtgacccagcaactccatgcccaggtatgtgccccaaagaactgagaaaacagatactcaaacaaaaacgtgtacacgagtgttcccagcagcaccatccacaatagccaagaggcagaaacaaccctaatgtccatcaatggaagaatggaaaaacaaaatgtggtttatccatacaatggaattttatgcacccataacaaaaaggaggtactactccatgccacaacatgaatgaaccttggaaacatgctgagcgagagaatccagacacacaaagccacgtatcctacgattccaagtataagaaacgcccagactcggtaaatcctgcagatgcaaagtgcagcacagcggctgccaggtgctagggcttgggagctgggaagtggctgcttagtgggtgtagggtttccttctaggggtgatgaaaacgcttcggaattagacccaggggatggttgcacaacactgtgaatgtgcgatatgccactgaactgttcaccttaaaaatcattaagttatgtgaatttagcttcaattaaaaataaagcaggctgggtactgtggctcacgcctgtaatcccagcactccgggaggccgaggcgggcagatcatctgaagccaggagtacaaggccagcctggccaacatggtgaaaccctgtctctactaaaaatacaaaaaattagacaggtgtggtggcgggtgcctgtaatcaccggt

SEQ ID NO: 62782 - DNA, 645 bp, Homo sapiens
taacatcatgactggagctatgaaagcaaacatttccatttgaacttcaagtggcagaagggacaaagttgataccttagactcatcagccctgaaagtgttcctaatcacaatttctttcaggagccagaaagaacacagcgttaattatgttaatccagctgagacgttcactatgaaatgtgtgttagagaaaagtcctttgaaatttcttatttgcatggtagttctgaaagtttttaacctcctgcagttcctggcacacggagtcagtcactcacttgtcctcaggaagcacaggacagcagcaggttcggaatcacactttctctgtgtgatttcacaactcgggtctttgtccaggtgagattctcactcgggtcagagggcaaaggtatccaatgacaaccctgtccttcagaaccaagtagtgttttcccatcagccgtgcaaatcacagcaaatgtcatgtggctttccagcagcctctttgctgtttgttgaggaaggataagaaaaccatggaggattaaaatcaccacattcaaattactataaagaaaaggaggccaggcgctgtggctcacgcccgtaatcctagcactttgggaggccaaagtgggacgatcgctcgaggccccgcaa

SEQ ID NO: 62783 - DNA, 1837 bp, Homo sapiens
cgcccccggagtccccagagctgctgcagctagaggagatgctgtatttgcagtgcttggggtggctgttggaggacagctgcttggggttgatcttgacgcgcacgctgttgctgtccccgctggagtcgcagctcacctcggtgctgtggtgatgcagcagctgctggtggggtggggaagccatgttgtcgagtcccggggcctgccccggccggggtcaccagtacctgccagcaaaacggggagagttagcggcgctcccacctaggcatgcacgcctagaggcccgggacctgctcctgtcctaaggggcggctccagcacgcgacctggacaggcaccatctgttcctgtggttcccggctcagcggtgctcccaccgcccccaccgcccccaccttcgaggcgcacgagaaccgctcgggacggacctagaacgcccgggggtccccgccgcgtggccgccgtggctccgggaccgctttgctcgctcgccttccgcgcctctcgccccgagggtggcctccgcgccgcgcggcttctcctcctcgcgcgctcgcctcctccagctgcggctccggagggaagttcagaccttgagcgctcccagccccgcgagccgcctgcgcacaaacaactccgctggcggcgcggagccctccatcctgcaggagccgcgctccgatgcgtcaaaggcggcgcgcggccggccccgggcccggaccccgacccggagcagcgagcttcggcgggcgcccccggctcgcgctccccggccgccccccgcgctccgggccggccctgcccgcggcggcgggcgctgggggtgggggcgccccgggctgcgagtgcgcggagcccgtcggcgcggcccgtctagtggggcctgcttccccccgagtgcgccgccgctcccgccgcggccgcagctgtcccgggaccgagcgcgtggaaccacggacgcgggcccctcgccgggcggcggtgcagacgctgccgcagagccgggctcccgcgacgccggccgggacgcccgcccgcccgcgcccacgccgggggccgcctccccgagctagagatgcggccgccgccgcgcccgccgccgtgtcccccgcggccgctgcctcatgtcggaagagctgccgccgccaccatctccggcccctgccccgcccgctgtcactgacagacgcgcgcccgcgccgcccctcgcccagccgcagcgcgcacgcgcggcccgcgctcgccgccaccgcctcctggccccggacacgcgcacgggccgcgcgccgccccgccttggtgcgcgcgctgggctggggctgcggggcggggcggggcggggcggggcgcgcgctcggctccgccccccgccccgggcggcgccgcttctaggcggcgggctgtggccgctgtccgcgctccgggcgctgtgggcccgccctccctcggcgtcccagaggccgcgcgccgcccggggtcccgaccctgcggagagacctgaaggcgcctgccgtggaagaagccgctggccgcaacgtttgggaaatcaaaatgttgccttcccactcggcacgcctttgggataaatcgaagtttccaaccgttggatttccctcccgggaggctccccttgctctgtaagcaatgaatgcgggccccggggcactcggcctgccctggacctgctcacggggcgaccttcacgggcctagcctccaaagctgggcccaccgacgaccacgttcccccgccccaggggtagtttaccttgctgtccttgagcccttctccccctcctcatgaactactgcttttccttttacacaaatga

SEQ ID NO: 62784 - DNA, 2152 bp, Homo sapiens
cacatgaagtccatctgtcccttttgcttctgtgtgtctgtctctctcaatgagttgattgcccgttgatcacacccagccagtggggtccagaagacaggacactggacctgagattgaatcccagctctgaaagttgccacctagatacctcaggcaaagcctggtttacctctctggggaggtaaactctggggaggatttccccctcctgaataagatggtaaggacttgctaagggaaagcccttcattccttcacccttcctcttctttctgcctggaacatcagtgtgaggtgtggaggtacagcagccatcttgcaaccatgagacaagaggcttgagaatgaggtctatgctaaggacagaggaacagaaaaatgagaagagcctgggttcttgatggcatcaatagtcattaatactgatatggtttggatctgtgtccccacccaaatctcatgttgaaatgtaatccccagtgctggaggtagggtctggtgggaggtgattagatcatggggcggtttctcatagtttaacaccatctcgctttggtgctgttgttatgatagtgacagtgatcggtggagcaggaacaagagagacagcacctcccctctctctttctcctgcttctgcttcaaccatgtaggacaagcctgcttcgcttcaccttccaccatgattggaggtttcctaaggcctccctggaagctgagcagatggcagcaccacgcttcctgtacagtctatggaactgtgaacaaattcaatctcttttctttataaattacccagcctcaggcatttctttatagcaatgtgagaatgaaccaatacagataccagcaccaaagtgcctaccgtgaactttttcctacccaggaaaaaggaattctttattatcatcagcctctaaaacagggctttctgttacttgcctctgtatgaactccaaactgacacgctatctaatttatgctgagagcacagctagggaacatgcccaggcatgcggcttttacctactgagctggacaagattgtggaagtgaaagtaaaatttgaagattggatgaaagatgttaaaatcatgggaaggctgaataatttgagaatactcagacatctcataggtgaggaaaatgacagtattaacattaatacaaagaaggtgatcagtcaaaacattcctcacgagaaaaggtcctttggcaaatactttcctttaaagtaaatgaatataacaggccaggcacagggctcacgcctgtaatcccagcactttgggaggctgaggtgggcggatcacctgaggtcaggaattggagaccagcctggccaacatggcaaaaccccatctctactaaaaaatacaaaaattagtcaggagttgtggcgcacacctgtagtcccagctacttgggaggctgaggtgggagaatcgcttgaatctgggagtcggaggttgcagtgagctgagatctcaccactgcactccagcctgggcggcagagtgagactccaccacagccaaaaaaaaaaaaaaaagaaagaaaaagtgaatgagactgactagttaatcaagcctttccagccttccacatgagcccaataaattgacctctcagcctgaagacgcatctgtggaaatttccaccaatgataacctgaagagtttgctcctgccgcctcgtgggcagcacgccaggcgtcttccctcagtagttaagtcaacctggctcataaagcaatggaacaaatgcgatttgtgtccccatatcttgcggaagccaaagtagagaaaatagcctagatcttttcaccgattttctgcgtcaatcctctttgattaagtatccgcgctatccacttcaatgaagctatggccccatgaataatactgtggtctgttgccatactcataatggaaggacataaaaatgtccctatttggaattcataaaaatgaagatgcaatttttttccatccaaaaatggctaatagaggttcgtgagttgtctccattttcctccctcaacggtccgttcctgagcaaatcatttctttgggctctatcacatttacgtcgttcatacatgatacccaagcaggtgcgagaatgcaccatctttcattgatgaaaa

SEQ ID NO: 62785 - DNA, 2108 bp, Homo sapiens
aggaggatcgctcgagcctgggagttttgagattgcagtgagctgagatcaggctactgcactccagcccgggcgacagagcgaggctccgtctcaaaaaagataaaaaagtaaaaacctaaattagccgggcatggtggcgcgcgcctgtaattccaagtactcgggaggctgaggcgggaggatcacccaagcccagggagttcgaggttgcagtctcaaaaagaaaaaagagtagaaaagagaggaagaaggtaggaaggaaggaaggaaggaaggaaggaaggaaggaaggaaggaggaaggaagggagggagggagggagggaagaaagagaagctaatgaccacttgatcctcgtaaggccttttcagttcctaaaatgactgattcaggaaaccccaagagccacaagagtcattctattcagatgatgaccctccctgaccctcctggtttctggagttttcattcgctaagggctgcccttcggttttcaattactggcggagagggcggttcgtttctggcggggaagggaggtgacattccggtaggagaatctcctaaaactcgcatttcctgtttgccctgggcgccggcctcaggtggaaacctcaccccgataactgagggcagcagtcggccttgggcgttcttccgtcacccaggtctccagaacctcccggactcaatggcaagtcactgcacaagttcagggccttttcggtcccgatcgaggatctggagatctcggggcttcccggtcgtctgccccacagcccacgaggcggaccgacctgcggggtgaggcaccgggagcgcatggcagccccggcctcggcctcctggcgccctcccagccacgcggtgaatgcctgagaggacagaggttcgcggccctccccatcccaccggcagcgaccgcaaagcccgggagctgagtccgcggcgtgaagcggcggaggtcagcagcgagggggcagggccggcgctggcggccacggagcttgcgcgtcgctgggctcggaacccagggacgcgagccagcgctgggagctggcggagagacggctctgccatccggctcaggcagtgggcgcccgccccgcccccagcgcccacgcgactccggccccgaggctctcccgagcgcagcgttctggaagcgccgccgctaagcgtctgcgtctgcgcctgcgctgaccccagtcccggactcggtccgaggcgcgcagcccggagggggcggggccgagcccgaagggaaggcagtgcgcatgcgcggggcgagccggccggcactgtcacagctgagcggccgcgagatcggtccctgtccgcagggtcgggtagtggccccctcggggacagcgtgtgaggattcgggcgcgaaggacggggtcagattcagccaggtgcccactttccccacggtcacgaccctggtccagaactgccctgccccgggcctcagtttccccactaaggagaggaggcgtgccggggaaatctgaggccctccccagccgcgaccttttccctcagacgaaggaagagtggtcgtacccggccgcgatcaccgaagcctccagccctgtccccgcacggatgctggaagcccgtccacgccgcgcggggagtggtggcccgggtgctcctacgacctgggggccctgtcaccgcgatcttaattgattcccaaaggatccagaaaagggacacattggcgcccgcccagggcgggcggggtcccccgggcggccaggccgatggggtggatgggcttctgctcgcggccgccttgtggggcgctggcatcggattggagtggggcagcatcgggggaggacagagaccccacgctccccccaacgcagcagacccaggggcaggcccttggctcctgcatgccacgctccggcctccccatatcgccctagcaccgctgcccgctggtcttcccttctcagaaacctgcagtggcctcaggcctagactccctgggcttcccctgaaggcccagtattccctaattcacctcctctcaccttggctgctcttccattcccttatccccgccacacacagcggtcttcccttgtctg

SEQ ID NO: 62786 - DNA, 3909 bp, Homo sapiens
actggacccagttctcctcttggaggcgcagacagaggtgtgggagcctccgattacactcacttccatcgcatgacatctcacttcaatcctgggaaatcaaggctggtgtctttcccacctcccttgcttcttgccgaagcaccctattggccctggagcagggaggccgcagaggacccaggacaccctggagaggtgaatccccagtaagatgagtcttggtctatcctgggacatgaagtaccgcactgtatgtgctgctgccagggtggcccccccgactccggccaggccaggcccgggactgacgtcagggcacaggaatagcaggccccaactctgcccagagaccatgggaaggccccaccccactcacacccagtccaagcacaacacacaacaatcctgcttctcccaccagcccctctgccaccagcctttctcggggggccagctttccagcaggtcccaccagccccacagcctcagggcaggcccaggctcagtccctctctcctctctccatcaccaaccaaatgccctgattttgtttcttcagccctgtctctttccaaagcacttctacatggactcagaggactatggagttgccaagggccctcgtgagtccaactgtaaaggaggacgctctggccagataccttcagagacttgcccaagattggggcaggggtgggacagagtccaaatatatgaaccttagtctggagttctttttgcccccatggagttcacaaaccatgtcccatgaagtgctagggttccatagaagtgactcatggggtgaggaaagatcaaacagcagagacagccacccactttgtacttcctgctctccttgaatttgtctgccccagtgtccacagagaaagactgcagggagattggcaagccctgctcctttactctcctcgcttcttccttcaaaatattagtatctgccttgagcctcctatccattattttctccaacgtcccaagacatcctgcttacagcatctttttttttctttttctttttcttttttttttttttttttttttttttgagacaggtcttgctgtcgcccaggttggggttcaatggcacaatgacacctcactgcagcctccacctcctgggctcaagggatcctcccacctcagctcccccaaacagctggaactccatgtgtgtgccaccacatccagctgatttttttcatttttgtagagatgaggtctcgctatgttgcccaggctggtctcaaactcctggcctcaagcgatcctcccacctcagcctcccaaagtgctgggattacaggtgtgaaccacgcttacagcatattttcactttgccagtccacacgtgccaggctctcagctgggtcatctcctgccctcacgtaggactccatctttccaaggtagtttcctgtgcttattcttctctgatgctcctagcagccctctgaggcagaaaaagcaagggttgttaacctctcttgaaatgaggaaacaaacacacggaagtcaagtcgtttgcctcacaagtcattccagggatgggctggaactcaggccaagagacagaacaaagctccctgggagcgaccatgacctgctgagctgttcaagcccagatacccagcttctggggctgggtcaacgtgtacctgtgtgtttcacaaggggattctacagaacaccagcatttcggaccctctgcactagccatcctcagtaccaagggccaggaagctctgtcttgaagttgaaactagagatggagagaatagaggtcaggacctgttttcagcccacctctgggtgttgaatgtattcagtgccttcgtgcaatcaaatgtagattctattccagcccgtccaagtctccttagcacatgtttataacaagtacctgccaaggttattcttccacatgacttctcatccatttgaactagagctagcaagtccaaagtcatgcgtaagtaaaatacctctgaccattactcatacacagttatgcaaatcagtcattagtaacagaatccccagcgggggcaggaatcactctccaaatctctgcctggttcatctgtcccagagagtgaggagcaccagccatggcatacatgtgagccccatgtcttgcccccatccaccccccgccccacgttttggctctcattggctgtatattaagtgcagcagggagcaattcagaaaacagagttcatgccgcagagcaggcagcctgcccccttccttgttctagatcttgtctctgaacactcgtggaccgggcaaacgtgggccagcagcctcttctggtgtcctgtttttccttgactttatcctactgggtaaacattcactgctcaggaccccttgctcttccacttttttttttttttttagacgaagtctcattctgtcgcccagggtggagtacagtggtgcgatcttggctcactgcaacctctgcctcctgggttcaagcgattctcctgcctcagcctcccgagtagctgggattacaggtgcctgccaccactcctggctaatttttgtatttttagtagagacagggtttcaccatgttggccaggctggtctcaaactcttgacctcaggtgatccacccgcctcagcctcccaaagtgctgggattacaggcatgagccactgcacccggcctcttccacttcttagatgaagtcttaggacaactttgcagaaggctgttgcccataaggacccgagaagagaaattctggctggaggaaggcttgtctgcattctcccaggacccctgaggtcctcttctgccattctctcagcctttccctcttctcccaacatgggcgaccagagtgcaggggctgaggcagccattcttggaaggcttctttggcttcctggccatgctcctaaagtcaaggctaatcccactgggacagcttgtccctggctggactctagcccttaaaatgattcatccagggaatcagatacaatgacaaaagtatgacagggtacaatgacaaaggtagcaatcagaaagaaccttgggatttgggggtccagagagatcttctgatagaccaactggcttgatttcactcatgaacaaaaccccaaaaccctggtaagtgcttgtcccaaggccatggggctagttaaggtagtaggcagcagtctgcttctagaactcagctctctatggacgctctcccagcagtgggccagccaataagagggtctaagtctaccctaggacagtgatttcttagcccaccctcttctactcttcaataacaactgttttaggctggacgcagtggctctgagagcccatggctcacacctgtaatcccagcactttgggaggccgaggtgagaggatccctagagcccaggagtttgaaaccagcctgggtaacaaagcaagacctctgtcttgcttactacttgctttgtcttactactggcccatctttccaaaaaattttaaaattagcttggcatggtagcgtgcgcctgtggtcccagctactggggaggctgtggttgacggacctcttgagcctaggagtttgaagttgcaataagctttgataacaccactatactccagcctaggcaacagagggagaccctgtctcaaaaaaaaaaaggattaagacttcagcacaattgtttttaacccatagagtcctgagaattgacagaataacttcactcctcaccccacctccaattcctgggaattcttggtttgggaggtagaaagaaattaccagaaatcccacaaccatcatatatatacatgcttgtcactgatgcctggaggagtcatcagtataaatgactattcacttttattttattttattt

SEQ ID NO: 62787 - DNA, 1330 bp, Homo sapiens
ggtggcgcatgcctgcaaccccagctactcaggaggctgaggcggaaaatcgcttgaacccgggaggcgggggttgcggtgagcccagatcgcgccactgcactccagcctggtcaacatgagctaaattacgtctcaaaaaaaaaataaataaataaaacagccgagctggaggtgtgtgcctgtaatcccagctactcaggaggctgaggcgggaggctcgcttgagcccggaaggtggaggctgcagtgagccgagatcgcgtcactgcactccagcctgggcgacacagcacgactcttttaaaaacaggttttgttgagtgccgcattgatccggtccctcccacgccccctgtgcttcacaaaaacgtcaggtccgagctccggcgcggcggtctcctcctccgcgggtccgggccggaactcggcagaaggacgagcagctccttggggccggcagtctcccatcgcactgagattgacacggcaatgtttcggatactctgggtaaaaattaaatgtcttacgaaaagtcctgtcacccgtttcttgattactttttacggcggcttccagaacctttcgtcagcgcgagctccatgcccggaggccgccgtcacctgctctccgggaaggccctgggcaggcaggcagcgcgctgaaggagtccgggagcagatcgtgcgagagagcgcgcgggcgccaggcgcgggggcggggccagacgtgcgtgctggcgggagcgcgcgcgccatggcctgaggcgtctgggaacatgcgcggcgaggggacgggcggggcgagtccgggaaggggcggggccgcagccgcgcccctgacttccaccgcctgcgggtgagaccgcctaccatcgcccggcgcgcttgagcatgcaaggggaggtgggattcccctggcccgcccccaagccacgcctctggcctatgagaactgagctgtcccgcagggaccgagagaggagcctccgctttcgcaggggctgggcgttccgggcgcactgcgccctctgttgatcctcttaggagctgcgtggggaccgtcgggcctgccgtttcgcacctggccgaaaggggtcgctgtgccgggccagatcctatgtaaatttagctggataatctcagcaagagaaaattggctgcagtgcaaagaagccaggctcaaaaggcagggttatcccatttctatgacatgtcacaggtaagactatggcaacatagatcagtggctcctaggggctgggttgaccaccaagaggcatggggggcattggaaatgaaggaactaattcatatcttttttattttgc

SEQ ID NO: 62788 - DNA, 3172 bp, Homo sapiens
aagaattttttttacttattattactgggccctccaggtgggcctcgtgcaagggccagccctcggggcatccctgccagctgccaaacccatcaactggcccaagtctaggtattgactgggaacttcagagtagccttaaggtggggacccccggggcagagggttgggcaggagtgtctacacgtgtgcagcaaccttccctccaggccggattctgcaggcgctagcgtccaccagcctgtgccacaccggcgggctcctcctccctcaatccccgcccagactgcctcgggcggcagagcacgtggctccagccctggggagccatttcgctcctggagcagcgcggcaggaaaggggccacaggtcccaaacttgcgcacgccgtagaacgcccacctcccccacaccacgcccagggggtcgttcaaaatgcagatgtccgggccccagcgatcagagttccaggcatgtgcattttaagaagtgtgcggggtggtttggctgtgtgtggtccttgagtccatcaccctttgggtttagagcaacctaggaccaaagcttgcaaagtggcttctggggaggcctgcggacctcgggccacccacccggctgggggacccgacgctttcggtttacggcaggggggaggggcgttggatgggaaagtttgcagaggaaacccacgtgcggcgggaagctgccctgcgaggctaggggcggcctcaggtgtcccttccccaaatggcctgcccacctggcctgccttgcccatcgtgcccgcgggggccgagctttgtgcagggaaagcgtggcccaggagcgcctacaaatcccacaatgctgcaccagcaggacacggagaactacagctcccgcgaggccgcgcgcagaggtccgcctactccaagagggctgcagagtcacgtccaggcctcgctagtaaacagcgcccgggcgcgggcgggcgagcgagcggcagccaacgtgccccgggccgcggcgcccctaccggccgcgcgggcccctcggggtccgcccacccccaacacccacacgcgagcacgcccccgaccccgctgcagccccgctctgcaaacacgcacagtgcccggctccccgcccccaccccgcgccgggagccgcggcatggctgcattgtagccgccctagctacacccccacgcgcgccccgggcccccagacccccttggatggggacgacctcagatcccgaggaaggaaggagaggaaggaagccgccgcaggagggggaaagaggaagcgcgggggggaaggccaccagcaccaagcatggccgggactgctgcagaaccacgtgggtctgtttgcaatttacaaacgtcgcgactcgcccgcctgcagcggacaaaagtggccggggccgcttggggcccccatgctccaaggaaggagggtcccggggcggcgcggacccggcgtgtggggctgcagccgtcccggcagctaagaaaggctagcggggtcggcggcgcgggccatgcgtgcgcacacgcgcgcccgcccgggcgggctggccgggggctgcagtggtaggaagggggtggggggaggaggagtacacacctacagagccctcctatcacttctttctctgttttcctgaaatgttgcaaagagggcaccttctgagtgggcaccatgaaatactccatagcgatcggcccccctcctctgcacgagccaggtcccgcgatcagccggagaatgcaagatggaaatccgaatcaaagggcagcgccggacggaggtgcagaatcggccggtcccagatgctggcggcggcggcggcggcgaggggagggaggcgggcgggaggggcgggagggaggtctctccggcctgcctccccgggcgtgtgtatgtgtgtgtgtgtgtgtgtgtgtgtgtgtgtgtgtgtgtgtgtgtgtgtttgcagctgatcagatgtctgtttcaaggcgggaaacagctggtgaaaactcagcactcccccggcctccttccgcggagtaaggaattgcatgtaaacaaaggactatttgcagcgccccccgggcggcgcgaggccggggcgagaggggcgcgggcccccggggaccggctgcaaccggggtctgcaggcctctcgcggggcgcagggggccgggggccgcgggcgggcttgcggggcgcggcgtgaatggagcgagctgcggccgagctacatgcgccactatgggtgatgaggtccatcagctgacaggttggcaagcgttgcaaaaaaaaaaaaaaaaaggccagccaccgcgcagggagcccagcccgtgcagcccggagtccagcagcgactggcccagagcagggtccgcgcgctcggccggcccgcagggaggagggggcgcggctgggtcgggcgtgcagcggcagcaaggaaggcggcctggggttcgcgcttggggcttctgctttttcaccattgcagctgcacggagcggagcctctccggtgtgctcccttcgagccgagcccagggccccctggaaacttgcgtcacagccaccgcttcccacatgtaactcggggctgacttcggaggccggccagcttcctccctcccgccttgcttagctggccgcacggccgggactccggatcctgggaatcttggacccggcgacgggacggcaaagggcgcctcggatgctggggccgccctaggaagccgggggccccggcagggaggggagggtggaggcgggcctgaacggcagcggcccccgggcgcaggctgccagcgctgcggggaggtctgctggttgctgccgggtcccctgctattcccccagacccgcactgttccctccgcgggctgaaggctgcagcttcccattcataacaaagcccgtgtgggacttgcccctccgccaggatgcgctccccaagagggggtgacgacttggggcagggacggggaccctggcggcgagcttccgtcctccgctcgcacgccgcaccttccggccccaggccctcccctggctcctggagggttggctcctggctcaggaagcccacgcctgccttggaatgtcctggatcctgcccaccgccttccaggttccgcctaaatcgcgcctcctaatttgacttattcctactagtaaca

SEQ ID NO: 62789 - DNA, 1084 bp, Homo sapiens
aggctgaggcaggagaattgcttgaacctaggaggtggaggttgcagtgagctgagatcgcgccattgcactccagcttgggcaacaagagcgaaactccatctcaaaaaaaaaaaaaaaaatcagctgggcctggtggcacatgctgtggtcccagctacttagggagctgaggtgagaggatcacttgatcccaggatgttgaggttggagtgagtcatgattgcaccactgcattccagccttggtgacccagggagaccttgtctcaaaaacaaacaaacagacacacaaacaaacacacaaaaatggggctggctgcaaccctatttgaggtggctggagtcccctgcaccctctctctctggccccagctatgggcgcctgccagccctctccctctccttctccctctgcctctccgtctcccctccatcagctcacccgccctgtccttttcagcactcaatttctcttcctcctcccacactcgaagaggatttcagctccctttagggacttttcccctagggaagtgcctctctgcttctcagtgtccacaaggaggaaccaggtgcccaggccttcaaccgagtgcactccctctagaaacactcaattcacagccatgctggctggactgtttctgctttacacagaaatggccatcaaactgctttatcaattgattatgaggccatggggcagttacaataatttcatcaagcagagcagagcctgttgacatggaggatggacatttctgaagaccctcaaagaattagctgtaaccatgagaccagatctaagacccctgacacccagcctggggccttctcaccaggaggcctctggttaatagaaaatgagagtaaatcaggccaggcgttgtggctgacacctgtaatcccagcatttgggaggccgaggcaggtggatcaactgaggtcaggagttcgagatcagcctggccaacatagtgaaaccctgtctttgctaaaaatacaaacattagctgggcttggtggcgtacccctgtaatcctagctactcagaaggctgaggcaggagagtcgcttgaacc

SEQ ID NO: 62790 - DNA, 1702 bp, Homo sapiens
ggcaacccccaggccttctgcacctcacctgggcagcaggcacgctgactgtgtgtgtttcaatctctccaggctcagagggatggcgggggatgctgcctgcgcggttgctagtggcggacacagctgcctggctgacactgcctttgtcatgctccagagcactcagccagcccggggcccctcacccactccctctctcctcctgccaccagaagcagcctcttcccggctcccaccctttctccccgaagccacttgtacctgctccagagcctggagaggtgacaagtgcttcccagacaacaaaagcatctcccaggagaacagatgttacgcacactcagctacacccttgctctgtgccctgattttaagctgtgtttgggcagctctttgggatgaaactgaggcaaggggtaaagggcctgtcttggtcaaggtcatcccaccttgggactcctgggtgtgtttcagacatccgtccccttgggttccaatgctggtctggccacttacaagctgtgtgaccttgggcaagttatttgacctcccagagcctaatttccccccagataacgacagataggtagtgaacccacctcttgctaaaaaatgtgagccattattgtcattactccatccttttaattcctctttctctccactccagccacatccgcctcaatgcctgctgcccctggaccttaggcttgggatgtgaaatctttctggaatgttccttcgttagttcctcgcatggcttgttccctcgcttccctcttttgagtcttgactcaagtcacctccccagggaggccctgtcctgccctgtcctccctgggcgcttatgtgacatccgaggcggtttcccaattcgactacctgtggctcttgcgcctggaacgtaagccccacgaggacaggactgtttcacttctgactcccgtgtccgcagcgatggaaagaatgactgtgggcgcctacccccggaggatgctgtcggcgcccagtctggcggctcccggcgcgcgcccgcgaggtcacgtccggggcgcgccggccggaaggaggccccgcgtgggggtaggggcggggcgtccgagccaggccacgccccccggactcgcgcccccctctcagcggcagagccagccagcctggggccgcctcgcacttccgctcaccagccggcttgttcatattcatgaggcgggcgagaggcggggcccgggtcaccggcggcgccccgcccctggcttggaatcccgccccggcggaggcttgggccccagtggggcgcccccagcttccgcctcggggagggagtttccacttggtcacgactcaaaaatgtgtcgctcgcgcttctccgccccctcgttcctgccctgggggggtctcctccctcggaaggcaggaggggaggggccaagggagggacggctcctcctccccggggcaggtccttagggatcccgggcggactcctctccctccaagttagcgccttcaacaatctttcccctaccccgtcagacagtcttctgtcgcccagagctggagtgcaatggcgcgatctcggctcactgcaagctccgcctctcaggttcaagcgattctcctccttcagcctcccgagtagctgggattgcaggtgcgcgccaacacgcctggctaatttttgtatttttagtagaga

SEQ ID NO: 62791 - DNA, 4666 bp, Homo sapiens
ttacaggtatgagccaccgcgcccgaccgataaacatttttgctaacagatttaaactagcgtctcctgtaccttttttctacacacctcgaccccagggctgcagttctgcctgcctgaggtcggatgcggtcggctgcagggcagggctccgggctgaagcgcagcgattcccgccgccgtgagggggcgctctgcgggcctcggcctcggcccttccggacgcccgcacaggtcgccggacccagagagtcggcccttaatagccccctcctggaagcgctaggtcccgaaactggccttcccccggggcccatctcccggctaatgtttaacccggccacactccacattatccacactcaggagaccggggtgaggtgagggtggaggctgggggaggtcacctccaaatcgccaacttccgagcctttgctccaggcaaacggccttcctacatcccttccaggtatcaacctacagctcctgcgcacctactatgtgcccatttccacaacaggtcatgagcacctaatatgtgttcattagaccaaaacatgagcatccattacgagtccacacctactatgtgtgcattcacccacaacgtcctgagcacctactatgtgtgcattctcttaaaatgcaatgagcatcgattgtgtgtccacataacccatgagcacctgctatgtgtccatctgggcaccagcccatgagcacctactatgtgtgcattctcttaaaatgcaatgagcatcgattgtgtgtccacataacccatgagcacctgctatgtgtccatctgggcaccagcccaggagcacctactatgtgccaagccttgtgcctgccatggatgccttgtgatcaagagccacgtgcttcgggctctggcggggaccgcagcatcaaatgcacgaatgaagacggacttaaaaccagcgtcagatgcctcacctctaggggatgctgattctgggatgcctttttcgtctcctaggctcctcaaggccaactgcgctgggaagagggggtgtccaacagcaggagggctgtttttttgaactacaatttgccagcatacagcagagcagcaagaagataacagggcggggggcacgggattagcccaaacaaaacacactcaagaacgcgagtctgtggttcaacacgaggcagaaaacagctgggccgggtgcggggcttctccctcgcgtgtatccgctcactgcactcgctgccctggccgcgggcgccgcgcagggtgctgatgtccaggagggatctagacctcccgcggcgctcgggctagtggacgcaggtggtcccaaatgctgggaccaagctaggaaccaagcggaagctcggattgctcggcatcgggcctcgtcgttattctaccgtgagggaaactgagaccgagggcacggcagggagtcgcccgccgtctcaccagcgtgaggggttgcgccgggccccgaaaactggtttgcgccgcccggcatcgggatccgggacctctgcccgccgggcgctgcctgcgcgttcctggaactgggctgggcggagaaatcagggcccgcagagaggcattcctgccgccttccccgccgcccggggccgcaggggggcctggccaaggtgaccccgcgggaggaggcgaggggtccccgcccgctccgccgccgcgacctcctccatcttcccggtctgcggggcttttcctctgggcccgcgcgcccggccccctcctcgggcttccccgagggcgggacgtctcgggctcccccgcccccccaggccacctcccggccgtgtcctagcgctgccctcgggccgggggcggggccgcggggggggggtggcgtgaggatggggccgaggaggacgcgcgcggctcggcgccccacttccctccctcacccctccctcccggtgcccgctccccgcggccgcgccgccctcccttccccctccctcggcccagcgccggctcccgccgccccctcccccgacgcgcacgccccgcctggcagctggcgccccgggcctggggccgcagcggtgagaggggttttgctgggagggagggagcgagcgagcgaggggaggggtggaggccgccccccgcgcccctcctcctcgccctcctccgcggccggcgggccctcctcccgccgcctccctcctccctcctcccgcccgcccgccctccctctaagacatccccgcacggcccggccgccgcggccaccttccctgcccgagctgcagatgtggcggagcggccgggcgccgggcggccgtgccaggggagcccgcgccccgtgaggcctcgcgccccggcccccgcccgtcccggcccctcccccgctcggctccccgcgccccccgaccgccggagcccgcagcccggatcccgaccgcccccgccgctgaggtaggaagccccccgggcgtcgcgccgtggggaccgggccggggcgggggggggggggcccgcctgtcgcgccggggctgcggggcccgagggtctcctcccccgctcgcgtccgcgccccgggccattgtgagccctcgccgaggcccccgcgttcgctcgctcgctggctcgcgcgctccctccctcgccggctccccggccgggtccctcgagctctcggtctttcttctccctccttccttccctccgtctggaggccgggccgagcagcgcccgggcccggggcgggcgcaaacttcagctgggaagttgggcggccgcggtggggggcgtgcggcgaggtgagaggggggtacccggagcctgggcatgaagttgtccggggcagccgcccctcctctcggccgcgccggggctgctgctaggaagggctttggaaggtgcctcctcccttggccgggagagtctccctcctgctgcccctcgcaagcccgggtccttccttggacctcgggaaggggcgtccctggggggtcaggactgggagtttgggacaagtcaggcacttgttactcccctgcggtccgggtggacgcaggcgaccggcctggcagggaggagatggcaaggggtccatactcgccggagggcgggtctggagcgggtggaggagggggcgaggcaggtgcatcccgagggaggagaagcacgcacagcttccccgctggccccctgggatggggctggaatccaggctggcacctggaggccttggcatgctgccctgcccagcagggtactcgggccacagcagggcagcgtgcagcctgtctgcctgtccaggagggcccgcccagcctggccagagggtggccgggaagcaatggtttcaaggagttgcccagccctgccctggggcctgggaagctggaagggatgctgggaggggccctgggcccccagccatcacagcccaggatcttggctctggagggaacgcttgacactgagggggcagccaggccggctggggacctggccaaggcctgggcttggtctgggccatggaaagggcctgggccatggttcttggaggctggcaccctgggtagtaggccgccatcctgcgtgtcctggcatcctggagggaaggtggggccagcctgcggctggggaggaagcccagagacactgcgcttcggagggccttccagcccccgggctcaggggaggggaaactggccccttgggtcacccctccccaagccccattctggtgccacagtgccacagctgtccaggcccagcccacacacccatcccgggtgacctcggacctccccctctgcttctccttctccccagagcccaggctgggcctcctagctggcctggcctgcacagggggaggggctgcacctgggaggcccctcccaggacaccctttgccaagctccagcctggcccatttcactgcccacctccagctcaacttggccctgtctgcagccagccaagcaggagacagtgccagggacttgggatggtgttttggggggtgtgcggaccccttggaagcaaccctgtttttcttagcctttcctcctccccctcctttccggagctgccattagcgctgaccccctgtgcctgcccgcccttccctgtctgtgacctttgacctttggtgttaaatccctccagctggggctcttcggcccctgagtgaccctggcccaggccccctggggagttctctccttgctcctggctctctacacagggacacctgccagtccctccctcaccaatggggagggggtgccctgggaagccagacagtgagtcaccccacttccaggcaccgctgcttttggggtcagtggcttctggggattggctggagcccagtcacagcttggagggtgaccggggaaagcccctggcctgggagtctcctgccctgggttcaagtcttggctccaccaccaacttccagtggtccttgggtcagactcctcccctctcccggccttgtctatgaaaccaaggggtcagaccaggtgagctcccagagtccatgagaagcctgggtggaggggggtcagggggaggaaagagggtgtaaatccagcaaaagccaactctcaattatccgagggtggagcccggatgaataactggatgccacagacatcccaaaacctcattgcaaacaat

SEQ ID NO: 62792 - DNA, 866 bp, Homo sapiens
caacccctgggcccttgcgtgtgggggcgctgccctgggcgcatcccaggctgagtgctcgagagacgcggccctgggctctgtgcaccctccacgctgcgctgtcccaccggggggaaactgaggaacggaaggctccaccaggaggcgcagaggggcgtggggccggcgggccttgcgctgcgcccggggagcatccacggggtgcccccacctgaccgagagccggctcctgccctcgggaccccgcagtaattagcacccaggcctctggctgagcttgtccagagccaggctgtcggccttacgctggggagagccacggccacccgctcatgggcactcactcagggttccctggttgcaggcccgctgctccccgctctgggcctccgaggctttcaggagagcaggaacctagctctcgcctgcccccttcacccagccgggaacaaaagcacagagcagagcccagaactggctgctgccggtcggggcgggggtggaaggggaggctttaagcctggccaaggtcagaactgaagcagggtcactgaccgtctcccctctggggtggggcctccattggaggaaaaactctgggtggggagggcctggaacagggatgctgggaggtgtagggctgggggcagctccttcctttcccgggggcagggacgcaggccgtgtgccgggctctggcctgcattggaatgaacccctgcctccctggcaggacccagtggcaggaagtgtgtgggggtgcccctggggactggacctgctgatgaagggggtgcattggagtcctccctctggctttgggccgtgtggctggccccacctggggagacaggctcctcctg

SEQ ID NO: 62793 - DNA, 481 bp, Homo sapiens
ccatctgtcctgggaaggcagtggggcaggtgccaaaggatgttgcttgggcagcgctgccagtgagtgtccccgtcagctggaattcccagttcccaaaccatcctgcccttgtggtccccttctccggaagggtgggggtgggggtgaggacagaggctgtggggaggcctgtggccccaggccagccaagggaccaggccaccagcccttcctggctcctgaattcttcatcagcataaatatttacttccttcctccccgtccaggcttccagcacagaggagcttcggggaggctggattgcgcctgtgtctaaaaataaacaggtagcaggacgatagacacacagatagacagatggaactggcaggggttcaggcagagggcaactccctgtccagccagagaaacagtggaggggaccctggtccatccatcactgtcacccacccacctgctagcgggggtgtggtcccta

SEQ ID NO: 62794 - DNA, 875 bp, Homo sapiens
cacagcagaaagagcccagagaagaccctcctgtgatcacagcgaggggcagggctgtggctgtactgcagatgagggagggtcagggatgcacctgatgacacctgcggtctcacctgacttcgcctccttcctaaagcccctcccgagtggaacaggaggctcagggatgggatgctggtgctgtctgaaggacagaggtgaaagtcagagggtcccctcggcttgaaacacggctcaggtctcagactacccctcacaccaacagccttcggtccctctgctgccatcgtacagccttgcaatcacttgtttacttttctgccaaggccaatgactgttgcaaaataatgaacggtaagagctgaggtcataactggggagcttccccgaccatcccctgcacacttcaaaccaaagcggcgtggtggcctgtggcttcagctgcctagagctgcagggcagaggggggctggcctgcaaagtttcagcagactggacggcccattgaggccagcaaggttcctataggaggcatctctgagaagacgcagtgtagtgtaatggttacacctgcaggctttgggatcacctgtgtgcaaaaatcccagctatctgacatagacacgttctcaactcctttgagcaacccagtttgcttacctgtaaaatgtggccaccaataaagctgagataatgcctgtcaaatgcctggcacacagcctaatggtacagcaggtgctcaataaacattggttttcattcattactactgtttcacaaaatctgacaatgaccaggcactatgaagtaacaaagcttctttcaaaatagcagctcatttgatacaggccctttgcttcctcaggggtgaa

SEQ ID NO: 62795 - DNA, 1916 bp, Homo sapiens
atatataaaatacatgatatataaaaatatatataacataataatatgtagtatacataaatgtatacggtatatataatacatatatataattttttttttgagacgcagtctcaccctgtcgcccaggctagagtgcactggcggatctcggctcattgcaacctctgtctcgcgggttcaagcgtctgtcctgcctcagcctcccgggtagcttggactacaggcgcgcaccaccccacccggctaattttttaaattttttggtggagaccgggtttcatcatgttggccaggctggtctcgaactcctgacctcgtgatccgccgcctcggcctcccagagtgctgggattacaggcgtgagccaccgcgcccagccaaacctgcacttttaaagctaccctaggtgacctgacagtgtggcgcaggtctgttgactggctctacgtgccaacgatatcacacaaacgctccgtgctcggtgtctcggggcctagttcaagtcccaggtcagccacttccctggaaaggccagctttccactggggataacaacagggcagcaacatcgactctgcagcgctgtaaggttccagggcaggggaggcgctcaccagccagactcatgctccaccgctgcccacggctgctcgctcacacgcgggctaggcacagcgcgaccacgtttgcccggcctcttccaggcagacggttttccctggccctgaggccgccggtgccgccgctgccggcctcgattcccccgggtgcaacgcccccagaccatgcttcccgccgggcacgcagggggcgcacggcgcccgccgcccagcccggagctcgccgcccggcccccggcccccggcccgactcggcttcccctccccggtagcgcccgactcggggctcaccatggcagccgctctgcctccggggctcaaactccgacttcctggccccgcggccggggatcaagcgtggtcggcgggtcagaggtcaaggaaagccgcagagagcgcgtgcgcgatacggcgctgggcatgcgcattgcctcagtctaagggcgggccaccgggagcgtcttagcggctcggggcggggtcggaggcggggtttgactgagcctgcgtcgggctctggataactgggggcgggcttgggagggcaaggggcgttaccgggagtctcaattgcccgcgtgcttaccccagtgcgctggagcagctaagcacatcggtcagacgtggggcgatttctgcccttgattttgccaaaatatttgggaatgcaacattatatgaaatcaatgaacataatatggagtaggatgctaaattctcaaaaatactttagaaaatagaaaacttcaaaataggtttcatccacattcctcctgcctgagaagctcgttcccttcttcaaatctttgctcaaatgtcacctcaatgaggcccacctggaccccttaaaacgccgtgacttgccctccatgaatgaaaaaagtaacagctttattgagatataatccatacactgtagatttcatgattttcaagtgcacagtccaatgccttttattcacagagctgtgccactgtcaccactattagttccagaacgttttcatcacccattagtcactccccagccccctcccccagcccctgtcaaccactcatttttctctctatggattcacaggttccggacatttcatagaaatggaatcatacaagccaggcgtggtggctcatgcctgcaatctcaaaactttgggaggccgaggtggatcgcttgaggtcaggaactcaaggccaggctgggcaacatggtgaaaccccatctctacaaatacaaaaattagccgggtgtggtggcaggtgcctgtaatcccagctacttgggaggctgag

SEQ ID NO: 62796 - DNA, 7288 bp, Homo sapiens
ggctacaggccgggctggagggggtgtgggtgtcccaaggctctccggaagtcaggagctgagctgggcccccaaaggctctgaggcatgactgaccacaaacgcggagggggaggagggcagagtgttttcctggaatcctccaaggcaggggatttttctggactagtccggcccctggcacccgcccctcctgcccaatcaagggccactgtcaactgcagcccaggccccacccaccgacggtgaccacccctatgcctccacagctcaggcttgaagctgccagtaactgtggggccgtgggcagaccaccactgccctccctgacacagccccttcatctcataatatggtggggaagagagtccagggctgctcacaactcttaaggctgtcgtggctaagaggaccctgagctcagatttggcattggagtttatacttaggaggctcttgaaagggctttgtgtgggctgccaggagttttttgaaattgggattagctaccaacaataacacattgagagatttcacctaaaaatctggatttccagtttctcttcaaaaatccaaagctctagctggcccgggctggtcatgaggactcagcccttaccagccccactcccgccatcctgcctctccagggccgcagaggccctggggtggacttctggcatttgtcacctgcctggtgcctcataggcatctgggctgtgacgcttaggattcctaaatagtctctcgctttttacacaaaaagcagaaacctgcccagtgtcatccggcaaacccacgacgggcaaggtctccccgcgcaggtcaggtggccgcagggtgagggccagggcaacccggcccacgagcccctcggtggggaaggggcgtgtctccacgcggctccgccccggccaatggggagaggccccgcccctgccgcggcgggcccgccccccgggactcttaaggcgcgacctgcctccagcgagccgactccggagcccgagcccggggcgggtggacgcggactcgaacgcagttgcttcgggacccaggaccccctcgggcccgacccgccaggaaagactgaggccgcggcctgccccgcccggctccctgcgccgccgccgcctcccggtgagtttctgtggggctggggggctgcgggcggggaagggggcgccacggccaggctgtgcacacgcgcggggaccgccgccgcgcgcacacacgcactctcgggcgggaccgcggccccagccccacacggtcacctgggccgcccggcgggcaggccctgtacgctccctcccccgccgtcctggggcgccgacagccccgcggccggccagggtgcgcgcctgagtgtgcggtgagcccgcgaggctgcaagcagacaaaataaacaccccgtcccatgcttcctcctcccacggctgggcctccggcatgaccagttttatgaatcaaacccctttgagggggatagccaagccacaggcttgggtcacttttccctcctggggtccggcagtaggtgctgctgtgcagaagggctgcccggggtcctctggacccttgtcactcaaagcacagctgggggctacagatatgcagccctagggaggggcggggagtggctggtgggcgtccgatgcccatccctccaggtgggggatggacctgtactggccagggcccttagagcttcgggtatcaggcagggtgccgggtctctgcctctgccagggaaggggctttgcttgggctgcaaacccagtggcctggagccagcctagtcctttgtgtccctgggctggcagtgctggggcctgaggactgctgaggtcccctgtggtcactggcaggccagccgattggtgccaaccattctgcctctcccccattcgttaacgattgccacaccagggtcactgaccgcctcccctgctgtggcccaggggtggagtgtgcagggtggaaggaagaggtcctgggggtctaggtgtccccatgcctgccttttgcaccaaggacaggtgaggctctggagagaggcagcgggacctagagcccccttccccaggctgagagcctccagggctggggattggataaaatctccaaggtcccttcacactagactgtactttgggtgttgagggcatagaggggtggccgggctgggaccttccaagcagggtccattagggccagtccagggggcagcaaagtccaggatgggcccagctattgacaaaaacccaacagagctggggcaggcgggtgggggatggggagcagtcccctgagtttactctcttctcccaggggagttggcctggagcttctgtaaacagagtgtcagaggcaggaagaggctctggtgatgagcagcccagctggatcccctccagaccattatctagcctcccctgggcctggggagggaggatgcgcacacacatgccagcctgggggccgggcactgcctgtccccaccccgcccctgtctcctgcacgttggaacagctgtcctgctacctgtgggtccggagggtcagatggggatggggctgggggctggggtcccagggcatttgtccagatggcacctctctctccatattctgggaatgggagaatgggattcagcataaggagcctctcagacactgcccagacctgtgcttacccgaggaaggcccctctggcacgcagcccaggggccagggagatggcaagggagatgccccgggcaggagatgggtccgcggctcctagctcccattactgtcacccccactgacagccccgggggagctgggacaagtcccaagtacagaaaattaagtccttgcctgggcttataagtgggtcccaacacaacactgggcagcctctgggaacaagaaagcagggccctgctgagcccaggagggagctcccacctcagcaggccagacagccagtcctgccagtgagcagaggtgtgtagaggggaggctgcccacagggatggctatccctgaccactggccagccctgagctcatgggagggcagcaaggccacctaactctgttagtgacctctcctggaccccccatcagctgcccttagagtcccctccctgggctggggagcccaaggctctgtgctgccaagaaaaccagctcccctcactgctgtggaatttgcgtgagttcttggagaagggggagggtgcacgtgtgtgtgtgtgtgtgtgtctgcaggagcactgcccagtgggcgtgtgtctggcgtgggcgtgtctgtgtgcgcgtgactggagcagggctgtgtatttgggggtgggtgggggtgtttgggggagcctgcttgcaccaggaggggcagggcctcagcctccttccttttatcggtttccacattccagagtcagccggatcgctttccctccgcgctgggccgccggcctcccccgcttttcctcattccagcctccctgggtgtgaggaggctggaggaggctccctcaggccacctcggttttgggcagggggtgggggcaggcgaggggccagttattcttcagggttcgggacggcccccaccagactcttcgtggggaatgcaataaggttctgacattcctcaggggctgcctgagagatttaattaaggagggaggagggagccggcctacaccgggaaggggctggggcggccgctggggcccctgctggccctgggccccgagcccggctgggcattgagagcagtgcgggggcagggttgtggttcagtggccaggtcctgttctgcctccctgaatccatcccgcctgcccattgatcagctcacagaccccaggggcgccatttctgccacgggttggccaagaaccctgggtgattgtggggggttcggcatggggagcttgagaagggcaagaccccttccagggccacttccttctcagacccccaggcccaggaagcttagggctggcggccttccttggtgactaaggtgttcttctggcaagttcagggttaattgcaggttagggccttactagatgggtgcttgcccctgggtggggacagggcagtgaggaggccccgtgtgagggcccagccctggtggcatcacacctgccgcgtgccgaaagtggcatctggactggcccatttctagttgggctgcagccactgcacagctcccagggccacaggtgtcctccctgacaggttgcacctcttgtgactacgatggcacgtcccaccgccccaggggctcacttgagctggggcctggccttagtcactggtctccctgccctgggctaacaggtctggcagctgccaagtcacccacggtgctactgaaggcacccacctggggccgggccagcctcctgggtggagggaggagggaagaccctgtgcctgcccctctcccagccctgccagctggtccacacctgctccaggatacagagcctcctccctgcacaggaagacgagctgacatcctgactgtcccctttgcaaccctctgtcctggtgttctgaaccctggctgtgcggaggactcgctcaaggagcttctccaaaatacagctctgcctgggtctcactcctagacattctttttgtttttgagatggagtattgctctgtcacccaggctggagtgcagtggcgcaatattggctcactgcaagctccgcctcccaggttcacaccattctcctgcctcagcctcccaagtagctgggactacaggcgcctgccaccaggcctggctaatttttttgtatttttagtagagacggggtttcaccatgttagccaggatggtctcgatctcctgacctcgtgatcgtcctacctcggcctcccaaagtactgggattacaggcgtgagccaccatgcccggcagaatttcttgtttaattggcctgggggtggggccccagcatggaggttttttttagaaagcttcctggatgattctgatgtgcagcccggcgggcaaagccctggcgtcacaggtgggagacggaagcccagagaggggagcttgcttggatgaggtcacaaagcgtgtgagtgcctgactgagctcctggctgtggcattatctgtggaatgaagagcgccagcttggggtggtggatggagtaagaaagaggctgacacccatggggacccccgctcaatcaccagccaggggtccccgcgcctatagggagggtctacctgccgcagtccctgaggaactcgaggcccagccctctctgccccttctgtgagggcccacgacccctgacctctctgccctgcccttgggactgctgtgtcccaaggaaggggagacggggcggacccagccgggccctgagcctcctcggacacgtcagcgaaactggagccagccgtcctggccgccggcacagtcccgcctgcctggaggggttggcagactcccggggctgggctgctgccaggcctgaccggccacacagagccttggcgggccagcatgaggagcgggggcccggagtctcagggtcagacctgcagcgcctgtcctgcacccacgctgaagcatacggcacaggaggggcgtactggcctcagactgtctatctgtctgtccaagcctgtcccctactcagcaggcacaccgcctgccccagaatcagtgagatgttctcgccaggggctgatgtggtcaccagatgcctgggtcccaccccagccatgctatcccctggcccgtccccgcctgaccctgggcgtgtgtggtgtaccccagaggtgggtgggcgtccccctgggagttgagatgacgagtgccttgtcctccttactcatagggcccctccctgaagtcctgtgctgaaggggccgccaagggacagctcacccaccacgtgcccccttccagaaccagagataccccacccccgctccccagcccccagggtgaagggcagccttggtgtggggatgtctgatctgtgtaaagctggcctgaaaccctctcccttagtagtacccacgcccagggggcaggcagagttctgcgtttatgagtgacgccctccgcagtgaatgtttaccgaccacttggcaagtgctccgagcacagaccaagtcaccccagacacaggcaccacgagcaccacgagcagcgcccactgcacaatgggggctgaggtaggggtcgtggccgggctgtggaccctgtcgccctatgccagttactgtgccagggagggagcaaggccggcagcagcactcagcaaggctgaggaacttgggtggaggacggaggccccagacccttgcgtcatcttcccaccccccgacgtccccgaatcccaggaatcccagggctgcctccggaacacctcctgcaccaggcagaggaaaaggtctcacctccctgcctgactagtgatcaaatatcaaagcccaggtcctgggatcaccgggtgggagggtgggtgggcggcggcaaccaccgtgtgacctgtagacagcccccagccccacgcacacaccaagcacacgcccagaccccaggcgggcgggacagctcccagaacttgttaaaagaacttccccatttgaaaacaaacagaacaacagaaaactacaactccagagggtgagggggcagggctgcttgcaccaactccagaggtgagaaactgaggcccacagttgagaaaggaactctggcctctgtcccctgccaccgtcccctccacagtcagccttccctcgctgggttcctctcggggctggctgatgggttctcagtgccaggagtccctggcggtgccctcagagctgccagcctgtagcttacaaactctggggttttccaaagctccagcgctgcctcctccctcctccctttgatgtgggggtagaattggggctcaggcaaaagagctcaccgcacattttacggggctgggaagcaggctggctgccgcctgctggatggtcagcccaggaccccagcccacagtcctgacctagacccctgtcctgctaacaggaacgcacattccacagctcactacctgtcagccggaaagccaccctgtggccagatggacccacagcatcccctctcccttcacaaccttgctgattaaagacccaacagattacggagcccagagctatggctggtccccctccccagtgcagggtgaagagcaccccccagcacgtgcccctaagagctggcctgcacacctggccttgcaggg

SEQ ID NO: 62797 - DNA, 1977 bp, Homo sapiens
acttttcaatggctctgcactgcaatcagaataaaacccaacttcttccggtggcccttgggttctgcaggaccactctggactcatctgtcaccatactgctccggccatcccctccatccactcatgctcactttccatttctccaccaggctctttctcaattctcacccttctggcctcagctaaaatgccatctactccaggcagcctttcctgaccacgctactgagactggccccctccattctccatcccagtccctcatgtgtgttcttcaatgtcgttatgaaaacctccaatgctcttgtttgtctgcttgctgtctccctcatgaggctacaagtgccacaggggaaggaaaatgccgttgtgttcaccgggatgtctccagcagcttagcacagcataaagtggaagcagaggaaatatagtccacactacaaaaacggaacctctacccagactgccctgacttgctctgggaccctgatggggtcacttgaggtcaactcctaggcccagttatcggaggacactcccaggccttacaaataacacggaaagcggaagagcagagctgacatcgtttccaaggcgcacccctcatcagtcctcctgccgtttcgggggtccgaagggtctcccggcacctggctcagcaattctttggggctccacctgctcaggcttccccaggccccacccagccgtggcagcatcaccgagataaagaaagagcttgcgccagcggcgagaggaggaagcaccggcggaaacccgagggaggggcgcgtgcggccgaggggctccctccccaccactgacacacttgggctcgccggggccagaggagagaggggcgtctccccacagcccagccaggggcaggggcgacccggggcggcagggaggaggagccaggcgccggcagcgccccgagccccggctcccggcgaggccgaccggaagctgggaaggcaggcggcctcgcaggcctgggccccggctaggagggctgcgccgcctcgggggtcccggggcgaggtgggcgaggcgggcagaccgccagggtcaccgagcgccagagcgagtcacgggagtgccggactctgccctccggcggcgacgaaacggcccggacgccggggccctggcctgaaggggggttccccggggatggaggtctcggggttccagacggccctggagggcacccctgtggggtccgggcagggggaggggcagccggacggggcccgaggcgacagcgcccggtcctcgggccggactcacctcgcggcggggcggccgagcctcggtgtgccggaacttggacaccctgaagcggttcatggcgacgggcacggcggcggacgcgtcttcgaggaccccgggcgtcgggtctcaggtgcacgctgagcaaccgcgactcccgctgcctcggccccacccgggacccaatgccgcggtcacgcccccggcgcgccccactgccaatcgcagccgtctccggccccctgggccacgcccccaagcccctctcctttcgcgcgcgcaccaccggtcccgcctcccggccaatccaggtacggccgccccgcgaggccacgccctgataccgaggggacggactggcgcgggtgggaggtcacgtggggcgcagctgtcagcccacgtctcctgcggtgcttgcttgcgtggggtctcggctgcagcattcgcgattttgtgtgcaggatttgctgtggagtctttgcggtgtacctagcacgccttccagcactatctacctcttcctgtagagaggggagaaattagctccatttcagagacaggaaacccccggctaaaggagagtgtaaactgtcggtccccaggtcacaccagtggtaagaggcagagggggaacaggggcccaggtctaaagcaaatccctgtccaccgggcctactcaaaagcctctgcatccggcca

SEQ ID NO: 62798 - DNA, 2544 bp, Homo sapiens
ctcggcctcccaaaatgctggaattacaggcgtgagtcaccgcgaccggcctcatcacatactcttaaatttagggtttaagcaaagaaggcaaacactttcatatcttagacatttgtttcttaagttcaggctacttggaatactccatccctacctgacacacttttcatcgatgttcagtttgaatcttacctcttagaagccctgacatcccaaacttcctctctcccattttagaaatggaatgactccttcaccttgtatgactgtaacagtgcttattcctgtgatagcatttaacattgttagttgctaaggagcctctctcgagtcattgtttgctcctcccgaacagggatggtgtatcaggcatcactgtatccccgatattctagaacatgcatgacacacagtaggcgctcacaagttttactaatttagtttttgggcagcacggctcccattcggaaccagcaagttcactgcaggtttggagaaggctaacacgcttaaggagagagctgaggtcggcgcggtggctctcgcctgtaatcccagcactctgggaggccgagacgggtggatcacgaggtcaggagttcaagacccagcctggccaagatggtgaaaccccgtctctactaaaaatacaaaaaaattagccgggcgcggtggcgcgcgcctgtaatccctgctactcgggagactgaggcagagaattgcttgaacccgggaggaggaggttgcagtgagttgagatcgcgccactgcactccagcctggcgacagagcgagactctctgtcaaaaaaaaaaaaaagaaaaaaaggagaactgagtcttgttagaggaggcgggtggggaatcagcctaagagacagtgagactgcggccaggattctgagggtggcgacgaagatttactagaagcgcgcggagacggcatgagtaaaactcacgcaattcgtcgtaagtctcagggtcagcaggaggaaaccacgcactacatgctgggagcggcgcgacggaggaccgcgttgtatgctgggacttgtagtctcgcccttagccagacccctcggaccacttaagttcggctacattcaaccacgtccttacaccgataacgtacacccattggttgtctagcacagaatagcgaggttctgcacggcgagtctacctaacaacactcttcagagcaaaccccgtttcggcgatggctacccggaaggcgcgttggctgcggctacgcgtacggtgcgcctgcgcgtgcgcgacgcatgcgcctctacgcgcgcccgccgttcccgcgaggcccacctagagccgggcggcgcaggcgcagagtccccgggccaagatggctgcgcggtgctccacacgctggttgctggtggttgtggggaccccgcggctgccggctatatcgggtagaggggcccggccgcccagggagggcgtggtgggggcatggctgagccgcaagctgagcgtccccgcctttgcgtcttccctgacctcttgcggcccccgagcgctgctgacattgagacctggtgtcagccttacaggtgagggcaggttccaacttccgagtggcggtttcagggcctagaaaagagtgagtctcctcgctgtgactacggctgcaggggtagtggggtggagggtgtcttccgacgcggatgcacaattgccggagacacagacaggcaggaggcggggaggccccagtggctgctcagccgtcaaggaagggagagaagcgtggagcccccggcggcggtgatgaaacgccccgtagatcgtgaaccttcacctctctgtcaacatttctggaggccgctgctccctcgtcctcttcctttcccatctctccaccttctagcccgtagcggaagggaagagctaactgccattcggagaggcctaggtactttgttacaacaaccctgcaagatgcctgccgtcatcaccattttaaagaatgagaaactgagattcaacggaggaatcgaccagcccaaggtcatggagttagactagaagagttgtctcaaacccaaagcagtcatgtcatagtttacgctctttctaccacgtggtgctaattgaagggcacagttaacaatctttttagaagtctttagttggtgattgtaataataacacagtcagacatttattgagcacttactgttggccaggcatggttttccccttacatcacatttccacatgataggcactgttattccattttataaagatactgaggcttagatgttaaaccacttataaatgtcacaaggaggtggaggcttgatatcattgcctgagatgacactgaattatacattaagccttgaagtgcttagtcatgttttcttttcttttcttttctttttttttttgaaactgaatcttgctctgttgcccaggccggagtgcagtggctcaatctcgactcactgcaacctccgactcctgggttcaagagattatcctgcctcagcctccccagtagctggaactagag

SEQ ID NO: 62799 - DNA, 506 bp, Homo sapiens
gagcccgggaccccgattctgcggccgagtccactgcagaggcggggatggagctgcgcgctaggcgccaactccctccccgcagctccggccccacctggcagagcgccgctcacggaagcccagcgtcggaggacccctggctgcagccgccaatcccgacgtgtcggccgaaacccctcctccggcgcagttggctcctcctggatcccgcgggactcggcgtcgtttccgggtttgcccgccccaggcacgtgcacagtgagtttgtgtaaatccagttagaccaaaatgagcgaggtggagagcctcttaaccggatgctacgggtgatgactgggaggaggagaaaaattacctctttatcttgcatgaacatcttaattttcaggtattgggcgtcaggcaaagataattaaagctatgtccatgagtcttatcccttgaggccttgtccgcttgatattttctttgcctaactcacttttaaaattttattattttta

SEQ ID NO: 62800 - DNA, 1282 bp, Homo sapiens
tgcattggcaagtgaccaagtgggtggtgccacggttgacaaccctatttcttacatcactgagtggatgtacaaggattaaaccacactggggaagaaaagtgctcaaccctgaggcaccctcacacacctcggctcttgtgaacactagtgttcctgccgaagcacgcctacttaccccgctgagcagagcctgagcctgcaacctccagagacctggggaaagccacatactccgcttcccgcccccggcaagggcgtgtcagctacaaggggcgtgtcatctctaggccccgccccgcgctgcgtgcccacgttgcgccggcctcgcgccagtccgctgggctgcagggactgcggcgcctgagggagtcgctgacgggcacgctgactggaggctggcggacaggcgacagcgacctgcggcaggtgagctgtccgcgccctcccggggccttccttccgcccggcttctcggaccgcgctgcgtccttcgcgggccctgcctcggtccaggccttcggacctgggcttggccgggccacagccctttgggtcccctgcgccggtctgaggggagacccggccgggggcggccggaagctgggtgaggccgggcagaaggacgaagaagggcgtggaggggctgtcaggggagggcgaaaccgcggacgccgctctccagaagtcgtctccccgggggcgcggggaggcctgaatggctctctttggcgtccccgttgggcccaccctctcccagcgtcacggctatgctgggcgaggtgacccccggggtcgtagctgggggcgtcggcggtgcagacaggggatgccggcagagattggagcccggcttggctgtttcccgggctgttggcattgaccggggctctgcccttcctctaatgcccttatctctataggaagtgccccttgagtgggtgtcgtgacttcacgagtgaaccctggtacgccctggagcagagtcggactgggagggatcaagtgtgggggcagccggttagtccggacgcgggtttacctattactttctgagcgcagtgctctgggtggattaattgccctgcaaaagctgccgggacctccttgcagtctttgcacgaggcctgcctgtgtcatgccatttaaatcgcgtctgggccgggtcggtggctcacgcctgtaattccagcactttgggaggccagggcgggcggattgcttgaggtcaggagtccgagaccagcctggccaacatagtgaaaccccgtctctactaaaa

SEQ ID NO: 62801 - DNA, 649 bp, Homo sapiens
aatcacttgaacccgggaggcagaggttgcagtgagctcagaccgtgccattgcactccattgtttcgctgcaacgagagggaaactccatctcaaaaaaaaaaaaaaaaaaaacaggcttgagtatacctctcacagccctggagaatgcctgagctgttggacagttgccttttccattatgtctgcttttttctaaagctattcattcattgttgcctaatcatgtcctcagtcagtagttgatgttctgggctatttgaatttcctctgaataatgattaatggagataatgatgtttgaccagttctgggaactcttgggaattaaaggaattaaactcttggacattaaacttcactttaatgtgtatagttgtgggtgctgccccattggagaagattgtgacaggaagttacacagttttacagcaaactgctgggattttttatttttttttcagtaaattatgataactgtagcattttcctttgcaataatgataacctaaggccttggtgtttcctctaaaatgtacatagatacaggatgtgggtttgttacaaagttgtataactattgcctttttgtggctgaccccttccctagagaacaacatgaagagaccttgctgctgctatgaaaccc

SEQ ID NO: 62802 - DNA, 2555 bp, Homo sapiens
tatggtgattctagaaccacggctggctgctcttaaatccttgtaagaacttgggcacggtagctcctgcctgtaatcccagcactttgggagggtgaggcaagaggatcacttgagcccaggagttagagaccagctgggcaaaataatgacatgccatctctacaaaaaaaaaaaaaaaaaaaaattagccgggcatggtggggcatgcctgtagttccaggtactcaggaggatcgctggagacaaggagttcaaggctgcagtgaacgtcgtgacggcaccgctgcactccagcctgggccacagagcaagaccctggctctaaataaataaatgaacctttgtaagagaacctgtaaagctcttccctggttctcccatcctgtggaaaacctccgaactccttcaaattctcaagggtgagagacggatttctaaatacccagggcttccattaaggtaaaaaccattaagaagataaaaaagtcaaacccaataaacaacaattctaagactctaattaatgacatgcatgcttatttgggagggaaaggcactgatatctgcaacttactttgacacaaaaaacaagagggactgctggttggacaaatatgtgatgaaatacaataaagtgttaactctacattctaggtggtggtctgtgggtgttcactgtaaaattccttcaacttttgtatgtttcacgtttttcgtaactgaatgtgtagagggggagtcttctgagactggcaagtgactgggcataacctttccgattaagggcagagggcaaggcagagctggcacgcctccctccacccagttctacctagatcggccccaagggaagcagcaaagaacccaggagagcagtaacttgcccgggcaccgccccgcccagcatcaggccccagaatacagaagaaactggcagaaacactatggaacgtccctgcccccgggcccgccaaccccctcactgggacaggttctcagccccagctgcgcccgggaatgatctggggagcctactaaatgcagattcctgggcagcgcgacggaactacagcatcccaacacctggggtgggccccaggaatctgcccgtttcccaagagccccaggtggttctgacgcagaggatcttgagcccacctttggaggaactcacagccactcgccccacctcatctaacacctgttgagaagccccccaaggaactcgctaagccaaggtcctcgaaggcgcgactcctagccccaagctaggccaggccgtcgccatctccgccggggatgcgcggccgagcgccacatcccgactccacacgtcggcgagccgggcgcgggtgcaggacactgctgggctccgggacggccaaggtcacccgcggggctcggcaggggctggctcggccacggggctcctcctcgaccccctttccttgagaaaacaactcccacccctcccctccccgtctcgccctgcaagacggagatggcaatttccacaaccttccctgacggaaaaacgtgcgggcgagcaggctgccattccgggcgcacaaccccgcggcacacagcggggcgcccgcccgggccccgccaccgcagcggcttcgacatccccagggccgcgctaggtctcggcagcgccctgaggggaggacgggccccgccatgccgcgccccaaccgccggccccgctttacctccagaagcccggtgcccgaggccggccgaaagcggagaggggcccgggtccggacaggcgccggcagaacaagaccctcagccccgcgcggctttgcgcgcacaacgaaaccccccaacccaccgcccaccccaccgcccagaggcttctaggacttgtagtccgcccggtcaccccccccaccacaacccgctctgagaggctggggactacggtgcccggcatgcaccgcccaggcgccgcgggcgggggcggggagggggcgccacggtccgaggtcacgccccgacctgaggagagctggcgcccagacccttcccccggggaggagggctcccgcgcgaagccgtctccgaatgcgtccagtcgactcaccgtccccgcagccctggggcagcggccgcaacagcaggaccgaacgcctcggcagctggcagtcgcacttctgtcacaaggaggcgggtagactttggaccagggccgaggcccgggacgtcacggtggggggtggggtctcgggaggcacgtgatgcgccgtgatgacgtcagtgggagcggaggcgatttggcctagagctggggctgagcacgtgggatggtcggggcctgtttgcccaatgtacacgaggctggagaatagggaaagaaccgtccctgtgagcgcctcctcttcactcatgccagcaacagggcagggcatcttcctccagggctgcattttttcttttatgcgactaatatttattgagtttgggaggtgcattacataaaaccttgaaccacacggtcactgtccctgcgcttgaaactgcctttgcaaaaattacaacagaaa

SEQ ID NO: 62803 - DNA, 2098 bp, Homo sapiens
attctgatccccctgcagtccccaggaagcggagcctcagagtcctctggcttctagtccctcctgcaggccctgggatggctcctcatggagaaaccaggttcccagtccccggctgggcacagatggtaccgggatggctgaggccatgaccctacccctgtgaggggcacagctcaaagggctctggcctcatcccctgataccaaccaccatggggttaatcctggggtcggtgaattagggaaagccaggtagcctctgggcagcacaagccaggagcactactgtcctatgggttaggagaggcccgggggagtgggtgccagaccggggcagcatcacctcctacccagctagcccgaaagctggtgaaccgtgtgcaccctccccattgcaccggtaaagggacagatgcccctgccagccccaggagagcacctagtcgcgcacacggagtccccaggcacacctctgaaggggatacacgctcatccctgtggtgtagtgtggggctccgacacgccacccctacactccaggccgtgtacacacatcacaccgtgccgggcacgggcggcatctgcacacccgccacatgtgtacgcgttgatcacacaccaaacgcaccagggggctgcgcgttcacacgcgcgccaacgtgcccgcaggtccgccacctccccggtgcccggccgacgccgtggcgcggtgcgtgcgtaaacacaaatgcacatggacgtgtgcgcacgccgccgaccgcccaccaggcacgcggaccctcggaccactcgcccggagcggctccgccctccggcccagctctgccgaggcctggggcgtcctccttccggccgcccgcccgactgtccgtctgcaccgcggggccgcccggccctcggccgttacccggacaaaaggggtggggggggtccccgtctcgatcccgggggactcgcggccccgcgggggcggcgtatccccgaccggtggcccggttcccacctccgcccgccgcgagcccttgggatccggacgccgggcaccgccgtcgggaaagcgggtcgggtctgcggcccggagggggcgcacagccggcacgcgtccacgccgtccgcccccgcccggcggccacgcgggacacactccgcccgtggccccggccctcgcccggctccggcgccgcgcacctcgaactgccagtgggccgcctgcagcagttgcttcgcctggtcggccgcgcagcccgccgtcagcacgaactggttgatcatgacctggtgcttgagctcgtccatgttcacggacatggcgccgccgcgctgcccgctccggcctccctcctccgcccgcgcctccgcctcacgcgtccaccattagcgagccggctccggctaatacaaatatttactgtgcggctctgactcaccgcgcctcgcctcgctccgccggcgccgcggcatgctgggatatgtagtccccacggtgcgccgggcgccccgggggagcggggccggcaccctaggggacgcgaagcccgggaaggggcgtgtctgagcaccgagcgcccgctgtgcggatgtccgggccgtaacccgagccgggcgcgtccacgtcgtcctcgttgctctcggtggcacccgtgcccctgctctggcacggatgggggtccgctggcgggggccacgtctgtgcatgggcgcaaatgcctgaccacaggatcttggccaaggcctggggaccgtgtctgaactgtgagcgcctactgtgtgtggatgcccgggccgtgaccagggttgggggagtccacgtcgccctcgttgctctgggtggcacccggcccctgctctggcacggatggaggtccgcaggcgggggcctcaggttcgtgcataggcgtttttgccaaggcccaggaacggtgtctgaaaactgagtgcctaatgtgtgcaggcgcctgagctgggaccagagccagtcacgtccacgtcgccctcgttgctctcggtggcacccacgcccctgctctggcgggaattaggagcccagaggccggggccacagatctgtgcatgggcgcaaacgccaggccacagac

SEQ ID NO: 62804 - DNA, 1506 bp, Homo sapiens
cacactgtaggcgccgacaaatactcgttcagtgaatgaatgaatgagccacttaaaagctccgccgcacgtcaccgcctatagctagcctcctagctctcctcactcaatctctcatcgcccactcgtggcatgggtccttcctagcctggctctgggcctgccccactgtagccccatgaccctctggacggcgcctgggacaggctggcggggccagcagcctctggtgcttcggggtccccctcccagcagttctcccgctttcccacgcaaaatctcgtgctctttgccggaaatctcggcccttagcgggcgggcgccaaggcccggcagagccagttccggagcggccccaaactccctttcccagaatgcctcggtttatttgcatcgtttggtcccggtgacgtcagctgagtgaggtcgtgcctcgaccaatggacagcctcggggtgttaggacctggccatataaggtaaacaaagctggtcgcccaatgaagaggcggcgggggcgggcgctgggccggggaggccgggggcggagccgggggcggggcgaccgggcggtgtttacagaccggcacatggcgcttccggttgacgttgctgacagctagtgaggctttagcccgcttcgagcgcccgggggcggtaaggcgcgatcatagcagctctaggtgaccttggtccggctccttgcgccccctggccccagcctccttcgttgagacactatttgttgagtctttcctcttttcctggccctgacctagcgtggggcgacagaagagcaatagccgggtgggggctgtgagaacggctggggttgggagcgaatttcggaaacccggaggacgagtatagccttgcaagatggaaaatgccctcccgggctggcgcggtggcctgtaatcccacctactcggggtccgaggagggaggattgcctaggcccaggactttgagaacacgcctctacagagatttacattttaagaaaattagctgagttcgggtcgggcgcagtggctcacgcctgtaatcccagcactttgggaggccgaggctggcggatcacctgaggtcaggaattcgagaccagcctgaccaaaacggcgaaacccgttctctactaaaaatacaaacactagccgggcgtggtggcagtcgcctgtaatcccagctactccagaagctgaggcaggagaatcgcttgaacccaggaggcggaggttgcagtgagccgcgatcgcgccactgccctgcagcctgggccacagagcaagactctgtctcaaaaaaaaaaaccaaaaaacaaagcaacaacaaaaaaacagagaattagctgggttccatggctcacacctgtaagtaatctcaacactttaggaggccgagatgggcgcggatcactagagtccaggagtttgcgaccagtctgggcaacatagtgagaccctcgtctctacaaaaaataaaaaataaaaaaaattggccgggc

SEQ ID NO: 62805 - DNA, 1079 bp, Homo sapiens
cttaatgttgagcgagttaccagagctctgggcttcactttctcactggcggggctgagttctggcctcactgctgtggaagattaatgcctgtaaaatgcagagtgcagggcctggtgctatttgcacggttctagtgctctcacctgtttgcctccatctggaccactctgggaagccctagccctattttacagataaaactgaggctggaatccagccttaccctctgacattcagaacctgtggagaagagcgggcacccatggtgcatttctggcaagggaggagggacactgtcccggcagggcccactaagggcttgccttgcatagggaggcaggaagtgccttcacccctccttccaccatcgtccaggtaccactcagctgcctgcccaggcttgcccagctcaggaggatctctctcaggccagcaggctggcaagagttgggcaggtggggctggcagagtcaaaggtcaccctactggtctccatgcaaccccctcacccccatcccctaagccagcttgtttttccacgggcaacagggaattaaaaaacaaccttgtttttagccaggattagcctggttggagaatgaactttggattccttagcaggctgggatggaacctgacagctggggccagcacctagtgggagggagaggagaaggcatttccagcagtgcccttatgtcacctgagggcccaagaggttcaaggctttgccagacttcacatggccagtccatggggggcccagggccctggccgcctcctcctcaccccattctttgatttattccacagatgtgcttatcagacacccaccgggtgcctggctctgggagcaccagaatacgccaggatcctgcccactcagggggttgagaagtctagacttgagactcaggcactcagaccaggaagccaccagtcgtctccagcgtctgtctttatgtttctttttttttttttttcattttattttatttttgagacagggtctcactctgtcacccaggctgcagtgcagtggcacaatcatggctcgctacagtctcgacctccca

SEQ ID NO: 62806 - DNA, 634 bp, Homo sapiens
cgggcaacagagtgaggctgcgtctcaaacaacagcaacaacaacagcaacaaaaaataaatcaagtcctggcttagctgtcacctcctcaaaaaaaccccttccctgactcccctgccaatagtgtcaattaattgcatctcaacgttttctgcagagcacccaccacattctggaattatatacttgttaacctttctagcgtctatttcctcacctgcctgcagcctccatgtctagcttgtcctaccatttgatgcctgttgcctggttcatcacctgtcacatagtagctgcaggataaatatttgttgaataaatcaatgaattggccaggcatgacggcacacgcctgtaatcccagcactttgggaggccaaggtggggggattgcctgaggtcaggagttaaagaccagcctggccaacgtggtgaaaccctgtctctactgaaaatacaaaaattagttgtgggtgcctgtaatcccagctactcgggaggctgaggaaggagaaccgcttgaacctgggaggcggaagttaaagcgagccgagatcccacatgatcatgccactgcactccaggctgggtgacagagtgagactgtgtctccaaacgtaaataaataaatgaa

SEQ ID NO: 62807 - DNA, 2602 bp, Homo sapiens
ttaaactaattggtccagacgtggggccaaagtatcgggattacaggtgagccactgcaccgggcctcagccttgtcagggggccggaggttgcttaaccccctggatcccagcttcctcatctgtaaaacgggctgatgcctatacagctctcagaaccacacctggttcagaagtccccaaatggtagtcctcaaattctggccaaggccaaagcaggtgcttcacttcttccgtgcacaccctgcaagtgggctccgggtggcaggtgcagctacgccctctgccggtcggggcgggagacaaactcaggggagtggggagaaccacagcgactcagggagctatttcagagggggcaagtggaaggcgctggggctccaggagagtctgtaagcgaacagatgaggaaatgaccaaagagttaatatgttagtgcagcgcttggaacgcagagggaaggaccatttgccctgtggttggttggttccttccctctgaatttaggtccatttggtttgtcccggagtgcttgtcaacccgtcagagggcctgggaacggagcatcctgggaaagatagttcccagacgggcttcccgcgctgcttcccggcgccttcggcggcgagaggactccatttcccgacgtgccccgggaccgggaggcggagggccgccgtggcgtcggtccccgggccgagccgggggtgggggctcgaggcgcctccgcggccgtggacgagcgtccgtgcggcctggtccgggccatgtccgcgtgaggaccccgccgctgtcgccgctcccgttccggccctggcccctctgcccggcagcgccgcgcaccatgggctccattctcagccgccgcatcgcgggggtggaggacatcgacatccaggcgaactcggcctatcgctaccctccgaagtccggtgagcgcccggccccaggcgcggactgctaggcacgcgctggaacgcggacccggcgggcgcgggggcggggactcggggcggggcgccctgctcggccccctccgggcctcgttgctaccccgagccttcgcgcggccccacggccccgatccctaggcgtggctgggggccccggaggaacctgcccgagccgtacctggcgctgctactgcccggcttgggtgaccttggggcagtcccttcgccccgggcacctcagctccgtccttgcaacaggggggagctcctgggggaaaccccgagggcggggcggggtgctgagcgcgggtcccggcgcatcgcttctgcctagaaaactctcattgtcatcagattgacctcaccgcgggggccggctttcgctttctttagtggcttggtgtgaaggccgagccagtggtttgggcaatttccctcccatcaggacggaggctcttggtgtgtgggttggaggagtggggctgggcccaaggagacgattatagttgatcgggaggggccagggtccttgctgagaggacccagccgatactcgggcctctgtgttatggctgagggacgtaagacaccaaggaggaagtgactgccaagatctcagctggatggaagcatagttgggaccgggaccagctgtggggctcccacgtagctttgttcccagctctctttctgcctctattgatgagttatgtgttgactgggagcatctagctccaagtctcaccctccatctcctcgtggggttctttgtggtggaaaggagagaaggaagaggagagagaacttgggcatcatggggacatctagattgggtcctcagatcctggcgtctcatctgatctgatgtctcagtctcctgggtgtctccggacacccacaggccagatttctctgagtgtgggccaggtccacaagtgggggaggactgctagacatgccagggcctgcctgggaccccttggggcctgggaacctgcattttcaacccattccccatgtgagttttacgtccactcaggtttgaaaaactgctctgcccaggttttgtaaggtgtgactaggtgagggcctggggccactgggatgaagtgaggggaaccagcacagtttgggggcactctgaaggggatggactcagagctaggcagaacgcactgttgcctgcctgctggggagagcacagctgtatcccaggcccagcagcgggtcagcctggcctttgggtggttccaccctggggtttccctagaggttccgagggctgatggccctacatcagatggagcagtttgctgttgtcctctttcatctctgatattcttccagcctgcctctggctgagtgaccttggtcgaggttgcttaaccccctgggtcccagtttcctcatctgtaaaacgggctgatgcttatacagccctcagaaccacacctggctcagaagtccccaaatggtagctgctacaattgctcataaaggaagataagtgactagctaatgaccataatcatagtaagcagtggcatgacacagatatcaaaaagttgagtggcacttcctgtcacctgggacctgagctcacttgatgtccgttcttcacttgggctgaacagaataacatacatgtc

SEQ ID NO: 62808 - DNA, 1563 bp, Homo sapiens
acgtgccaccacgcttggctaatttttgtatttttagtagagatgggggtttcgccatgttggccaggatggtctcaatctcttgacctcatgatctgtccatctcagcctcccaaagtggtttttgtttgtttttgagacagagtttcgctcttgttgcccaggctggagtgcaatggtgtgatcttggctcactgcaacctccgcctcctaggttcaagtgcttctcctgcctcagcctcccgagtagctgggattacaggcatatgctaccatgcctggctaattttgtatttttagtagagacggggtttcatcatgttggtcaggctggtctcaatcgctcgacctcaggtgatccacctgcctcggcctcccaaagtgctgagattacagccgtgagcccccatgcccggcccacctggcccaggtttttgtttgtttttcctcgggagctcttagacgacacttccaagtctctaatcatggcttggtctttctggcagccagccacctccaggagccaagagtcacctcactggcacataagacactcctaccacccgggaaattccaagggtttggagttctgtgttgggagcaaaggtcaaggaacaaatattagaacaaaagaggctcctagcacccctgttgctgaggaaatgacaagggttttagaggactctgtgtcaggaactggggctgggaccaaatatttattttttattgtgtcataattagatatttgtactttcagaggttttatttgagataagggtccttctggccctgaaagtttgaaaactgcaacttcagcaggagctggcaggactgcctccaggctacaagggcacatgtgccccaagtggctttagagacaggcaagagcgtgccccctgccttcctgcactggagcacaccgctcagtggtcagctttgcatctggggatagggtgtggttgagagcctaggctttgaatgctgtccccgctgagtggcttgggggcacatgactgcttgtgcctctgtgtcctcagctggaagttcgggtgggtggtgtgaggaggggaccatgtgtcctgtgcacagcccctcgcgtgacaggtgctcttgaaaggagcctgagtgctcgagttgaggggctggtggagacgacttatgtggggaggttcttagggacctgccaccaggtgaggccgcccttgggctctggccttgggctccccggcagccagggctcctcctgtggagcagcactttggggaggaacaggttcctttttctagactttgttctttgaggctctaccttgccccggcacttgattatatttctttaatgacactagtaatgcatgcctgtgtgctatgacaggcgtcgaattcttgggcgtaggagcatttggagtgaccagggcaggcccctctgtcccctccttgcaccccactgcttggggttgagtgtttgacacccacggggcctggtgccctcctcgggcctggccgacatggtggaggagctgggttgtggcgaggtgtccaggggctgccacagagagggtgt

SEQ ID NO: 62809 - DNA, 2465 bp, Homo sapiens
ctcccgagtagctgggattacaggcatgcgtcaccatgcttggctaatttttgtatttttagtagagacagggtttcaccatattggccaggctggtctcaaactgctgacctcaggtgatccgccacctaggcctcccaaagtgctgggattacaggcgggagccacggcacctggccttgttttttttttttttttttttttttttacacctttattgtgttataattaccatctcctgcagctcactcgtgttaagcgaatgattcgctggcttttagaatgctcacagtggcacagccagcatctgttctttcagtaaatcttcattgagaaataaatgattctttttcttcccagaataaacagatgcatgtgtccattgctgttctgtgccagacaccgaggatgtcatggtgactggagaggcagggtccctgccctctatggagggagtcagggagcctgatggtggccggtggctttcctggttgccagggtatgagcaatagaagcccaggggcgaagtgcttcctgaggcccagagaaggacgtggcctgtagagagtagggcgagacccacagagcagtgctggggagcaggggtctgagaggatggcactgtgctgggctgactgctggggccctgggggccgtggggaagagggtggccttcagcctgtgcacagcagggggtgggatgaacgcaagaggaagcttctctttggactcaagccagcctcgtggtctcccttgcttgccttttgtgtttgctggggccaagtccggtgccttcttcagaaagttacagggagttgcccagtgaccagcacttcccctcagaggcacgcacccgggagaactgaaaacgcggttcaggcagacacttgcgcaccggtgtccagtgcagcgctgctcaccgtagccaggacacaggcccagcccggtgtccgtcgcaaaggaacgcgtgcacagcgtgtggatatccacacagtgcctgttatttggccagaaaaaggaaagcagcaccgatgcgtgctgcaccgtgggtgaactttggaaacatacctagacacagaaggtcacctgttgtgcaattccatgtaaatgacaggtccaaaaatggcaaatccctggagacaggaagcacatggtggctgccgggggctggaggaggggatggggagtgtgtgggtgctgatggctacgtgtggggtttccgtttggggtgatgaaaagttctggaaatggatggtggcggttgcatgacattatagatgtactttactcaacgctgttgaaacgtagttaaaatggcagattttgtgttgtatctgttttaacacacacataaaaaaggtgccaagcctggcatccgccttccctgccatctcgaggcgtgtcctctgagctctgctgctgcctcctgctcctgcctgctttgtccagctcatttgttgaccgactccaggcttccaggcttggctgtgtgggtcctgaccattcttggcaactctctcctcagctgaactttgacctggaccggggcgtgtttccagtagtcatccaggctgtggtggacgaaggagatggtgagtgcgtcctcttccgtcctcctgggcgtgcaggccgtgcagggaggaagcacgtcttgagggaggagtgcttgcagcagtgatgaagcaggccaggcatagggccttgggcttcccacagggcagggtgtgagcagcttggagtcccgggcaggtgaggaggtggaaagtgcaggagggcaggtcccagaacaggctcaggactctatggactctgtgcaggctgagccctcggtgccgcaggcctaccagggtcggggaggtgagatgcctgggtggggcaggccccgactctgactactctgcccctctctccccagcagtggtggaagtgactggccacgcccacgtgctcttggctgcctttgaaaaggtaagtgccatctggccatcactttcccggggacctgggagctgggcagggggtggccttttgagacgagaagcctgagcaggggctggggcttggtggggtggctgagtgtcaagggccccggggcaggttggggcgtgtctgtggcttcctgctttctagcattctggtcctgaggccgagtgccgctgtcaggaggcttagcatttcctttttttttttttttctttcctgagccgggctcactctgtcacccaggctggagttcagtggcgtgatctctctcggctcactgcaacctctgcctcctgggttcaagcgattctcccacctcaacctcccgagtacctgggagtacaggtgtgcactaccacgcctggctaatttttgtatgtttagtagaaacagcgtttcatcatgttggccagactggtctcaaactcctgacctcaagtgatccacctgccacggcctcccagagtgttgggagtacaggc

SEQ ID NO: 62810 - DNA, 1398 bp, Homo sapiens
attaattacttacttttatttatttatttattttgagacagagtcttaactctgttgcctaggctggagtacagtggcaggatcttggctcactgtaacctctgcctcccaggttcaaatgattcttgtgactcagcctcctgagttgctgggattacaggcatgtgccaccatgcccggctattttgtgtatttttagtagagatggggttttacattgttgcccagtctggtctgaagctcctgacctcaagtgatctgcctgccttggcctcccaaagtgctgggattacaggcagagccacagggccctgccttgtttttaaaattttttttgtagagacagggtcttgctatgttgcccagcctggtctcgaactcttggggttaagtggtcctcgtgcctcctaaagtgttgggattatgggcatgagccaccatggccagctcagatctttattttaaaggtaaaatagaaaatatttcaataaatttttagcataacgctggttgcagatcacacctataatcccagcactttgggaggtcaaggcaggaggatcgcttgagcccaagagttcgagactagcctgggcaacatggcgaaaccccatctgtacaaaaagttaaaagttagccagatgtgttggctatagtaccagtgacttggaaggctgaggcgggaggatcggctgagcctgggaggttgagggtgcagtgagctgtgattgtgccaccactgcacccccgcctgagagacaggggaagaccctgtttcaaaaaaaaaaaaaaaaattatagcgaagtgaaaacaaagtatgctgggtagaaaattgaccaaggaattaaattgggttttctagagcattccagacatttcctcagtgaaaagccgctcgtagggccccgttctgagtgtcttccagtagagggaacaacctgaatgttctcagggtgaaaaaacgaccaggtcaaagtgcacatcccactggtaggcccttgccctggatcctgggatccctggcctgggtcctggcggtggggccggagcatagttggggatttgcctgcgcagctgcaggacacatgcgcttagtaggccagcagacctccaagccgggcgtggggctgtgcgaggatgctggtctgtgcagtcaggccatggggtcactggatgtgtccagatcccaggagtaagtgaagaggctgctggggcctggagggagaggccggccgcccagcctgtggcagatcctgtagcagggagggccggcccaggctgtctgtcggcctctcctgtctgaaagccacagagttgcgggggcagggaccaggaagtgggggcaggggtgggctgtctaggaaggttctctgtgcctgcccaggaggcaggcagtg

SEQ ID NO: 62811 - DNA, 2517 bp, Homo sapiens
gctctgctgcctctctaaacagaaaagaggagcagagccctgaggactggcgttcacagacagcgcctttgctctagaaggctcctcccaagcccccttgatcagggccttgacctgggccctatgggcctccctggcagcaggtgcaatgtttctgaaatggggtcaatgtttaaaagtctggaatttcccttaaaacccagattttgggtttgtcttttaaaatctgacatggtcttgatgctagaggagaaacatggcttgggggtccctgtcaacccaggccctctaggcccctaccatcgtggggctcctggcaccacgctctccagcacttttgatgttggctttgattcggaaacgctgcgtgtgctcaggtttttggtggagagagaagcagcccctgagggatttgcctctgagagggtttcacctagggagtgatcgatgctcaggcgtggctaggtttattgtcccttgtttttgcccctccctgtttgtgttctggtggctgaggatccagtaggtccctccatgtttgtccctcttatgctgagtgagctgggcggccggggtccgaggtgtgaccaggcagctctgacctccacatgccccagaagggctggcacccagccagggagccgccgtcctctctgcatggagcaaaagcaaacgctcctcctcacctgccaggttcctgttggagccccttccacgtagtgacagaaagagccaccgtgggtgttctctccagcgagtgcctaaagatgatggtggggtgggtgggtctggggctgactcttctccccagccctcttgaggggttcatggttggtgataagtgagcggcggtgcctgggcaccggctggctgggggactttgaccagtgtggcttcaggatctccaccctgcacccagcctgcattaggcagcgttcagctgccctcacgtccaccttggccaaatctgttgccccaggtgacccagactgcggggggacaggcaatggggatgagattgggctccacagcctccccactgcagcagcacagctcccgggagctgccgagacgcacacatggcccacccagacccgagtcaaccctcacttaggacagtcccgagattcacgtcccccggaagcttgtgaagttctgcgccacggtgtggcaagaggacagccagtcagacctgtccagcccactccagggccgcgtgggggtggtagttgtaaaacatatgatttttatcttgacagtgtccctttaaaaaatcaaagccgcaccccgcctccctggccagcaagaaacctaaaagggaaacagtaagtgtctggtcctccggctacgtttttttgcccccgccctcatttttaaacccacgacaagtaggggagatcgtttccgccccaggctagtgtctgattcatataacccgtcagctccacttgcccagtcccggcctccctgcccagggagtttgtggaaccggaaaagctctcggtccgtgggcgaaacgccaggtgcgctggccccgccgccctcccctcagctttgcctccgccccgcgtggcccccgtgccgtttcccttttttttcttgctggcagtggaatggacgttgcaggcggaactaacgtcgctgctgcgttttgcaatcgcgccccgcgcatgcttcttggccccgtgtcccgctcctttaccctgcgggttcgagctccttgggctgagctttttggtttccttgggcttcccttgtgccccagggagcaggcagggggaccagcacacaaccacctggagcctccgtggcccaggcagacccagccgaaaccctgtgtgcgttggtgtagaaggtggaggccactccggagccacccggaccgtgttttcctttctagaggggtgaggggattctgtgtggttatttacccttaacttggaggcaggtatgggagcaaatgtggggtacacagaggtccagaaaagcatcccgggctcattgcccgggccgtgcccgctcccccatttctcccccacctccccgtggtctccaggcatcccgcacccatctcactttccccttccttccaggagctcggtcaggcaggccggggtctcccgaaaggagcactgacgagcgttgtgcccctcaacctggttttgtggggacagagcaggggcccccgcagtctgacttccgttccccagaacctgggcattttccttcttcctcagccttgttgattctgtctgctcccagtgagggaagaacagtggctcttagccagggtgcccgttagaaccacctggagcaggtcagcccccagaggcccgggcagggcacagctcccaacagctcagctctccctggtccaggacgcccctgaccgtgtctctcgcctctggcatggctttgctctgcccccgctcccagctcctgtctgtcactaacccttcactctccacctggggccaggcgggactgaaagccagggaggggctggttgaggccagg

SEQ ID NO: 62812 - DNA, 1595 bp, Homo sapiens
gaaggagggaaatagaagggaaacacccagctttggggtccctggagagcaggtggggtcacggtggagtcctgctggagcacaagcctggggtccccacagtggctacagagcccttgggtaagagagacggcctcctgcccagagggacctgccgggacctggcccctgcctgtaggtccctaacctcaccctctgcctgcagggacccgagcagcttccattgagaatgtcctgcaggacagcagccccgagcactgtggccgaggcccacctgctgacatctacctgccaggtaaggggctgggggtctgggggtgaggggctgggtgcctgtcttagtccccagggagggggccctgctctgatggtcggtgcatagcagcagaggctgtccattggagcctggttctctccctggctctcagccatgcccctgctattgaccgtgaagcaggatgcgggccagggccatggccacaaagcagcctcaggcagggcctggctcttgggagcggaacctgcaccaaagccccttccctccctggggccacattggccacaggaggtgagagacgcgagagaggctgcctgtgagaggatggggtccttttccctctgcctgctgctcacgccaggagggcagatccggccccactgggatcaccacatgttcccccactcctggtcctatcgtgggcccacaggccccatgctgggtgccacgtgcgctcctggcagtgcctgagagctgcagacagagcaggagcaggtaccacacgctgtgctgggtagcgggggccctgggccacagagcgcaggggcagtgtcttctgggtcaccctgccccgggcctgacagaggccacctgatgcagcagcacatcccaggccaggcacagaggacggcgggggcgccaggcgccagcggggaacagcaaggcagcaaggctgggacagagggttgctcttctcacctttcccggaggctcgggccccagaccccatcagccaagcaccttcgtgctctgctctgctgggataagatcctcagtttcgaatcctaagctctaaagaccgggagggaatgggggctctcagactagtgtctcagcacctgccacgaggctgtctgcggctctggaactgcgataaacagccacggtgctttcagacatgaccccagagccactgcttagggagtgtggctcttccctcgcggctgccaggcttcacccgcttcctggccccagggcccaccattgctcaatcctcctgagtcacctggtgacctgggcctgacattgggtggttgtgacgtgctttagttggaaaggggctcttgtgcccccggactctggctgagcagtggcctgtgctcatgggctgggcgtgacaggtcgcaggtgcaggagcaggcactgcctctggtgccctgatgaccacagcggcctgccccgaacaactcacagcagaaggtgtgtttaggaccagcttaccttaaagtgacacagaattcgagtaaggtctttcagaggatctcaaatatttcattctgattaaaaacttggggggtgatcggggaagaggccagaa

SEQ ID NO: 62813 - DNA, 493 bp, Homo sapiens
cggagagtggggcctgggccgtgtctgctgggagccatgtgtcagggctggtggctgggtgtcaggcagccctgaggccatgctggccccgtcccaggctctgcaccagcaccattgcccaagccccagggacgccagacccatctggggacagcgcccggcggcgtcgtgcaggccacagtctgggcattggggctctgtgggaggctcctctctttgccttgcagtagccatccgggggctactctgagcacgggcttgttctcacccagggccgctccccacccctgcaccctgggttgaccgagttccaccctaacccagccgtaagaaccttggcaggacagtggctggccacatcccaggaaaccggaaccagggcaagggcaggaggcccagagggcatccaccgcggtgccgtgtcgcgctctgactcggggctgcagatctgctgtgggtgtccggggatctgggatcgtctgtcccaagaggg

SEQ ID NO: 62814 - DNA, 1669 bp, Homo sapiens
atgcttctgagccccagagacatctccagtacaaacacaaggtaagtggtaagtacctcaggcccttgtggaatcgggattctgcctctgtcatcaactgccagttgtacttaggcaagttatgtccctctctgagctccaagttcctcatcgtaaattggggaaacccctcttccccccacagtacctggcacagggtgcccggcttggaggatgctggaaaggtccagccccggaatttaagtcactttctgcccagcaagctgggtccacagagccccagagctcccggtcgtccgccctgacccagcgtggactcggggactggggcactcaagccctgccaagccctgctccccgtgctgtcctggatcgagcctgccagcagggtggctaggtcgggacagctgtcgtgcatggcaggcgaaggccatctccctccgggcttgggtccggtggcgctggcggagcaaggctccggggcatctctggctcgtgtggtcgtgccaagggtgccattgcggatggacggggccatgcgggccgggtcggcctcctggggagaaacgggtgggcgcaaggggatcggcgccatcgagggtggagaaaccgcagggaatttcggctgtccgctttggggcgccaaggaagatgttcgtcgcccacaatgtcaaccttgagccaccacggcaccgaccagtcgtctaggctctcccgtcggaggcggggccgccgcccagggtgtgcgactattgggtgacggctgacgcgcaccgccctcctttgcacaccgcccgcagcacctctcgacgacgcaccgcggcgctgcgaggggctcggtcccggggcgcgccggcgattggcgggggaaccggacccgggggcgcggccgcccgcggattggcgaggcacggcgggggcgggctcgcgcatgctcttaagtggcagcggcggggacggggtcagtgccaagatgtcgacggcggcggttccggagctgaagcagatcagccgggtggaggcgatgcgcctagggccgggctggagccactcgtgccacgccatgctgtacgccgccaaccctgggcagctcttcggccgcatccccatgcgcttctcggtgctggtgaggacgggcgagggcgcgggcgagggtgccggcgcgggcgggcccgggcgggggcgtccgtcgaccccgcggctgtgacccgcgctcccttgcagatgcagatgcgtttcgacgggctgctgggcttccccgggggcttcgtggaccggcgcttctggtcgctggaggacggcctgaaccgggtgctgggcctgggcctgggctgcctgcgcctcaccgaggccgactacctgagctcgcacctgaccgagggcccacaccgcgtcgtggcgcacctgtacgcgcggcagctgacgctggagcagctgcacgccgtggagatcagcgcggtgcactcgcgcgaccacggcctggaggtggggccgccgcccgggccccgccccccgccccggggtttggctctggccccgtggaaggcaccgatgggtaacacgtctcctgagggtcccctggccgggctgggtcgggtgtcgctgtctccagcaatggggtggggagaggggtctggggctgggaggccgggaaaggaggggcgggggt

SEQ ID NO: 62815 - DNA, 722 bp, Homo sapiens
ccctcttcttccagggggttctcgccactgctgttgaaggtgacatagccacggggaggagcctgctctgtgtacagaatggggcccataagcccagggaactccaaagtgaaacctcctcagaggccgaggcccaggatggaggcaggtgacttcccagtcatgacctcacctacttgcccctgcgacctggcatggctctatctgtggtgtgtgggtggaaaagatgctctgagggtcagtcagtggcccaagcaagtgcctggtggggcgagggctggcagccaggtcaagcctgggccctctccatttcttttccaaggggaaaacgtagcaaatggtcagctgtatttacagatgcctgaccagagaaaactataccatgagtgttccttttagcaggaggtagctaatgacctcacacagacacccatcgaccacgtgtctttatgtccctgtgacctttaaccacaggcgcttagcgggcctcctctggtcagtcaaccccggcgaaaaagagacctggctgagcaggaaggaaaaaggccttgaggtaaaaattaacaacaataatatgaaattacctaactctacctgcctctaaaaccaagcagaaaaaggggcatgtataccaggcaatttcactccagttttgcccctttacataaaaagactgacttgaccagtcacggtggcacatgtctgtaatctcagctacttgg

SEQ ID NO: 62816 - DNA, 949 bp, Homo sapiens
gcttgaagggatggagacccccattttacatgtgattattacgaactgcatgcctgtatcaaaatctctcatatacgccataaatatatacacctactacgtacccacaaaaattaaaaaatttttaaaaatcttaacaaatgtgatgctggtggtaactgtcacgcccacagaggaggtctgtgaaagcacccaggcaccccctctcgccccgtggaaccgcatcgcaaaggtagctcactggccccggggcgggtccctggccgacaaacccgtaactcacagcagtgacgcttcccgacgccccccggccacatccccacaggaacgctacggcgcacagggcattactgtgcccccaccacaaccacataaagaaaatgtgggggctcggtcctccagtcacgcggcgagcaagtgcagcgcgggacgcccgagcgccgggtctaggcgggctgcaggtgccggcaagtgctggggccgggccgccgcggaacccacctgtgctgggcctcaggccttgcgccgccctcgggctgccgtcgccaaccccccccaaacagctcgccgccacgctccctcgccggggcaccgcccccggcacccgccccggaagtagttgcgggagggcgcggagcacgccgggaagctcgcgggtcggcaccgggacagctcccgggcgccgtggaatgcacacgtcccgcacccggaccttccggtcagcttcccggctcgctgtctgatgcccgcggtagccaatgagctagtggtgtttgtcctgctccgtccccgccctccaggggaaccaatcccattgcaggagaggcaggacgcgcaaaggcccgaaagaggagctgggcggggtggggggaaggcggaggcagtctagtaatgtaaagctccgctgagagggagagtgctgaagaaggggacagcctctgtacctgcg

SEQ ID NO: 62817 - DNA, 1245 bp, Homo sapiens
ggcagatcacgtgagttcaggagttgaccacctggtcaacgtggtggaaccctgtctctacaaaaaatacaaaaattagcccgacatggtggtagcacatctgtaatcccagcaactcgggaggctgagacaggagaatcgcttgaacccgggagatggaggttgcagtgaactgagatagcgccactgcactccagcctgggcgacagagagagactcaaacaaaaacaatctaaaagggatgtttgcggtcagagctcgagaatcgttattttccatgattagagtgggtcctatatggaaggggttcctttggaaatctgatgaaaagtagggcctttctgcagactctgcctcaacttgatccccggtgtccaggtctggcgaaccctgaagcccctacgcggccccgtcaggcacccccgcgtgggtggtcacgacagccccccaattccagggtcctgggagagctgggacccccaggccgggctgctttcccgtctcatccctcaggtggagggtgagcggtacccgaggccgcggcacagacccgggtgctggcgcgggccgcgaaatcgaagcttcggccgggacccgcgtccccgcgccccccgcactcactggaagcgctgccggccgtgggcagttcggggcaggaccggagcggcgggtctcggcgggagtaggactgcgggcctcaggcttggcagccagggacgccagagccggggccgaagaccctaaaccaggggtgcaaaccaggccgtgcgggtgggcccgcaggcggcattgtgggtaacgtagccgtggcaccattggctaagccggccgttgggggcgtggcaacacggccgagtgggcgggtccgcgacgtgcactgtggttaatgtggtcctcaaaggcacgcattgtgggtaacgtagtccagcacctcggtgaccgcgcgagcgtgcggcgactctgcagcctctgggctactttcccagtcactgttccacacccgctccgctctcctctggccgcctcctccatctttaaagccagcaaagtcgtccgggcacggtggctcacacctgtaatcctagcactttgggaggccgacgcgggcggatcacctgaggtcgggagttcgagaccagcctgactaacgtggagaaacctgggcgtggtggttcatgcctgtaatcctagctactcaggaggctaaggcgcaggttgcagtgagccgacatcctgccattgtcc

SEQ ID NO: 62818 - DNA, 1323 bp, Homo sapiens
cctccgccgcccggttttaagcaattctcctacctaacctcccgaatagttgggattacaggcacgaaccaccaggtccggctaatttttgtatttttagtagagatggggtttccccatgttgcccaggctggtctccaacggcctcaagcaatccacccacgtcagcctcccaaagtgctgagattacaggagtaagccaccgctcccggtcgcatcaattcttgagcatcaagcaagcaaaacacatttgtacttcgtttcttcctcatttagtaatagaggtactataactagacctaccggttcaacaaaacaaaacaaaaccctgaagctctgagagttttaagtattgaaccccccagagaaggtcaaacaggaagtacagaaatgggattggaacccaaatctttgattccagaacttcagctcctaactaccaggttaacgtagtttgcccctaatcctaacttgggcatcctaaggcccgtctcctatgctggattctcgctgcttttcctctttggttgaacatgatccggagtttccctctgcctggggtgcccaggaaagagtcccagcaccgagttcgggtgagcagcaacgcagcatacacagcaggcgtacactcaacgtacgccccgccccgcacaagctccgccccgcatgcgcgccccgcctcgcatcccggatctacccccggaatctcgcgcgtctttcccaaagcatcggctaggactcagcccgccggaaacaaatttggggacgccggattcaggaagctggcaggactacatttcccagagcgccccgcgccctccccggaggcagattcctgggcgctctagagggggtgggttggcggcctggagggtctcctcaagtggcggcactgccaggggctcggaggaaggggctgcagtctcccggtggcagcgtccttgtcgtcgagactgcgggcggttcccttgcgcgccctgaacctcagtttccatatctgttaatgggggacattaaccctcaaggttgtaactcattcaagaccattcatccaggcataataaatgcataaacgctgcacgttgagtcctcccaactgcccccttaactaggcgctcgggtgatggagtggtggcaggtgcctgctttcatggagcttgccatgagaggcatacagtggacaaaattaccatgagaggcatacagtggacaaaattgcacgaagaattgtttaatcacttctttggcaaatgttagcaagcggcgtaaaagagggaacctgataccttcagggtggaagtgacagttgagcagcctagggtt

SEQ ID NO: 62819 - DNA, 2298 bp, Homo sapiens
taaatctctgctggcatcctcaaatgccgaaacaaaagctttcatagctgggcccaacaccctcagaagtaaaatgcaaaattgtatacttatgtgcacaacgcatatccattcttctgttgacaaggaatacagaacaacacaactgtcaaaagtcacttgtctagagcttcttaatgacgggggtgggaggacagcttcctctgtaaacacagactttccctccctaagtctggtttaattcaacaggagacctgcctggctttgacaaatgctaatggaagccttcctctgggtggagaaacaagctacgcagctcgagggaggcggcgacaaagtcttggttcgggcggttgtctgggacacagaagcagaccgcgggaggcacccaagcgtgcactggtcactgccaagccatcggttgtaaaggagaagtccccccgccgtttcttcgcggggcaacgccagcagtccggtttagacaaccccggctgagccggccgcacaggtcggctgcatcgcaacctgggctttgaccgaatggcaccggccagatctcgcaggtccggtccccggcgcttctgctttctgggaagccccaacaagaccccggggaccggtcgtccggggaagcctcgcggcaccggcggctcccttcacgggggccgccagtatctgggccccgagtgcagaccccacccggccggcctcggggatcaaagccggtgcccgacgtggccaccctcggcctcggtcccccgggactggactgccccttccgcctggcgccgctcgcaagcgccggcaccttctcttcccctctctccgcgacctggagcgcataaaaaggcagctccagggccggcagcgaaccccgcgcccaggcgggtagctccccggcgcgtctcggttggcccggccgctcggactcaccacaccaagtcgccgagccgcagactcacagccgccatcttaccacccaaccaccgccgacgcacgggccgccgggaacagcaagtcgccccggcgccgcccattggagtgggcccgaccacgtgacgggggccggctgtcactggccacgccgctactctgacgtcaccgcgcccgccggggatcattggtcgaccgaggggcacgtgacgcgagcgccgcggtctccgcgcgccggagcgcagagactcccggctccttccccctcccttcggctcgtgacaacgaagcgcccgcggtctgaggcggcggcggcggcgacggtgcgaccggctgagcgcgagagggagccggcctcgcggctcgccccgcccccgggtcttggactccgcgcccctcccctctcggcgcttccgttacgcccgttggtccggcgcgggccccggggccattcccgagcccgaggcgctggtcggccccgtcgcagcgccagtgagctaccctgacggagctcggcgcggcctggaactcagcctccgccgggtctgggctcccgcgcccggcaactctgcttggccgcaggccgggaggccccggtgtccgcgcccgtccgctcccgccgcccgtgttctttggagcgctcctcccgacggccgctttcggaggcgccgtctgagcgcggggtcccgcgccgcaagttctcctggggcgaccggaggctgctcccccgaccccctggtgtccccggagtggctgcgcggacgtcgagttggcatttcttcgcttcctcctgggccggcgcgcggcgcggcacaccaggctcccctgggctcggggacccggccatgggccgaggcgcgggccgcccgcccgctgggagccacggcttagcagccgaccgctagctgcgccgccgcccggggaccggcatgaggaccgccgcggggggacgtctgcggcccgcgtcggcgctggggacaaaggtgcgtgtcgttgtcgggtccgggctctctcgttagccttgccctagttttgcacttttgaaaaagttgtgacaacaggaagacagatgccgggcgtagtttggacactttaaaactgaaccatgaactgggaagtgttaactgcagttgagcgcagcgtcggcccaaacttcagcagaccaggtagaatcacaattttgcaaaagatcccagtcccgatcacagactccacagtgttaaggattgacttagacttggtgtcgggctcttgttgagtcactgccagctggcaaaggtggcgagtcgacacgcatttccccaaggcattgtggtggttagagatttcggttgcaagtcggtgtttagcgtactgggtcgtccc

SEQ ID NO: 62820 - DNA, 543 bp, Homo sapiens
tgttaaccaaacattactccttgttctttttaatcctctggttcgtaatcaaattgtttcttagcttctgaaagtcttgttaaatcatttaaggtctatgtgacgatagatggtcgttagagaaaagtcaaaaccagattcttggctgtgtccccactcgtgccataggttgtgttctagtgtgaaaacttactgtttcactttcttgggaaagatggggacagatttagtggcaacagaatgacataaccggaaacaatgttgggctgtggtgcaagaaagcggagctgagtaaacaccttgttaggcaagctgcccctcctcagtgattgccaagtgtcagttagctcttgggcataacaaacacagggttcaggatcccatagtcaaggtgggcctgggtcccagtggggagctggtgaccaggagaggctgatgttctggttggaaaatacagtattcaagtgtgaagttgatattcgagtcttcacattgcccttctcctataacagcattaagaaactttgaaaaatggggtggaag

SEQ ID NO: 62821 - DNA, 896 bp, Homo sapiens
agagcgagaccctacctcaaaccaaccaatccaaaaagccaatggaaccaggcatcccccaaccctggggtaggctggcccgttaattacaacaaaacatcagcttcttgacttggagtggaatttttaaattttttttgtttttttatttttgagatggagtctcactctgttgcccaggctggagtgcagtggcacgatctcggctcactgcaagctctgcctcccggattcacaccattatcctgcctcagcctcccaagtaactgggactgcaggcgcccaccaccatgcctggataatttttttgtatttttagtagagacggggtttcaccgtgttagccaggatggtctcgatctcctgacctcgtgatccacccgcctcggcctcccaaagttctgggattacaggcgtgagccaccgcgcccggcctgcttggagtagaattttattcactccattatcaccagcttccctgagctgcagatcaaagattaattttgcaaaaggaggaagtccattaatcattgcctaattcgtgaaggtgcccggtgggaatgcaagttctctcaaaacactggctgagagagaaagagaacatctagctgagggaggctagtgttcgaaagttcaaagtcgggcagaactgatcgatggtgagagagatcagcatagggttgacccctgagggatatcaactagggagatggcccgggagctttctagacagttacccatcttgccacagacagtggttatctgggtacctattgatgcaaaaattcacccaggtgaagtctgcgaatgtagacacttctctagagtttatataagttataccttgataaaaaagttttttaaagtcacaggggccaggtgcagtggctcacgcc

SEQ ID NO: 62822 - DNA, 758 bp, Homo sapiens
aggcacctggcctgctcacagccatccccttctccaggctgcgagagcagccaccccggtaacagatcatactttagcaacatcggaggggccacgttcctgccatcacctccaccccagctgtccctgtcgcccagaactgctgtgtcccctgctggctcacagcccagcctgcactctcctcccatgtgtggacacaggtccctgcaggctcagcactccctgcctggccagggccactggcctttgatcacatctgcagttccttcctctgggggttaattctgtctcagtgggtgtgtattggggttgcattgctgctggaatgtctggaacgcacaggagggtacacccctccctggaaccagcctcacctgtcccagagcccagagaaggggctgggcctcctgccaccacggtcatcctcttctggcgtcctgcctgcctggagggccagcttgggggaggtgcacctccggtgccgagtagccctctgcccctaccttctttaaacactgcctggctcctgaaacatctgccctggctctgacacaaaggcaaccaccgtggacactcaggaaataactgatgaatagtaacaacactgagggcacctactgggtgcccagcgaccgctcagtccttttgtgcatcacccattgacgtctcatagccctaggaagtagccacccttagtgttactggggctcttaatcctacctattaggctattaaatttttggacaaaaagaacttac

SEQ ID NO: 62823 - DNA, 796 bp, Homo sapiens
ctgccttgggccagatatacagagagtggcaggaccccaaatctttgccaccccagaccctcccagtccctgcagctataaaggatgggatgcctttcatcctcatgcttctgggaaagcccgcacccctcccagcttgtctgggttcattagaaccttttgttaggtccaagctggggccttcaggatggagagctgcacgaaggagggaggctgggaggaggcagagggcggggcgaggcctggccccaccactggtatgtgggtgtctgcatgtgtgaaggactggatgggtctagtctctggggtggagaggacagaacggttctccacggctggcacggagcatccaattgtgcaatgccccagggaacagtgcagggactggacgggcctctggttgggtctgagtgccagctggacgcagccatggaggaggggtgtgcaggccctgcccagtctctggggttgtgaaagataggggaggggtggggaaatctctaaaggcgggtaatgcctctgagcttgaaagagcccaaacggagatacgggtgggtgggatcacagggcaggggggtttctgaaagggctggaaggccccggaatggagtgtcgcactccagcgtgctagggccccgccgcctgcacctgtccgactggtcggcctaggccggactgcaggggttgagtgggagccctgggcccagaggcctctccttgcctagggaagaagtgaggagctgcttgagggcacagtgggggctcccagtgagagcagcttgggggcagaactccc

SEQ ID NO: 62824 - DNA, 2210 bp, Homo sapiens
caggagagccatgtaatgtgcgggcccctcacctgcctgaagcctcttgtccgagaagctggcaaaatggtccttgctagcccagagcccccactctattttccgaagtggggatataaggcaggggctggattcccaccccctccgtcaatctcagcatctccaccaggctcccctaaaccggttattaagtgaacacattaggcttatcaaaagggacgtgggctgcttctccctgcaaacacatcaagacatgccattcccctcccaggccgccctgggaacccgcggctcagagacgccgccagtttcggggctggggtgggggcagggagccacacccctgcgaaaccgagcttcgaagaggaggccccgaagccgcccaacctccgctcagaacccagagggtggggaggtaagggggtgcctccccctgtgcccctcgacccgaccccacaccccccagggcctccgggcgcggctctggcgcgcagggtggcaggtgccgggaagtgcagcggcgggtggcccgccccctccggacacccatccctcgcctccccgacgccaggaacacttgcgcggtctcagaggcgctggagagcgccccccgacgccagctcagtttccctgcctcagggcgccccctggacggagcttcctgggtcgcccgcagcgaccccgccttgagtgcccggtcctccaaaaactccgccccctcatccaggtgactattcccggtcctgtgcgaccctctgcgcaagagcgaccctgggacacgggggtgccctgtacccccagctcagctgcccgtgccctaggccctcaaggcaatgctccctgggctcccggagtcccctgtgttatgctccccctcggggaccccagccagtcccttcccacctggcggcgcttcccagcttcagggtggcctcggtcccgcgttcccgagagtcccgcactccgggttcagttcccggttcctggacccccgtaccccccattcctacactgcccgggaggtcttccaggtcctgtgcgcccacaggggcaagagcgtcccggagcggagctgtgggcgcctcctcacctccgggtctgcacagtggggctgtatttgcctttgtttctcttcctgaagagcgagttcatggtggcgctcggggtgcgggcggcggcggctggcgggccgggcgcgcaccgaggggcgggcgggagcgcaggtgagcgagcggcggcgcggggagcccggactgcggcgcggcagtggctccgggtccctactcgctgggggcggggcgcccgccggccactggctctgcgggccgctccccgagaaggtggtgcttaccttcccgaggaggggccaccgcgcgggcggggcttggacgcgggggtggggacactgggtcttggccggacgccgcccacccccagccgggggactccggaggccgggcaggcactggggcgcaaaggccgccggggcgagcgctcgcagccccaccctcctcgggcccggcgcgcctctggccgaggccttcacctggttctgcgctaccgcggaactcggcgctcctggtgctttggcggacacccagctgggccccgcaagacaggtgcggcagagacccgcacggattcatgtgccctagtagctagcgaattgcactcagatggtggcaattgagggaagggggctgaactgccgagggcgccggcctgagttcaagccctgccacccccaggttggctgacactcctgggcaaggtgttttactgctcccagccacagtttacttctttgtcaaacggtgataaccaccaccccatccgaaaggcctgtggggatgtccctgcaggtaatgcacgcaaagcgctgagcgcagtgccctggcctgaatctgctctccgcttgccatctcgggtggacaaaaactcctttgaaacttcaataactccaggccctggcactagaagagcgcttcatagctggtcataaaagctgctcgattgcggctcagaacaacgacgttgcacaattctgccagcatgtcctggcccagactgtgtgccagtggaggaggctgcccttagacagaaacctaatctgacctgaagcccggatggcacacaccaccacacctggctaatttttaaaaatttttgtagaggcagagtttcaccatgttgcccaggctggtcttgaa

SEQ ID NO: 62825 - DNA, 2348 bp, Homo sapiens
tggtacaatctcggctcactgcaacatccgcctcccaagctcaagcagttcccctgcctcagcctcctgagtagctgggattacaggcatgcaccaccacacctggctaatttttgtatttttagtagagatggggtttcaccctgttggccaggctggtatcaaactcctgacctcaaatgatccaccagcctcagcctcccaaagtgctgggattataggcgtgagccaccgcacccagccaggaatctgcattttaacaaacacctactccgtgggatgctgaggcaggtgagtttggggccaccctgagaaacacggctgtgaacagaaacagatgttgcagtaactccagccctggtctgcccacagccgggatacacttacaggtttcagcctgaaacctgggtttgaaacttggctccacctcacaccttagccgtgtgaccttgggcaggtggctctcttaacctctctagacctcagtttccccatctgtaaaattgggaagagccggtgggcagggatgtgtgcacagcccctggcatgaaggccctgctcctgtccctgctccgaggggacaggagggggctggcccagcttcacccctgttttgtaacatgtgtttacttttcttacaggacaattcaaggagtggaaaattgtgctggccctccagcccacatgggctgactcacgctcagctctgggctgggggccctgtgagctccccacagttctcctggggccagaggggaggccaggccctggcagctggagcaggagagggtctacggtgagtcatgctctgcctgcccctgagtcatcccctgagaatgtgcctcaggcccctacccgcccgggccccctggcagaatgccacttctccctgcctgccaggcagccccgccctcctgccggcccagggagccgctgctccgatgaccgcctcctggctctctcctgaatgcacctgtacagccctgtgtgttatcaaaatattgaaatagctcccaaccggtagttaaatagcggttgctctgagcccctggccaccctggtttttcccctccccagccactgaggggttagccgtgggctcagcaaagggttcttcgactctgccccacccatggctggggtccaccgtgactatgaaaagcccatcagcccatcttgcagatccaggtttttgggatttcagacacttcatcttgaaccctgggccacattcctttttcttcttctctttgagacagggtcttgctctgtcaccaaggctgaagtgcagtggcatgatcacaagtcactgtagcctcagactcctgggctcaagcaatcctcccatctcagcctcctgagttgctaggaccacaggggcgccaccacgcctggctaatttaaaaaacttttttgtagagttggggtctcgctatgttgtccaggctggtctcaaactcctgggctcaaatgatcctcctgcctctgccacccaaagtgctgggattataggagtgagtcactgcgcccagcccccggggcactttctgacacaacctgctacacatcttggatcccacttgtcaagcctggccctaggcctctcaggggtgggtacatcaagtgaggaagtcacactgtcagggcagaaagaggggctgggtggggccggacaggctctgctggctcaggatcccggcaggacaggctgcccaacccagccccaaaactcccatcttctgtccaacgcccaagcctgcttcctccctgccccacctcacctcacactgcccagactggtggggctgcatttttggggccggtgccaggtgtgatggaggacagcccaggtcaggaggtcagggccccgtttcctcccaagccaggatgactcagtgatggacagactaggccacaaggggccgaacacaaagccaaattagggtttagtttgaagccaacctgggtttgaaccctggctctgccatgcacccagctgcgggactgtgggctggtggcttaacttctctgtaccatggggaagagccagtgagctgaggtgtcaaatctcaactgatctatttcctaactgtgtgaccctgggcaaatgtcttcacctctcttaacctcagtttccccatctgcaaaatggggacactctgacacctgctctgtagggtcttgaaaagtctcaataaaggaagacatggaatcatggcaaatagtaacttttgttgggcatttactataaaccaggccacgtgctgagtaccaggcttggaggctggcactttttcttccagcttgattgagatgtgatgaacatgcaagaaagggcacattttaaa

SEQ ID NO: 62826 - DNA, 1166 bp, Homo sapiens
cagtgtgctgggattacaggcgtgagccaccgcgccctgcctaaactaaaaaaaaatttttttgtagagataggttcttgctatgttacccagggtggtctccaactcctgggttcaagcggtcctcccgcttccgcctcctaaagtgtttggattacaggcgtgagacatggcgcccggcctcttacctgttttaaattgtcctttctctccgctggctccttgagcccctttcctgcttatttttctctcgttagagtttttcactacctcacacatcatatatttgccttatttattgagtgtctgtctccccaccgtagtataaactccacgagggcagggattcgtgcgtgtggctcaccggcggctctccagcgcctggacagggctgacccccagcaggcgctctgtgaaggtgtgcagagtgggcgaaggtgcatgcgcgggccgtggggcggggacaggtggaggagccagtcagacccaagtgcagcgggacgagggcgaggttaatctgagcaagaaaagcgtaaattctgcttatctacaaatgtaaacagtactgtcggccagacgcagggtccggggcgggtcggcccggactcagggtctgcttggaggcagagctagattagggcggggtcgtcctgtggcctaccattccccgaggctgagggccttggagggcggggccagtgaagggggaggggacttcctgaggtgtgaccaatctagagaaaggactgggctgagggcgtggtcaaacaagcgacatctaaaaataaggggcggggctagaaccagggggagttcgcctggggcggggccagagtggggcgggaccagttagggggcagggccaacctgggcggggccatggccggggacgtgggcgggaccaggtcaggggcggggccaggccaggatctccgctgtcccgggtcctggagctctctcggcccggcaggtttcgctcccgcccctccggccttccacagctgtcctggccgcagggtgttcaaggcgggacacaccaggctagagatccgcgatcgggccccgcctcaggtactgcgctccaggccaggcgggcgcgggtaagcgctcagctcccgagccaggcgggcttccagggcacttcccctaggctgcattcccaaagg

SEQ ID NO: 62827 - DNA, 2052 bp, Homo sapiens
ccggtatcatgccactgccctccatcctgggcaacagagcaagactctgtctcaaaaaaaaaaaaatcatcagtcttgatgagttgatgtttctgacaccccactcctttttcagtccctcatacacacaagcccccctgagcctctgagcctttgtgcgtggggttcctttggactgaaacgctcttcctccagttctgaccttggctcacttagtgattcatcttcaagttcccactcaaaggtcacctcggagaggcgtgttccagatcaccctccctaaaatcaacactatttacaacgggttcaccccgttggttgctttgctgcacacacagcaatcagaatgtatgttagctatttacccggcttttgttgatttttctagtaatgggggagggctgttaaggcaaagactgtgttgttcacggctatctcaccggggcgcggcacattgcctgatacaagcaagtgctcaatgatactggatgatgaataaactctgcaaggaagcgattcctatccccattctgcagaggaggaaacaggggctcagcttggttaagtgacttgaacacggaggcacggctacaacccaaatctcaggccctctgccctcgacagcacggggctccctgcctcctcacccggtgaccagggtcccgtcgcggcggatcccgaactgcgcgttctgcagccccccggagctgctcacccgccgctcgtcgctcaccacgttccccaggcactcgcccgagttcatgcggaagaagccgccgttctgggcgacacggcagtcggccgcccgcgccgtctcctccacggtggcgcgtcgtctcgccgcgcagccgccgggtccaccgggctccagcaccgagaaggtgcgcaggggctcaacggcccgcgtcaggtggccggccaccgcgcggtccctgaagtgcgacacgaaggtgcgcacggccagaccgccggcgccgggagtcgcgggaggcggaggccaactctcgtgctcgcggttgccggcgcgcacccgtgtgcagtcccgggggaggcgcgcgcgcgcgcgtggatagggcagtagcaagtcgtcgtcgcgggaggccctgcggggacgggcggccgtgagctcagggggctgtcctcgtgagctcggaggacaggggggaccccccgaaccaggctggcccagggagctgcactcaccccgagtcgaggccgccggacgcttcccagaggaagccgaatagtgcaagccggaggagaagccagcgacccgtggaggtcgccatattggaccggggcctcgggtcatgtgggctcgcctcacgtgactcaagtcccagggtggccgctttcagctcggactgaattacctgcgctcttttcggctggcgggctggcgggcggtgctggtgatgttaactttttatctccaggtaatctcaaacctacaggaagttgcaaggagagcataaagaactctcgtagaactgttattcatgtttagcagtggtttaggcttgcctgatttactcaatcatttgtactttgttttttttttttcctgaaccaatggcaaccaaattgcagatgtcatgatcctttaccccatacctcgccatgaatctcctaagaacaagggcattttcttaaccacagggcaaatatcattaggacaactcccattgacatttctgtgatgtcatccacagctaaccttcaattgtccctctaatgtctttttttttcttttcctttttgtccgcccctgaccctgtaacccaggagttgcttttagttgtcatgtctctttgatctcttcatctggaaggctcctcagccttttgtcttttactaccttgacatttttgaagacagcccagctacatgatttgtgtgactcaatgcaaaatgaaaacgtggggacacttactaaaaaacccagaaaactattaagaatttcaagatggtcagagcaaatggttgcagcaagccagggaccttctgagtgagcccatgaagctggccctgagtatagaagccagtttattt

SEQ ID NO: 62828 - DNA, 1814 bp, Homo sapiens
ctctttcttatgtaaagtgctcagtctcgggtatgtctttatcagcagcatgaaaacggactaatacaggccatcgcagagacacacattaaactctcactatggctactttgggaggtgaaattggagggtcactgtggaaatttcctttctagccattgatacttaagcaaaatcatgatggtgtttacttccttgtttgtccttccccctctctaccttttaaatgttttattaagtgtgatgtacaccctggaaaatgggcaggtaatctgctgcttgaggtaccgccccaaatgcagcacacccacattaccagcaccagatccagaagcagaacccaccagcccctaacttctaacagcgaggactggtttttatttacatagacggaactctacaattcgtactcgtcagcatctggctcctttatcaatgttaggatgaaatttatccaaattcttgtgtcactatattttgaaattatctttgaatcctgaagagagttcttagatcccaatacagtaacagctttactttagtcggggaaatacactggtgtgtagggaatctggtgtatgtgcgtgtgtcctactactactaattcttggccccgaggggctcctgggggttccccgggcccctgttagggaaccgcgtccacttctcgccctctcggcccacttcggaggctcggtctgcggctgcgcacagcgcgaggaagcgcggtcacgtgactgctgcgggccagccaagatggcggcctcatgcttggtcctgctggcgctgtgtctgctgctgccgctgctgctgctgggaggatggaagcgctggcgccgggggcgggcggcccggcatgtagtagcggtggtgctgggcgacgtgggccgcagcccccgtatgcagtaccacgcgctgtcgttggccatgcacggcttctcggtgaccctcctggggttctgcagtgagtggccaagggtctgggagggacgatgctctctcagccgttgatcctcggttctaaccgccccggggagtcgaggcggaagtgctcctttagtcgccgcctttgggcagctctccgagattagacgagcggttctgccccagcctttcctgggtgggtctctaggtatagccggcgttaatcttgccacgtgtcagaagtgtgttaagtgaatccattgcgtggtctcacgtaattctcctagtaagtggaacccaggtgcgtggaactccagggctagtgctggtagctacgtccctgtgcagctacccttgtcaggctatgtctgagctgacaggatatttcattcctcatccctcaacgcagagctctgcagacagatgttttcatttgttcttcatgtccagcttttccccacagtgtgcagggcagcggtgtctgctccctcattattctccacgttggtatcttgagagggtagctcaaccccatctcaggaagaagtgggaacagcactagttgcctttaatccctgtttagaatctgctatcctagggtgatggggtagagtgggacttcctagggatggctctgtggtgggaaaattccactatccagacaatctagattagtttaattgagcacctactgtttgccaggcatcatgttaagtgaaggtaggtaagattcaggccctatctctgtgtgcctcctagagcaatctgaacaagaattggccgcattctctgttctggctagtgaggagcagagagaggttttgaaatatcttactttccaaaacactgtccgtgattcagcctgagttgggagattatctgactttaga

SEQ ID NO: 62829 - DNA, 653 bp, Homo sapiens
aaaattgtgaaaaacaggcttagctgagcgtaatgaaacccacactgtgcaagagaaagcagaaatatttgactatggagttattataagcatcgtttctagccttccgcactgagtgtatgataaagtccttggccaggtgcggtcaggataattcactccaacttgctccagtccatccttcacttccctttgatgatcttttgtgtgtgcggtactcattccagccagtgcgtttgaacggcgcttgcagtaaaagctgggagagttcgaggtcgccacctagtggccagcaagactgctattcacgctcccattttgtcccggaccaggggtcagtttgcagatccttcatgagtcattgtcataatgggactcaaatatcaatgtttgcctctaaagttcacttcaaatagaaatgttaaaaaaaaaaaaccctaggatatctctaagtggcgatctcttgacctcaacccatttgatgcgtgctatacagataaaaagcaaaacccatggcagaaaaggctattttcggaggcccacgatgtaaagaaagcataagcaggcatatgtatacatgtgtatttttgcaggcgtgtatcagaagttgcagatgcaaagattttgcaattgaaagtttccaactttcctcc

SEQ ID NO: 62830 - DNA, 545 bp, Homo sapiens
agcccaagatgggaaacagcatggggctactttcagatcatggcctctttataatggatatggctcactgttttatacccctttgatagttgctacctaataatgttcaatgcagaaaaagcaggtggataaaagtaaccaaaacttcacagatggtcacttagacttaactcagccttccacgtcacacattttagcccacatgcaagagccatgagtcacctggtagtgagtcacccgttcatccctacaccagtagatttacccaatgctgtctgtgccaagctaagagcaagcccagagagctctagaaaaaaaaaaatgcccaataaatgtgggaggaaatggggcagtatacaaccttcctgaaatacctgacagatgcctgaccttccaatggccttggctatgcatgtgcttcagagcttcgccagttccattttctaagtaaatgctaaggccaagtttgagcccctggcttatttattaggcaaagtgaggcatttaagtttccagtcagtgaacaaagagactgcagtgaggag

SEQ ID NO: 62831 - DNA, 1603 bp, Homo sapiens
gtgacagagcaagaccatctcaaataaacaaacaaacaaacaaacgagtactaagagcatggatgacggtaacacccgtgataataaatacagtagcatgctggttaaatagcaccggctctgatcccacaccccgggttcgaatccaggctttaccacttagtagctgggagagttatttaactcctatttaagtcttttagaggaatgagtttagccacctaggcgggtccccccagcaaacacgcctcgcccgcgaccagagcgaaggctacaggtgcccgccggcaaccctcggacgcatgcgcggcccgggcaggtaggtggagccacggtgcggggcagtcggatggtcgcacgcgggggcggggccgcgcctgcgcagaccgcctgttatggcggccgcctaagtcccacagagacgggagtcgggtgggatcccaggctgggccccgcggcgggtaagtgcctgggagaggcggcgggatagggtagggtgcagggaacctcctggcgccgagcctgactttgaaatccgagctcccacagatcggaggcccagatccctaaggcccgaccccactcttagcgtcagtttccccttctcaacacgggtgttggggaaagaagtccacgtcctcacctgggtttccatcctgggtccaggcacctctccttcggttctagattaggaagggagggcagtgcccgacctgtgactgttttttgagagggcaatagttaacccacaagggtggcgtcaggaaggcgacaagacaaagagaacgagtagccccacgggggacgtccccggagcccctcactaccactctacgcaccgtggccaggccacgtctttcctgcccccagcctgggccttcacaccctgccctccccagctcctggcctaaatcgtcatgggatcgcgccaaattattgattgttgagtgagttgcagttatcagaaagaaagatgaggagggaagttatttcaacaccgtgatcccagcacactgcttatttgggacaactgactggggacctataggagaagaaagctggtagcgtctcagtctagcccccacagccttagaagagccaagaacacgttagctcctgctgcagggatgagcctgcagccctatggagaggtggtggggcaggtccccatctgcaacctgggtctcctttctcagctctgcccagtaaagagaggagcccgaagcccatacagaccctgcatttccggaaagagacttttcctgactagagaaactgttaccttttttctttcttcccagcattcactttaatcattattatattactataatgatagtatttactattgttgcttattgaacgtttactatatgtcgtaagcccgaaaagtggtaattgtctcatatactcctctgagtatatgagggcctgagataggttcaagagggcctccttattcccagatagctgattctagggaaagccacttaaagggaatctccttcatctggaacttacattgcagcgtacatttcttgggaagcctggttgggttgaatttaaaaatggaaaattcaactagagattaagaatttgagtt

SEQ ID NO: 62832 - DNA, 567 bp, Homo sapiens
ttgccagattcacagactttctttacaacccacttgcattttgatggctttatggtgttgagtaggaaagctagcatggagatgaataaggaatcatctttttcttaaaaatttttttgttgggacagcttttgctgccccacagcaaccacttaaatgtaggaactccagcagtgtactgggatcattaggacagcctgagtcatgatgacctcattttgcagttgaagaagtgggggccctgaagatttcatgacatctacccaggtaggaacagctcctataggcagtcaggggttacaggcaggtttgggtcaaatacctgaaaccaaccccaggacaaggaggttgctggtgttttattaacacctactgtgagccaaggactctgctcagcagtttacccacccagtaacactgcgtgagattgtggctgaagaaacagatgcagagaggcgaagtgattttcctgaaatcacatggctagaaggtgagaaaccagggatccccacctggtctgtccagcttcaaagcccatcagactactgctgtttgatgatgcttttt

SEQ ID NO: 62833 - DNA, 2508 bp, Homo sapiens
tggtgatcgcctgttgtcttgatgagcagttctttgtgtctttgattttgtcactgaaagattgcatcctctttccaaatacctctagaaagctgtgggggggctatccatccgtcacacctgagtattaattatcttccacacagcattttatacaacggtagaaaggcaccttcatcatatctagggtctcgtttatacccacgaaggaggtacaatctctgttgtcccaatttcaggaaattgaggatcaggaggcgcagtgacctgctccaggtcatgcagaaggaaccacctctgactcccagcgccctgtttgtcttccggagcgctggggccaggcggaggaaagtagctgggagcaagaagggctggcagggccctgagcgccgagatggggagtgaggtggggagggcgggatgctccttcccttctccgcaaaggaaccccttctgattccgactctggagctccagagaccggatccgagacgcgggtggaggtggagttacactcgcctgcagccctgagggtgtaaatggcccattaagatccaggttaaatcaacctatggagctgccccccagagggtcagggtccccacaacttgacgggggtcctcagccgtctcctccccagtcccaggactccctcccagccctcgcggtccctctggtgggtcccgccccagcccccgtctcccccgcccccggaggctggactctgcccccgccccgcctgccacctccctcctgggggcggtggcccgtggcgggcgcacccattggctgtggcgaaagcgagggccggggctggcggcgctgattggccgggacgctcggcggagccagggagtccggcgagtcgctgggggaagtcgagcagacacccagcgctgccggaactcggggcgcgcatcccgcaagtcggaacccggcggatcggatcccgcagatcggagacggggcctggaggtgagcgcgaggcgccgggtggcttgggacgggcccttccgaggggagccgagaggaggtccttctgccctgcccccaggagcaaaacctgggcatcttctcctggaaacggagccctcatcttcccaagacgcggggccctcccccgaaaagacaggggctcccaccccccagagagcaaaataccttcctttctccttcagaaatgggcccttcctcctggctccagctctagacagaagtcctctcccttttaccgcttgaaatagaatgcggccccaaaaagtggtctccaggtctctagagccccctcacctcttgggagactgatgccccttccccatccttagaaaactaagtttgggtgtcttccttctcccctctctttcggaataatgggggtcttctcagcttataaattacagtgacctccccctccatgacaaatggaagctctccccccatcataagacaaggaaatcccggagcagagactctgcaagtcaccctcccaccccagatactgggctctggagagatagatgattcacccttagccctgccggagacccctccctacccgtcagagaggcagggtggcctctgacaccaccacattaaaggcttttggggatttcccctctcctccccagtaaagatgtaaaatgagggaccttcatactcaggagcagggcaaaggtctggccacccctccaagtcatccacctccctccactccacccaagccctttcacacaaaccccatcctagtaaccccctgcaccatcctcccaccgctcccaatcccatccttctccacctcaccccaactccactcccacacctggctgccccacctatttcacatcctctcacctttcctcacccaccctggccaaggtaagactagagggggttcagcgagatttagtaagactggagctcttaaaactgggatctggggcctagaggcccttccaggagtcttcaaactctgacaacagagatggcctctgaggcagcaggaccagcagagaccacccgccacctctcccccgctccctgccccaacacacgcacaaaggctgtgttcaatgcattctctcttgcagtctgggaggacagctggccctcttccaagagggcccgcatttcccccctaaagtgtgcacccccgcaagcgcctgtggacattgcctggtggaattccctgggcactcagccaagagaaatgggtgctgctgggcccatccactggggaggagacagtgttggctttgctgctttgatgaagctagactaagggacaggatgttggtgacctgggggtggggagggggtgggaagagctcttctctggtgggtcaggttgggaggcaggagagagggaggcagtgagttgtgtcttgctctttggagcctgtgttgcggcgtggagtcatagagaaatgtgttttctcgaggcccaaagaggttagccacggggagaggtaaatggtccagtctggagtcctaagacctaaaagggcttct

SEQ ID NO: 62834 - DNA, 1570 bp, Homo sapiens
acaactgagttctgggccttcttcagattagttatcagggtctttcgaaacttcaatggcatgctctttggtccagcaatcccactttgaaaaatctcacacagaaatgctcacacttgcactgacataacataaaaatgtccatggcagagcttgcaacactggtatgggaagggattacagtatatgcattcatgtgggagaatgagtagattttagatgaatgaggtggatccacattcctgaccttgaaaggttcctgagtcatattatttagtgaaaaagataaagtcacagaatcaacatagccagtatgatcctatttttttttaaatgtaaatatgcatgaacatggatagttagggaagtggggaattaaaaggacctagatagtatgtatgtatgagaacatattcctgggggaagaagaagaaaataaatctccgccagcttcccatgcattaaaaatgagcaaagtgggctggccaccttgtctcacgtctgcgatcccagcactttgggaggctgaggcggcagaatcacttgagcccaggagtttgaggctgcagtgagttgtgagtgagccactgcactccaacctgggcaacaaagggacactgtaaataattaatcataagataaaaattaaaatgaatagagcacaacccacagaggttgagagacttgctaacaccagaagttgccagtggtgaaattcagctttgagtttgctgatagttacggggccaagagacaggaatctgaggctcatctcagcaggccaagcctccttccttactgtggggaaattccttctctgagcacctagagggatcctggtgtcagactgacctcacctgaatcaggcttccacccacgtgatgacctcaggccagccactttaactctcagtgcctcatttctctaactttaaaatagctaaaaggcaaaggaaaaaacatgaaagccaaaaaaaaaaaaaaaggtagaaggaggaggcaatagtagaacctctctcattgggccgctgtgaggattacataaaaccatgtgttccgacccccagtacttagtaggtgcttaattaacacgagccctggtctctcctgcctttttctctgcttgcctgctccttgccaggatgcagaagacaaaagcctcagaaaggacagtgggggctcctgaggccccaagaatgcttagcaggctgaatcagttgtcctcacttcttcactttgccctctgatccaccatgaccactctgctgcaggagcttttaacagaaagcctgggagagcattctgagggggtctgtgctatagctcttcctccctggggtctaaccatccttgctttctctagacactccacacattaaactgtcttgcccgttgcagggatgggatggcatcatgtggcctctaattacacatcccttcaataataagattgactctccaagggcaagttttcctcctccttcaaaagctatctcacattgcgtcttttacaggtagtcttccccgaccctcccccacctccagccaggaaaaccatttctcctcctccc

SEQ ID NO: 62835 - DNA, 906 bp, Homo sapiens
ctgtctctgtcttctaggagctgcctcctagggctctggggatgaaacgagatggttctacagcaccagctgagagcctgcacatagcaagtgcccagtacttgatgatgcttagagggtaaggacggcctctaattgatctttatgtgccctagtgcccagtgaagggtctggcacacggtaggtgtaccatgaatgttcgtagcacaaatgcatcaatggcaaccgcctccctccttcattcactctttccttctaataatacagccaacattctattagctctgtgggcagccacagcgtgctggaactcgccatcctgggctcggtgcctgattctccacactattcctgccctgtgctgctgagcccacgtgtttcccagcacctgaacctgtactctgaacccgcctgtcattcctccttgccctgttctctctccttggatacaggcctcccctccagctgtgggatctctctaggtctgtatttatcacctctggttggcacttcctatatgctgtcatcacagaagcagggggtgggagaagcctcttggtcttcatccaggtctaggatggaatttctgtccactgtggggctgggtagagttaggcagcccaagccagggctgcatgaggaaagggctgcgtccccagggtctgtcacagagtaagtttcaggtgttgcaactcgcaataaatccatgcattaggcacaagccaggactcctgagccagatatctctcaaccccaacgctggctccaccagcaacttgctgtgtcctgggtaaaccacatggcttcttttaaaaaaaatagttttactttgtttactgtccaaagtactcattaattgtttatttatcaagagaaactatttctaattttttgtgtgtgagacgg

SEQ ID NO: 62836 - DNA, 1340 bp, Homo sapiens
ttaagttgccagagccacagagctgatgagcggctgagccaggcttttgagctaagcccagttggctccaggacccgagccactgtattgattatctgccgccacgtaacacatacctccagatttagcagattgggatcctatgtttattatctcacagtttctgcgggttgggactccaggggtgacttagccagatcctctggctcaaggtctgtcatgagggtgtaatggagctgtcagctggggctgtggtctcatatgatggctcaacttggcggttggacgatctactggcagtcccacttacggggttgtggctggattcagttccttggatgctgtcagccagaagccactctcagttccttgatacgtggacctcttcacagagccgcttacaatgtggcaactgctccctcaaagcaagagagggtgccaaaaatggaagcctcagcctgcagccatacccacagcattttcctgcttctccatggtgtctccaccaggtccctgtgaggccattaaagtgacgatagttaacgatctgacatggtgttcccaatggcatcattttatgcctccccaaaattaataatcttatgttggtaaatagaatacagagagtgggagaccacatcaaaattgttattgctgggtagaaaattaaatgtgttttcttttttccatgttgcttattggtatcttcctcaataaacattttatcacaaaataagtggggtggacagttgcaggagcagataaaaaaaattttttaacagaaaagcagagcaaacaactccagttggacttgaccttcgttctggccaggctcatgtacagagctttggctgtttgggaacacgacattcgtttatcactctcggtctaaagatcaagagaacattaacaatgtttgctagctactgtgtagtttggagctaaaaatagactctggcttggcatggccattgagggctgtgagccccagagggccaggctggatggaccattcacatattgtgtctggtcttgtgtgtcaataacatactcttgccttctggatgtgttattttattcaagaatgaaaatgcttgatcattcagtattaattcaaaccggttttttgcatctttgtgatcatgatcaaaatttgcctttaggagaagtgtgttgttttgctgcaaatgtttcattcaaaggctagcactcgatgaaatcaaagatagcctcagttccattcatagcttctaggaaacaggtcagatgggcaaatttcctgctaaccacttgctagctgtgtgatcttgggcaaattaattaacctctctgagcctcag

SEQ ID NO: 62837 - DNA, 1187 bp, Homo sapiens
gatgcccacagcgtctgcctccccagcctcgcctcccagccatatagagtgttcactcgctgtataaaagggcacacagacaggatggacagggctaaattggaaatgcaggtagctgctatttgcagcttggatggttaatgtttctttggctgatggattcctggctacattgagtagtccataggctgtgtctgatgaagcctgtcccttcacaggtaatgctggttcttctgctgcagaagagcccggggcatcctccgctccccatcagcacctccctttggaccctgctcagaagcctggagcctttccctgagacccagccttggctgtcccccctcctcttcttcccctgctcatttcctcacacctatttatttgccactaacatgagattagacagtaagcggatgactcattctttgggggaagtccatcattcaggaatgcctcagctatggaaggcattttggagacaagaatttaaaaaccccatctcccctttgtgtgggagtggaagggatgggctcttgagttgtcctgggttcaaatcctggctctactatatattagctgtgggactgtgacccacccccgaggactccctcagtctgaatgcccagctagccactgtgtgcatgaaggtcagggaatcagattagcagcatttgtttaaaaaactagaagtttggtcgggcacggtggagcacgctgataatcccagcactttgggaggccaagggaagaggattgtttgaggccaggagtttaagaccaatctgggcattatagtgagaaccaaccccaatctctacaaaagagttttaaaaattagctagtcatgctggtgcatgcctgtagtcccagctactctggaggctcagtcaggaggatctctggagcccaggagtttgaggctgcagtgggctatgatcactccactgcactccagcctgaggcaacagtgcaagaccctgtctcagtaaaaaacaaaaacagaaaaattctagaagttctaaaagttctctctctggccacctgtcctcccgtatctgtagtctttgaaaagatttttttaagttaatacttatagagaatttactatgcacttggcatattgccaagtgccttatacattatctcattaaatggctacagccaccttggagtagggtcttctaaca

SEQ ID NO: 62838 - DNA, 2496 bp, Homo sapiens
aagggtaaagccagatgctatctcatgtgggcatcacaacagctatctaagatagttatcactatttccactttaccactagggaaactaagcccagagagggtaagatatttaccaaagatcacacagtcagtgagtgcagcagagtcctccttccaccaggcaattccaaataaatacaggaaaggaggtgcggccgtcattaattcaaaacatatccagggaggacaaactctgggctggacaatgtatccacaagggggtgtgaacatttccccaagcaggaaactaaataatcagtgtcttagtggggaactcgagcaacaaatctgtgagatatttattccaataaactttctaattctctgtttgattcatatgctatcttgggtgctggagggaactgctgctttctcttagcctagtctggggaaggggaaacagcggagaaggagaaggagcgaggcagggaggccccaacacgtagcacaagggtattactaggtgggtagtgaagcagtaaaagctcttattccaattctggctccaacagtaatttgtgagcaaattactccacacccctgagattcggtttcttcgcctttcaaaatggggactcagaacacagtgaaccagaggatggtttcagagtcctcaacttagtacctaatgcactgtgagagctcggcgagttttagctactactactgtgcgcatgtgacccaaggagggcaagagaaagcccgggaaaagcgaactgtaacacacgccagagcttcctcccacggatcctcggagtccgaaacccgagcgtcgggcctgcccgccccagccctgaccccgaccccaaagagcatcaccccctcaaggctcgccacccgcctccttaccatggccccaccacctgctgccggaagtaaatcccaccggcccccggaacccctaagagcgcatgctcgaatgtacaaggcgggcgtgatctgcgttgcaccctgggagttgcggtccaggaatcgtggctgccgctactcccaggcgttatgggaacggagtcccctcctcttcccgacgtgccctgcgactcagcggccgaacccggaagttccgggccgagttcctcgtgccaacgtgtcttgtaaggtgcggctagaaactggggacatggcagcgcctggcccagcgctctgcctcttcgacgtggatgggaccctcaccgccccgcggcaggtaagtggcggccggcgggctgctggcagccgacgcggagcccgtgctgttcccagttggggctatcgaccacccagggtaggcgccaaggggtggctaaggaccgcctacgtcctcacggcgctgaaccctattctgggtgcactggaggaatgagagggaggccctaaccagctcttgaagagctctggtgcttggaaagatgagacggggctgaagaactcttaagagcaggaaacttgtgctaggttggaaaatgtaatctggactcaccgctagtgctcgggactgatagaccaggatttcaacccaagatcaggcccccttatcagctatgtgtcggccccaatcctgtaaccaatgggctgtgccgtgagtcatgatattaaaaacaggtttccaggtcaaaccgacctagtggagtctcatcttcacctcttgacatctgtgtgaccttcagcgagtcattaacctctctgagcctcaacatctacagctttaaatggggatgttacctgttccatatggtgtctgtgaggatcaaatgagattgtgtaagttcttgaaagtatgttggacacaacacactaggcctcagtaaatagtagccacctccaccacacccatctccagcccctgcaatggactagggagatggaggagccctaggttattacaggctgcccgctgagagcctctttgggcccttggaaacttgctttccactttcagattttgctgctacaggcacagataagtttcagttacgatcagccttgaggtgaggctctcctggccccttttcagaaattggccactgaacactggccatttcaacttgagactggaccccaatggtctcactatcctcagcttctaccctcacccctcatagttttcgcttggtggtaacaatggtgtgctccagaagtccaggtcaaatgcgtgtgaccttagacgtatcattttgcccttctcagccacaggtttgatttacctagtgatgacgctcaactcccaagttcttcaaaggctttttctgattctgaaattcagtgatcacacacttgggtttgttaaaagcccatagtggtctaaaactccggtccccaattcattttttgtaaagggccatatagcaaatacttctctgtctttgctgactatgtggtctatagtaaccactcaactttagtgcaaaaccagccataaaccctatataaataagagtggctgtgtaccaataaaattttatttatttattacaaa

SEQ ID NO: 62839 - DNA, 1209 bp, Homo sapiens
catcggcttgccccgcactgtggtgggatgtaaagtgataacagctaaacgacgcatgcacaacatgtcctggtgccttctgcgtgaccccagagcagcaggttctgcacatggcaggtaagagcacagctgccaagaccccaagcctagttctgctgctacaagctgctgcgtgacttaaggtgagttcatcttcgcctcagtttcctcctctgtcaaatgggatagtccttaccgtgtatggaatttaaagcactttgaacagtgagtgtgagccattactaactcaagtaataccccttcccaacccagaaccctataaggcagggacagtcagtccctctctctgctttagggggttgcaggataaagacaccgtcacaagaaatttaaacacagtaggtaaattttgagccacagcaaagcacagaggttgcatccaggccagcttagcactgttgaaagtcaccatccccagcactgcagaagctgaccctgaactcaaggtcacccagggcttaagcctcagagaaaaggcctgggttgaacctgagcagtgggtgagtgcagggcaggcctctggctccctggagggagaggctagccaggaagttgagcttgaacctgatcccgagggagaggtgtggggcatgctcatgatctgtccgggaaggtctctccagctactggaaggggagtgcccacaggggccaggagaaggcagttgggcagatgttgccgtagtccggacacatccaggcatacgtggttttgaatcacttcctctccaagggctgctgcttcctctccacccctcccaagtgttctggctctgggccccagctggccacctcagcccaggcaggctcctccaacctgaacgacaggcaacctccacgctgcctgccacggcaccccaaagtcaagacgtagaactcattccacctccttcacccgaggctgctttcccaaacgtcttcccagtcccaccttcagttttgttttttgttgttgttgttgctattgtttttgagacaagtcactgttgttgcccagcctggagtgcaatggcacgatctcagctcgctgcaacctccgcctccccggttcaagcaattctactgcctcagcctcccgagtagctgagattacaggcccctgccaccatgcccaggtaatttttgtctttttagtagagacggggtttca

SEQ ID NO: 62840 - DNA, 684 bp, Homo sapiens
gagattttaatgccaaccacctagatccaaactcagccactccacggaccctccctgacgctgctgggagccagacaccacagggaagcaggggcaaaaactgaccctcacgcagtgtccgcctccagggaactgtggaacacgtcgcagagagctcaagcgccacgtttggatccctgagcagctgtcacaagcctgcacccaggactggggggcctgctgcgagagcccaaagggaaagggagaatttccaaggctgcatccagctccatcaggcccagtgaatttccacacagcccgggtcaccacgctgttatgaaatcaaattccttctgtgacccctagtatgtaccggtaaatccagctggagggcgggaattccctagctgctgctgtgcttttgacaatttttcaagagcaggacactcgctgtacacaataatcactgaacattgaatatgaaggtgtcggctctaacgtggcctcagctcgaggttcaggggaaagagaaacagtccagcagtcagaggcccttgggtaagtcctttcccatctctgggctcagtttccgaatctgcaaagtggggcagctgggtgggcatcacttggcacctgcgcagggctggtgatgggggtacgagatgaagtagggagaagcctaactaactcaggacgccactcaac

SEQ ID NO: 62841 - DNA, 2558 bp, Homo sapiens
cccaggctggagtgcaatggcacaatctcggctcactgcaacctccaccttctgggttcaagtgattctcctgcctcagcctcccaagtagcaggggttacaggtgcccgccatcacgcccggctaatgaagcatagctgacttctaatcctaccccttgcctgctgtgtggtcttgtacaagttacttaatctctctgggcctcagtttccacatctggaaaatgggaattataatagtcccgatttcacaccatcaggctgaactgaaaacaaaataatacacactaagcactgggcacactgtccgcccaggtccagtgagcagtaattgtcagctacgactgttgttataattgtcatcataaaggcactcaacagacacgtgcccaataccgagccctgttcaaggccccagagacaaagggctgaacttgaagccagagaataaacagttaaataaacataaaccagatcattacagatcccaaaagggctgtaaagaaacagacagaaggggatagggggagaagggtgggaatacacacgctaatcagggtgcctgcaggaccctgaacagcaagaaaggggtagccatttgcaaaacggagggaggctgttccaggtatagggaacagcctgtgcaaaggccctgagggcccgggtgggactgaggccagtggggaaaccatgtgatgggtgggggactaggaatgggaggcaggaaaggcggtggaaagggtagggcccgctcaggaatcatgccgcgtcatcatcatcatcactgtcattgtcaccatcgtcgtcctccttgcatcttccatttgtcacacccattttcccctgggtgaatggcacagacccaaaatgggggcccccttctttctccacccaagccccctcaacaccccaagtgcacccaatccttcagagatgccactggaagctcatggcctgtaggggtgaggagtctgagggcagcacagggcccctctgtgtcccaagggcccagcacaggcactggcacagagcagggtctccagacggtccaggaatggccacaaggatggctttttttttttttttttttttttttcagataggatctcacttggtcacctaggctggaatgcagtggcgcgatcatggctcactgaagcctctcaacctcctgggctcaggtgatccgcccaccccagcctcctgggttgtgggactacggccacgtgccaccacaaccagctcattttttgtagagacagggtttcaatatgttgcccaggctggtcttaaactcctgggctcaagcgatcggcgcaccttggcttcccaaagtgctgggattacaggcgtgagccaccacacccagcttccaagcctcattctttgccagcattaggacccaaagccccagctggctgccactgcattggtgtgcactcagcaccatgcccagcccagcaggaggtggctacattcctgctcacctgatagtggaagaaactgaggcacggagcagacgtgactaggggcgggggcagtgccaactgggagacccaggagctttatccagcctctcatggcccatctgggctgaagccaagctggggtggccagagtaggcctggccaagggccactcactccccagtaggcccagcagagaggagtgaatggcctcagtgcgggggagggccgggcaaagtccagctggaaagaaaacaactggggggcgggtaaccaggcacccagaagccagctctgaggccctggccagcctctgctgtgtcccctccacaatacacacatacacaaggatggggccacacagcagccccgcccaccagcacagtcccagcttccagccagccactgctctcccagcaataccaggcatggccttggagtgtccccagcagaagacagggcctgccctctgtgactagccttcagctccccacagctgggggagggaggaaggctgcaaacagatccgccactcagatgagcttctggcctgcaacaaacttcgaccaaatgtcacgaccaaggtgtcatgactgccaggctgcatgtacatgtgtgctcgtttgtgcacaggtatgtaggtgtatgcacatgtgtatgtgtgtgctgtgtatatacgcatgtgtacacatacatatgtgcccacacatggctgtctctgcatctgagcgcatacacgtgtatgcatgcgtgaacttgttgccgtctgtatgcacacgtccatggagcggggagcctcacctcaccgcacagcacgctgggcacctgtgctgccacaggggaccttgatgaactctgccacttcctattgaaccaacagataagggagtgggacagaccatgactaccaccaccacagcagtgtcctggggccattctgcttactactttacaacacttcacacagcccagctcattctatccccatttcactaatgggagaacggagacacaaagagtcaagtaacttgcccagggtcgcccggctaacaaagaccctggtgaaatacggagtaagtcagacagcagaaat

SEQ ID NO: 62842 - DNA, 2063 bp, Homo sapiens
agtccacaatagtgcggctgatggtggaagtgtcaggcacgggcccatctgaaatcaccttccctcccattcctgcccctgctgatggaacacaaaccaaatgcgctggctttgccactcggtggaacaaagaccgatcccctacctaggggacccaccgtcaaccaccctcaaccccaccccatggccccacgccaggcctagctcagctcattgaaaacatctactcccagccgggctctgcgcctctttcttgccctgaagggaccagcatcgagaactcacggtcatcaccgaggccacccagggagtgcagagggcggtggggtctccaaggaggaccccgagcccagaggagggccaaaggcccgaagggagggagaacagaggcagagagaggctggagaaggtagtggcggaagataacaggaagccctgctgagaagttggggacttagacgacaatgggacttcggtggacgattttcagcgtggggtagatctaagcggattgtttttctaagttccctctggcttcagagtggcagcaaatgacaggggcaagcaagactgggcacagagagactgagaaatatcaaaacagcaagttaaaaaacagtagcttacgtgtctcccggcacggggctagctgcctccttttactctcacacaccctctcatgccagaagaagtcagagcccagtctgcagatggggaaactgaggctccgagaggcctcctatttggcagagatttccccacctattaagacccaaggccctgcctggagcgggacgtctccgcctcccccagcacacacatccactccaaccccagaaaaccatagggccggaggcttcctttttaaaaatcaaaaaagaacatttcacttccggcctgcaaacctgaaccgccagcgcagcctgcggaaagggggcctgtgggcgcgggtgaagtttttctccagcgcctaaggcacccccacccccatccgggcgcaaacacccgggcccagcgcgcccggcggctcctcctcccccagatgcggctaatcgcgcggcgccaggacggctccccacctcccccgccgggcctggccgccgtcccaacctcgagccacagctggcgcggccaggcccggcggggggtggctctgcttcccgcgtgcgacgccccccgcgcctcgccccaccgcccggcgagtcccccgtccagggctcccgcccaaaggcaaaagcagcggggagggcgggaagagcttcccctgcacgcagagaacaggtggccaggcgggaagtactacccgacgtccgcctagaatccttgccgctgttgccacacccaccccttcccctggggaggagcaacccgcgttccccaaacaggccccgagaaacccagcccggagccctcctctgccgagctagaagaccctgcaggatgggggacgatggaggcagaggaggccgaggccccacccctgcggctcccggggccgcgggccaggggcgcctatcctggggtccccgagaagagctccctaccctgcaatccgttctgctccgccagccgcttcgctccgactgagagcgcggagctggggagggggcgtggcccgagggggggtggggcgccgatccccgcccccaggagctcccggccaatggggctgcgggagggagcccgggacggtgggggcgggcggggcgggagtggcccggacaggacctttgtgtccgcgccttagactggcgggagagcggaacgcagagcgcgggacgtaggggccggggcggggcggggcggggcggagctgggctgcacccaccagcagaaaacgcccctgcaaagtgggggaactgtgtccctgcgcccgtgcagttccttcccctcgccacgcgcgccaggtgcggctcccacctgcctttggctctaaaatctgtataatcccggagggtgtcacttttagcagaaaggaaataaaggaatgaaaagagagacggaagaaaacaagcaaaaaacagaaaggaggaaaagggaaagaaaaaatacacacgcacaca

SEQ ID NO: 62843 - DNA, 848 bp, Homo sapiens
gggtcctccatcagttcctgggaacgagaattcctccccctacttttctctccctgagtaagcaatgtggctggagtagggagggtggtgcctacagcagcccctatacctcattcacccccatcctgcccgacccatccactccccaccacaagctggcaggtaaggcagtctgggaggttagcagaaccggaaattcaacccagagaggttaggggatgccccagtatgacccagcaagtccccaccctaggactccagggtccacatgcagatgagatatatgggaccccactgctgagccagagtgaggaaggcagggttctgggggcagccagcccctccccaggcaggaacaagccactgccccatctccaggcccctctgtaatccaggcccctctgtaacccaaccccccacacggattgtgcaataattacaggtacagctcattcctccaattccttcttccttattatctcatcgcctctgctcaagctgggcccttctgggaaaagaagatgagtaggaaggaaaaaatgtcccatctccttttcccataaacagccctggccacagagtcttcctcattgcacaaaagaaagcgtagcccagagacgggagtccggtgccctaaatcacatagcaggaaaggccccacacgggactccccaggtccccagctgccaaaactccaggctcattgcattcctgggtggcctgccccctgccctggcctttgtgactctgctaattgagttgattgtcatggttcttgttaatatgttaatattaattgccaacttactgcaagctttccatgtgccaagtatggaggtaagtgcttc

SEQ ID NO: 62844 - DNA, 1696 bp, Homo sapiens
tttaatcacacataacaggcgctcttagttgctgctttgctggggccaagtgaaacagataacccagtccttggcgtggactccgctcttctgtcccccattactgccattgataaataccactggggagtgcctactgcagaatcccagccactttgtcatttgcaacctggccagccattttttcagtgactatccaattactggaagtaagttattctattcagaggtgaacaccagtcacgcttaagtgttcccaccaaccggtgtgcagcgccccacacttggagccaccgcacaggacaaatactgcttttcctgagctcccctggagcttcattcattgaggcaacccaagatcccttgctaaaagcaaaactaaagcattccacgccgttttcattcaggtggcctccatttgactcccgacagcctgaactcgtcacgtaggtaagaaaactttttaaagaccatttggactttgctttgtttcagtgaaatgggtcgtgagaaaaagtgccttccaacgaccaactccctaaatccaacacccttctctttacagcgtcttcacatccaacctttacaaccaagactctatacctcaaactacagtgccttggaaaattactgccacatcggcagaaaaccgagttacctttcgagtcaggtttgattctgatgcaggcagccatgtgcggcagggctttcgcacggttgcaagcgcacacctggccggatgctggctgcaccacacactgccaagtacaaactccccgaaaaacaggtggattcggaaaccaacagcgcccgggtcagaactctgggccagtccaaaacctgacaacatctgcgttccttgcaggtattttcgaacgtaagcccgacgctaggcagtgctgttagaaagtgatttggaagagcgcttccgagccacggcgcgccctccgggggagcgcaccggagcaggtgcgggcgagccccgcgcccggggaggtcaggaattccccagccacaccagatccaaccggacgccccagaacggggacggtccccggagtccgcctcccaacctgggtgagaaaacacctccgtccctccgctgcctgagcgctcgaatttacaactcagggcgctttgtgccgcggaggcccggcggacgcgaggtcgggacaatgcacggggccggggtcccggcggccgcccctcgcccgcggacccggcatgactttgcagcctcgcaggccggggccgggaggccaggccgaggcccggcggccgcccggggcctggttaaagatggcgagcccctcgcgtggctcccgcggctcccccggccacaatgaaaggcgccccccggccccgccgcggccggccctcgggcctcaccttccatctccatgtcctcgggctcgctcaactgctgctcgcccgctttctgctgctgctgctgctgctggtggttcatgtcggccgcggcctgggcctcgcctgcggccgggggccggggctgcgagcccggcgggcgggcggcggcgagccggggcggcggcggcggcggcggcggcggggcggcctcctcctcctcctcccgcgcgtcgtcggcgacggcggccccggggcggcccgcggcgggcggcggcggcggcagggagacgcgcacgtacttgctcgcgattcgcccaatctcggcgcc

SEQ ID NO: 62845 - DNA, 1056 bp, Homo sapiens
gccggtcgggggccgcggagtcagccccgcctcgggccgggcgcggcggacgggaggcctggccggccgcggcgggcctgcgggccctggggccggcgggagcggcggagcgggcgggcgacgggccggccgcgttccgagagccgcggcctccgcctcctcggcgtcgtcgtcggggctccggcagcggacgcggcgcccggcagctcggctcggctcgctctcaaaatggcggcggcgtgaaatgtcacatccgcatggggggccgcggagcgagcgagcgagcgaggagagcaagcgggcgggcgccgagccggagggcggagcgggagcgcagggcggagcacgggaggcggagcagggagcgacccgcctgccgccgccgccgaggcccgcctgccccgcagcgccgcgccccggcaccgcctgcgccgcagccccgcggcggaccctcggcgctccctgcccccgggccctgggggccgaggcgggccgcccggtgacttagccctgcggaggtgaaccggaatccttcccatcctggggagccggacaccccgaaagacccaggagcggcaatgaggaggggcccagaagccacccggcagccggggttcaggtcccagcctagcgcgccggggcgagcgctggaggttgcccggggactgctcgggatagggcccggaagggagcttggggtcagcgcctagaagttcctgttattgtcgttacttacccttgcccgctgacgtgcactttttcacccagtatctaccgtggaagaatttattttctcactgtcagcctaatctggcaaagtttggctcctcaagagcaaccccaggcggggcgcagctgctcacacctgtgatcccagcactttgggaggccgaggtgggagaatcacttgaggccaagagtaagagaccaccctctctacaaaggttttgggttttgtttttatatttttgaaatgtatttttaattagccgggtgttgtgcctcctgcctgtagtgacagctacttgggaggctgaggctggaggttcgcttggg

SEQ ID NO: 62846 - DNA, 842 bp, Homo sapiens
tagttcaactcctcatcagcatctcccttgggcaccttcctcctcagtacttgttcctgttgtcaatacacgtttatttgggcaagtgtttaataatcgactctcttgtcgtctgcagaaccctcagcatctcatacagggcctgccacttagtagggaggcaacttggtttttttatgtttttgagacagggtcttgctctgttgcccaggctggagagcagtggtgcaaccacagctcactgcagccttgacctcccaggctcatgcagtcctcccacctgagcctcccaactagctgggactacaggcatgcaccagcatgcccgactaacttttgtattttttggtagagacggggttttgccatgttgctcaggctggtctcaaactcctggactcacgcaatctgcctgccttggcttcccaaagtgctgggattacaggcttgagccactgtgcccagtcaaggtttgttcaatgagagaacaaaaggataaatgcacaaaggtctctgcattcacgacacggttaggcacactgggataaagtccaggcttagccactcccagggcccagcctgggtgaggcatgtggtctctttgaacttcactgtttgtcttttgtaacacggagtgatcacagtagctcctgctttattggttttttgttttttgtttttgagagagagagttttgctcttgtcatacacgctgaagtgcaatgattcgatctcagcttactgcaacttccacctcccggggttcaagcaattctcctgcctcagcctcctgaatagctgggattacaggcgtgcaccaccatacccagctaatttttgta

SEQ ID NO: 62847 - DNA, 2117 bp, Homo sapiens
gtatcaaaatgcccaactagtgttagctattagccctgtgcacatatatacataaatggagagacagaaagagagagagagagattgtaaggatgtgctccaaactgtagatagtggaagctcgtgaaaagggactccacattttgctaaaatccagattgctaaaatctttcacaataaacatagattcatgtattacttgggtgatatttttaatactctccacttccaaatccccaaccatgatgtcagttaacatttttccttctgtggaatattctcattctgtgtgagacagggcagagtctagcatgatcattgtgcagctggagaaaggtaagctgctggaggttaagccatttgtccaccttcagccttagaccccctggtcagcctggcctggcacacagaaccttgttttcccccaactccactccatcccatctctaccatggggttcagtcctcagttgcctttatgactttaaagtgtgtttcttccttctttaggctgtgcaaagagctctcactcaaaatgtctcacgcctttctcttgccaaccctagcaagtagacaatattatgacctcatttttcagatgaggacactgaggcacagagttgtatagtagtgtgcctacggtcacacagctaataaggggcagagctgggcttcaaagtcacttctttctgatgtcaaggcttgtgttctttcaaaatttaatcagtcatatatgcccacagttctttcaaaatttaaataagtcaggtgtgcacacagttactgcaggtgcccatccatccaagaaaacctcctagcaggaagcccctgcaaggcaggagcctctctgctgccagtgctgtgatcttgcaacagtcttggagtcttgcctccagatctgcagggctctctggggagtgctggcctggacccacatccaagcttgtgtctgggtcagactgtcccagccaatagggcagtctggaaggtcaaataagaagggagccagggactatgttgagcgcctggccgctctcccagcaacaagctctgggagagcaagagccggaggtctgaatgagtcagcatagtgggaagtggaaatgatgactcagctctgggccctgattttcctcttctttgtctaagagatgagtcatcgcctttatgcctttaattttcagacttcaaactcatcccagcaatgtagaggaagctgatgagggaaagctccctgcagcgtgggctgtgcccccaggagcccctgagtttaaattcagtctctgctacttactaatcacaggatgttggcaaatcgctgagcctgcatccccccatctgtcaaatgggggtgctaaggcctacctggcaagattccttcatctgatcagtgccaggcgctggggagatgatagtaaatgacacagacaaaattcctgcccccacaaagcttacattctggcgaggaaagacaataatgaacaaatctatatgtacaacgtaaggccagctggtggggagcatggtgaagaaaaattaaacgggtgaggtgtagaagtaagaggaggtaagaggattgaatgagaaagtccctctagagagtctggcacagggccttacacaggctagggcttcaataaataagcacaaattgtcctctttgtggtttaggaattaaagggcacatggctgttaggactgaacagacctccgctccctggaggagatgcaaggtggatgatcccacaatgagttccagcactgggccaaggattccaggtccagggcagtgagaaaaaagacactcagcttttatatatgtgtgtgtgtgtatatatatatatatatataatatgtatacatattatatatatatataaaatatgtgtgcgtgtgtgtatatatatatagaatgggtgcattatatatacaatacacatatataatatatatcatatgtatacatctcttatacatatgatatatcatatgtataatatgtgtgtgtgtgtgtatatatatagaatgggcgcagtggctcatgcatgcctgcaatcccagccctttgggaggctgaagtgggaggatcccttgagatcagaagtttgaggccagcct

SEQ ID NO: 62848 - DNA, 3524 bp, Homo sapiens
gcgcaaggtacaagccaagtaggggattgtgtgagaggcgccagggccagatcctgcaggggtttgcaggccgcggtgagggggtcagattttcttccaaagccgccttgctctgtgcaagcgcactatcgcaggctgcgggcgacgctgcctctggccggcgccctccgccgctccaggccggatggtgcctcccgtgggcatgtaggtggggatggtgggttttgcctctgtgcggtcaccgcctgtctgcgttgctgccttctccggggcctcagaccctggagaaagccccgacaggggaggggggcgcgcagccgcaggggcgtccagctatcgcgcactgcggggggagtaggggcgggcgcagcgctcggcaccgccacgcgggttcgggccggggaaggcaggggccggtacgtgacgcggggcatgcacgtggcctgggagtgtgcttttcgggacaggtgcgggggccgccgcgcgcgcaaaggcgcagacgcacgcgtgcgggcaccgggcaccgtcggccgtcgggttatccttggctccgcgggcggccgccgaggtcctgtccacccggaaggcgcgacgtcctcgggggacgccagggcgcaggggcaactgagccgacttcgcaactcggaagtttttctttggctgtgatggtcgatttgcccgtctaagaaatgggactctgggccgggcgcggtggctcaagcctgtaatcccagcgccctgggaggctggaagatcgcctgaggccagcagtctagacctcgacaacgtagcaagaccccgtctcaaaaaaaaaaaaaaaaaagggggagtactcaaaagaataggaaagcgctttgcaaacttggacacgagttgggcgttttattcactttctctactaccctcctccctttgggagccccaggggctggagtaagcacgctaccacccactatacctctcagtgcccgcggcacaggagccgcactcgactttgcatccccccagggcctgtacacgccggaaaagctcccgcggggtgcggtcgctgggcctcgtcacgtgatccccactcaacgcccctgagcgggggggggagcagcgagcaagtgcgcatgcgcatcccttctagctcttcccctccaccccccacccgcccccttggctcggacgcaaccactgtcagctcctccccctcctcctccttcatccttcctgacattcactcccttcccccagccaattggttacgtcaggcagacaggccgaagaaccaatcacgacgctgtgctcagaagccgccacgcggaaccggccggatccgactaataggggcccttggagcggccacgcctcaaccgggcagggtagcttgggcccagtgggcggtgcttctcctgtcagcatgtgggcggggtagggcggggaccagcagccgcagagccgtcctcggcggtggcgacgacgacgacgttgctcagtcttggggtgggctccgcggtgcaggccgagctgcgcggagggctcggcgatcagcggcggcggcggcagtggggaggccgcagcgccatgggggggcgttagacaggctgcggcggccgaggcgaggggcggcagcggttatctggtccgcggcgaccttcggccgggcccgggggtgggaaggcctggggcgggggtcgtccctggttgcacggggccgcggggcggggctcgccggccgtcggggtgcaggaggcctgggccgctgaaaggagaaggcgccgtcggtcgccaggccctgccgccgggccgcttgacgacgacgctcccgcgggggccccgcctgaggaggacgcggcggcggtggcggcgaggccgcgggaggccgcggaggatggaggagcggaaggaggagggcgaggccgagatccaggagcacgggcccgagcactggttctccaagtgggagcggcagtgcctggccgaggccgaacaggacgagcagctgccccccgagctgcaggaggaggcggcggccgccgcgcagcccgagcacaagcagcagaagctgtggcacctcttccagaactcggccaccgccgtggcccagctctacaaaggtgaggccgccgccgccatcttggtaccgcttggccgcccccgcccgggcccggccccggccctatcggctcagcggccgcttcggggggccgcgacggcggcggcctcggggatcccggccggtggctccgcggccctgccgccccctccccgcaagatggcgccgcgggagggaggcccggggttggggggacaggccagagccggcgtgggggtagccccgctttggggtggtccgagggtccccgctctccgggcccggccacccggtgtccccctcggcccggagacgggagaggaggagcccccgtcacaaaatggcgaagggagacggcggggcggccccattgtgccctgagccggcctcggggcggggactgccagggggggcgcttccctgcgccgcggctcgtccctgatctgtgcccctgagctctgcggcatccccttttccccgccgcgacctccctgcccccccggtcctcacactgggtttgggatcccgaaacccctgaacaaaatggcgaaacctaatatggccgttccggagtgattgacgcgcaaataacattcttgttctctttctttctctttctatgtgtgtttcttttttctttttggttttttttttttttggcttgcttttcagaccgagtgtgtcagcagccaggactttctctctgggtccccttccaaaacgcagccaccgccgtcaccaatctctacaaaggtaaagataaccttgctgcattgccgattcagggaagggccgcctgcgtcagggtgtctgccctgcgttccaagtgtgttttctgctccccagcccagctgctaaccttgaataccttgcaacttgagaatcgcggcggtgctctagctagatccaccggaggcgattttgacacctccctccgccccccgggacagatggcaacgcctggggacgtttttggttggcttctcctagaaggggctgttgttgggcacccagtgtatagaggctgctgaaggtcctgcagtgcccaagataaccgccccggccccctctcagcgaagaattatcatgcccctaaagtcagtagtgctcaggttgagaagcgttgagctggaagacggctgagccttgcctccctctggaaaagacattgagggaagataagagttgatgttttttgtactacagtcggaagtgggacgaactttatggaaaagattcttgagttaggcatttgaaagcgtggcagtctatatagttttgaagtgcttgaaagcttgctaatcggagtcatctgcgcgcatgttaacgtgctgctcttctctagcaatttgatcaagtgttttctgttaaaaggatcctatatttgattataagttgctggcaggaattctgttgagagttttgagtccataggtttgtttta

SEQ ID NO: 62849 - DNA, 1384 bp, Homo sapiens
aatattatccccctggttcctggtcctttgttttgtgtgctaggtgaagattaagtaaatacataagtagctaggaggtgtgcttatttttggatgccacttccttagggaatacgattgggaacagttttattttggctgtgacttagattgttacattcctaaagaaacagtacattttctttactggttggagtgccagggctcacacctgtagtccagcacttgaggctgaggggagaggttctcttgagatcttgaggctaggagtttgagatcaggctgggcaacatagtgagaccctgcctctacccttcctcccaaaaaagaataaaatatttttctgtgtggtggactggctagtgcaaatttaattcttaagtttaaaaatcacgtagtcagtagtatttctttagaagtgttgctttgatgtagcattgtgctcttatggtttgtagattgtctgcaattgagagatggcttctcatttgaggaagagaggtcacagagggaactctgtcaatgaactttggacacaaggccctttgaacttcagttccttgttacaaacttgcgatacctgctctaattcacatgaatcaatgtgtatcaaaaagctataagtagagtaatctgattaattttatgcagttatgtaagaaagttatgatttggtcttcagaatcaatataattctttgccctctgcccccaccccagcccgttgtggtgggagaatttgtcttctaaaatctcttggattcagtttcccatgcttatataaaagcatttaaagaaaaaaaagggaaatatgggatacctgctatgactggtgtatgaatcagttcattttcttttttttttctttttttgagatggagtcttgcgtgtcacccagcctggagtgccatggtgcaatcttggctcattgcaacctctgcttcccaggctcaagtgactcttctgcctcagcctcccaagtagctgggattagaggtgcctgccaccatgcctggctaatttttatattttgagatgaggtttcaccatgttggccacgctgatctcgaactcctggcttcaagtgatccacccaccttgacctcccaaagtgctgggattacacggatgagccactgtgccatgcccgcccagttccttttttgaataaggaaatgaatgtgttgtggttaaaggttagattgacatttcagtgcttgtggagtttgcctaaccttcaagtatgtggctctttttcacagtgactttggtttctgtaaaatagtgttggacgcaagactggccacagcttctgtgctgtttttctgggataggtacccgaaagtccacgcttctagaattggggtgtgctcagagcagtgttt

SEQ ID NO: 62850 - DNA, 773 bp, Homo sapiens
catcttaaacacgacattgacactgcaagtgcttggatgtcctggcacctcagaacacaactttgtgcaaaaggagtgctgtgcatctgaatagtgcaattcatttccaatgcaagaatgccagtttcttagggcccccggtcaggatattacccacttggtttaagttgtgatttcaaatcccattttctatgggagatacactggtggaacaaatctgcagagggccctgcacctgcgctggtggatcaacggtgtcttctcacctccagggctagctgccttgccttccctcgtggggcttaagtggctgggaagcagatagacagtgtagatgaagtcctgggccactggctgctggactgaggcagtgagatgactgggctggcatttgttctttctctgcctgtgtgtgacctctaactatgtgcctggaaactgaattacatgtaattaatgctgcaaacaggattttcttattgcctaagcatgaacttggtatgaaaataatagttaataatttactatgtaacttggattcttataacctggactgtaagtttgttttagctccagtgggagtttccttttcaaagtatgatgaaaccatcctcatcttttctacccctggactaatcatttaaaatggatacagacactttaaaactgctgagtttatcttgtgttaagcaattaagacttctctgtctaatcatgctacttgttctgcttttgtcaattgatactctcatagcccttttgaaaaagtatgt

SEQ ID NO: 62851 - DNA, 1162 bp, Homo sapiens
gaggcaggctggccctaggaccaacctgaagccacctttttgctaaaatactctaggcttggaagaggatcagaataactgaataggaatatagattacacttgggtgggagtgccagctcttgtttactacctgttgaccttggatgaattaacttttaaacttgggttttcacctgcagaatggagatattataggtgtcataggaagtaattgacatagtacctgacacaggaagtattctcatgttaatgcttctattttttaataggtgctagccttggaaaggttgagaggctgaagagggacagtttgatttcctctgaccaccagcaggaggggaggatgtgtcttctgcagggagagcagccagggggattggttggatcagtgcagaaaggaatgggggcacctagagtgcggagttgagcacctcagaagggaggtgtggccctcaggacattgtcagcatgtgcgatgatagtggaggccatggatttgagaacatttcagagaatatttgatggaggggaacgccaaggggaatgtaatagatttgtgataggaggcagagacttttcaacttaaaattcaaatttaaactacatttttagggagttcatgattagaaagaatgggcccctgtcaaatgaaacctctaagcttacttgaaaatcttataagtcctattctttgaaaattaattgatagtcaagcaataacagatccctaggtgaggagagaatagtggaaggggaaattcctaaggcagaagatcactgccagtgacggtaggtttttaaaaatgcaacactgtgtttggtgtttcctggcctgactcatacctttcacaggtttatcctgaatgtttaggagtggaatgtaagtttggctctttaactgtgtaagagtttaaggaaaggaataagtatccatgagtgctgggtatattctggattcagtaaagtaactcttttgtttttgagacggagtttcgctcttgtcacccaggatggagtgcagtctcggttctttgcaaccaccgcctcccgggttcaagcgattctcctccttagcctcccgagtagctgggattacaggcgcctgccaccacgccgggctaatttttgtattttttagtagagacgagttttcaccatgt

SEQ ID NO: 62852 - DNA, 793 bp, Homo sapiens
ctttggcacattccgcagagggaatgttgcttttgctcctttgcagattgttaactgggtgggtggctagtggcactgggctccttggggccagccctgcggctgaggacagatggggctgtcagaggactcagcccctactcttgggccgcctgccacccaccctcagtcccttgggctttggggaagtcagcacagtcagtgcgttcctctgggccagggtgtttgactggcttggtaggaggaagttggcacccacagggcccagggcgtggtgagtcatggctcaccagggatgacccagcaggtgtgccttggcgacaactccctgaagctggaagctggtggggctttgtcttctggagggaggtttaatttacagatttctggattccccacctggacacacatgctgaatccaaaggtctgggtaggacatggtatctcaaaaaaacaaagcaaattaaagaattaaaaatgggttctggccaggtgtggtggctcacgcctgtaatcacagcactttgggaggctgaggcaggtggatcacttgaggtcaggagttcaagacctgtgtccaacatggcaaaacctcatcgctactaaaaatacaaaaaaaaaaaaaagttctaagtcctactacttgtttatctctttacctctgtttacacttggggttagaactacttgggggaggggggaaatggtataggaaggtacaggtgaagtcttctggagggtctcctgctcccagatgtcacctgcaggtgagcctggagtcgccgcagcctct

SEQ ID NO: 62853 - DNA, 1166 bp, Homo sapiens
gcctcccaaaatgctgggattacagatgtgagccactgcacctggccctaatttttgtattttttagtagagacggggtttcaccgtgttggccaggctggtcttgaactcctgacctcaggtgatccacctgccttggcctcccaaagtgctgggattacaggtgtgagccaccgtgcctggccaacaacctcttgttttaagggcctggctttgcccggtcagtgacccaaagatgcccgtgaaagctgtttgaccctggttgactcagatgaacctgggctgagttagagaccttcccctcagtcacacaccattcaatgatgtcagcaaatgctgaaataatctttccccacccacagagccatgcacctacaaaggcctgacccccacgggggcatctgaggtcagcctcgagccccctaaggctgggaaccctgtattttcctgtggtgactcacttcctgttggggccttggtttttgaaagacagaaacagctcagagtctgctccatggaaatggctgggcctgcccaccagacccttaaagcgacagttttcccacggcagggcttgtcctgggaggtccctggtggcgaatggggtgctgacaaacgggcccagaacttcttgagtcaggatttgaagcgaggggggtctgctgccagattccacagctcagacacgtcctcttttccccacccggattttcagttcccctgaggaaccacctctccgtctccgagtgcccagtctggttcactgagccatttgtgcccagaaggacctgtagtgctgggcatttacttgctaaccttgtttaactcactgccctgtctgggctccgctgccttttgtctcaaactgggtgataaaaccccaagttaattgtgaaaatgcatcctgtttgcttggggtggtgcattcagatgctggcagcctgagaccacagcgattcgcagagtgcacatctgtttaaggacacttgaacctgtgtatttaaaaacagaccaggttgacccaccaagcacatctgtggacagggctgtctttggcttctcttgggtcaggacacctgggaaaatgggcaggtacgcttccatgctccttcggaaacagctctctgggcctcactatccccatctctaaaatgggctccctcgcc

SEQ ID NO: 62854 - DNA, 452 bp, Homo sapiens
ccccaggcattcctttgtagcaacacaaaaggactaagacagggattgatgagtcagtggccaaatgcatatgtaaatttcctatatattgccaaattcccccttatgggaatggtacaattttacattcccaccaataatagctgagaaggcctgtttcctcctgacctacaacaataggttgtgaaactttggggtgtttgccaactgaataggggcagagttcccttaactagcctttgctcctgcctgacactctgttctgtccatggcaggcagagaactctttggtaatatcaacaagatcatagcattctcttgtctaaaaacctgattgcttccaatgtgaaaatccagccctctcactctggcattaagaccctacaacacctagctccttcctacttctttgacctcatcttgtttctctccccttggtccactctgtgctg

SEQ ID NO: 62855 - DNA, 1867 bp, Homo sapiens
cctgcctcatggctggtccttcccctgcgaggaatggatgagtgacagatggaggtttcttaggtggtgtctggctcatagcaagggctcaaatgttagctccttttgctattttctcagtatctccagtgactagtgtgttttagtcactcaaccaaatggtagcacagtgatcctcactgtcctcgtttaggtgacaacagacgttagaggaatgagttcatggtctcgattttcaaagtgtggtcctgggctggcagcatcggcaccactgggctcttgttggaattgcaaggtctgggcctctagttcagcctgctgcagcagaatcttacttaacagcctctctagggggtttgcgacacattgaggtttgaggagtgctgctctgaagctccttctggctcccgaatgcagggattcaccccagcctggggtgagctctgtctctcagattcatatctttgggaacaacagcagccagtccagccctgcattttaaccttttactcttgcttttcccaaatgttgtctccagatgcctctgcgcttgggtgtgttggggtgggagggtggggcgatggggagtcgatggggggcctcatgctgccgcagattcggattttgctgggctcaacatgctttccctgagcttccagatccagatcctcactccccaagatcctgccagcttccctgtctttgcctacagcatcctcttcatcaccccagtgaccagaaaatgcactgtttccaaccaacccctccttttccctcactaccttggccaccaaagcatctcttgcaccccagtttttctctttgggtgccgctgctctggctcttggttgtctagaactttgggagccaccccaaatctcctaaaggtccccctgaccccacttctcctcccccagctcctgatcttatctcacacatttctgtctgatggagtcctccaagctgacccttgcactttaatgtccaacatagagcttcccactgctgattcaaggtctgccctcccttgcgtggtagccaaggccttctgtgatctcctaacgacctccaagttacctttgcggcttcatctccagctttttcctctcttattctagatcaggggccttcgggccaaatctggtttgcagcctgcttttgtagatagtttgattggaatccagccacccatgtgtttactgattgtctatgtctgctttcacagtatcagggcagagtcgaattgtttcaacagagactgcatggcccacaaggcctgaaatgtttactctctggctctgtgcagagaaagagtgctgaccagatctagatccagccaaatggcaccatgcacttggtccctcacacacatcctggcctttaccataacctggtttggccctggggggtctgtcgatttgcaaagtcctggctcatttctgcccatagtaatttttccccacctggaaggtccacctccagtgccaccgaatttggcattctttcagcaaacatttatggaaatctggcaggtgcctggcatgttgtgtgctggggagaggtccttgctctcagggagctggtgctggagttgctgacctggcccccgttcagaagcacctctagaacttcatcgtgagagctcttggcctttcattttattattgtcatgtcttattggccttgaggccaggtgcctgcctcctatttctgtagcacttggcacaatgcccagcacacagggaaggtcattatagtccattggaataaatgaatgaatctctcttctccccagagtccttgtccgggttatcatgctgggggctggattccacctcccctgtgcttccagctgtttctggaatcc

SEQ ID NO: 62856 - DNA, 968 bp, Homo sapiens
tctacttttctgtgcagctgtgagctgactccagcacattctgttaaacctcttacactaactctgccttattagtcagtggcttcccgatgtggtgctgagaaagattctgaggctgtgtctgggaacagaggaagggggtaattaaattcattatggctgtctgccatggctgatggaggagagatggcacatatatgtagggacttattatccctggatttatgagactgtatgcaaaagtcctttcagggtttgacacccagtaggcattcaaccaatggtacatattgcaactgggtgaagtgacaaggatcgtttcttgtttttcatacattggcacttgctgaacacacaggcagcagttaactgtgccaagggttgataagtgccaccgaagcacaaggcagtgtggtgtaaaggacaaaggttgggctttatgacctgggctggtattctagcccattggtcatgcgaccttgggaaaaatggctcatcctctctgatactcagttttctcacccacaaaaaggagacattactggagagattgaatattacatccattaaaatgaagcgtgggagctatcgctggtgtgttttgtaagtggcggtttcctttcccctgttcactttgaagctgcaagtggattgttgacccgtggccaactcagtgccataaaccctgaaaatcctggtgatgatttccaagcagcagtaaaactcagaatcactcacacgacttcttgtcccacttaaaattttccctgagttattcttttccttttgcaaatagaaacaagaatacaatggaaaaaagtgctacctacccaaactctgcaggtaaatatccataagtagttcaagcctaggaacggccttcaatgacggacagggcggttttgtttttgtcacatgccgggttcattataatccttggaaaagcaggttcccagagaaatgctgat

SEQ ID NO: 62857 - DNA, 2054 bp, Homo sapiens
ccctcacctcccagacggggtggccaggcagaggcgcccctcacctcccagggggagtggctgggcagaggcgcccctcgcctcccagacagggcagcaacacaatggctcttgtagagttttagaagtactgccttggtcatcttgggtaagatctgagagaattccttggattaccaggaagagactcttgttcctttcctttactttccccccaaacaaacagggtctctctctgctgagctgtctggagctgggagaggggtgacacaagcactcctgtgaccaccaccactggggctgtgctgggtcatacctgaaaacaacatagcactgggtctcacccaaggtctgtggtgactactgcctggctactgctgatgttcactcaaggcccaagggcttttcagtcagcaggtggtgagtccagccaggcctgtgtcctttcttttagggaggtgagctcctctgctggcccacagcaggtccaggaatgctgtccaggagccagggcttggagttgggaaccttaggaatctacctggtgctttattccactgtggctgagctggcacccaggccataagataaagcccttcccactcttccctcttctttccttaagcagaaggactccccttggccaccactgccccaggctcctggtgagtactgcctgactaccaccattgttcaatcaaggcccaagggcccttcagtcagcttgtggtgaatgctgtcaggcctaggtctctcctttcaggacagtgggctcctccctggcctagggccaggtccagaaatgccatcaaagacaaagcctggaaatggggactccaatagcttgcttggtgttctaccacaccgtggccacgctggtgcccaagttacaagaccaagtcccctttattctctcttctcctttgctcaagcagaaggagtctctacccatggccaccaaagctgggaatgtggtgagtcacacctgaagccagcatggccctggatcgcatccaagtcccgtggcaagtacctggcttgcctggctaccgttgctgattatgccggggccatgggccctttagtcagcaggtgatgaatcctgttaggattgtatccttcccttcaaggcagcaggttcccttctggcccagggtgtgtctagaaatgttgtctaggagctagggcctaaaataggggcctcaggactctgcccagtgtcctatcctactgtggctgagctggtattcaagttgaaagacaaggtcctaaaataggggcctcaggactctgcccagtgtcctgtcctactgtggctgagctggtgttgaagttgtaagacacggtcctctttgtctcccagctggtatctcactaggtcacatataccccaagtgcactggctctgagcccagcatagcaccaggacttgcccaggaattgcagtccttgtggcctggacttcctttcaagtctgtgtaggaacctagagccctttagccagcagtagtggggctagctggaactgaagtcctggctgctgtgatggacaatgtgtctctggctagggttgatctaaatccttcctctgggggcactggctgagttctgccctgtgttgctcttcatggtgacaggacagcactgagttccaatgcacagccccacaatcactgcactctgtcttccccaaacacacaaatcttctctccacaccacagtgcagctgctgggggttgggagaggagtggtgtaagcaatttgagaatgtcttttctaccctcttcagtgtctctttccttaatatgatgtgaaaaccaggtattgtgatagctcccttgtttttggttttaatgaagatgctttcttgtgtggataattgttcaatttggtgtttcattgggaggttggagggtggggaatggtcactggggacttctatttgtccatattgctccctggagcacatttttacatgatggtcattactggaaaaatgtaatatggcagcccacctccagtagtgctatttttataaaagtgaaaaaatagag

SEQ ID NO: 62858 - DNA, 2574 bp, Homo sapiens
tcttctatatgcccattaagtggtgtcctgtctcatcttgaatactgccagtgacagggaagtcactcctcattccattccagttcagctctggcaatgagaaaattcactttttagttttgtatttttatttatttatttgtttgtttgtttgtttgtttttgaaacggagtttcaaaactcttgtctcccaggctggagtgcaatggtgctatcttggctcactgcaacctctgcttcctgggttcaagtgattctcctgcctcagcctcccaagtagctgggattacaggcacccgccactacacctggccaatttttttagagagacagggtttcaccatgttggccaggctggtcttgaactcttgacctcaggtgatctgcccgcctcggcatcccaaagtgctgggattacaggcgtgagctgccacatccggctgaaaattcactttttaaatgccaagataaacttacctccttgtagctccctcttactggatctaattgtgctccccagtggcctcacaaagtatgtcttgtctgtcttctacctaagtgtcctctgaacatttgaaaagagtgctcaaattcctaacagtctctctctttctctctctctttttttccctttaagctaaaggaaaacagtttctcaacctttctgtttgctctcctaccaacaatttcccatagtctttatctcttttgaaatggtggccttgactgcaggtgtgtgatctcaccagtaggaaccaggcttggcatgtcacctcctttcccttgaacaatgcacctctattgatgcaacctgaggtaacattagtctttaaaatttttttatttttagttttctggcagttccactttacactgctagctagtgtttagcttaacattgatgaaaaatccttaagtcagcggctgaggagccaaatgctgtcacaggcaagacaggtaaggcaaataagtgaaacattctgggtgaggcttgttgtgacataaagagttcatgcccttttcatagtgggcagcagctcgcagctctagcagattgttgctatgcagagtgtaggctcagtgttaaaaattagaagcttccacataaaaatccagactacaacttctttaaaaaaaaaaaaaaagaacccagagatctggcaaccttgtgttcatattccagcatagctggagatgagttgtggttgccagaaacccttgggcaatcctgcagaagaagccaagagggcacagggccaccttccatgtgacagtgctgatctaatccatgagcaaacagcgtggaccaaaacagtccccaggagaggctggtgcaggaaggctcagacactgtgttctctgacataatttatgtaagttataatagggggagaggctcagtctgggttgttctggagtctcagcatcttgcactttattatgagaaattttgcaagcttattactttgtagtaataactatgttctggcagagaatggaaggggagatgtgataaacaaatgtatgaaatatatgctacagaattagggagagagaagggccaggatagaaggtaaaacaggaagagggaagaagactagaggtgaggatggggtggggagacctgatttagatacagaggttagggcatctgacttatagctagaggtctgattggagggagtgaatatgagtatttaggcagtagagccaggcgtggtggtgcacacctgcaatttcagtgcttttaggaggctgaggatcgctgggggccaggaggtcaaggctgcagtgagctgtgaatgaaccactgcactccatcctgggtgacagagcaataccttatctcttaaaaaaaaaaaaaaagcatgtttaggcagcaggtgcgaaggccctgaggtcagcatgctcttggtgtatttgcaggccgtgaggaaccttgaccacaaagcatggtgaggaatggggtggtgctggcacatgaggtgggaggagagggcaggggccatgtccagtaggatctgggtgcttgtggtgaggagtgtgatgtgaggtccttggcaaggttgggcagcagcagaagataatctaacactctgtcttttgcgtgtaaaataacatacagatacacatggaagggaaagatgggtcaggagctaccgtgatgtgtccaggtgagaggtgatggtggcctggaccaggtgtggaggtgggggtggagagacatggttggattctggatgttgacttgctgatacgtgggacctgggataccaaagagagagaaggaagagttgagaatgactgcaagacttttggcccgaataactggatggaggagaaataacagatgaggaagactgtgggaagagcagatttgggggctatgggcattttggggggcagcgggggactgaattggggaatttagagacaaggaaatgtggtcctgggacatcatcactgacagttgggtattgcagagggagaaagagtgactcagatatgtccctggatgtcagttacagacttgtatcagtttcctgttggtgctgtaacaagtcaccacaatct

SEQ ID NO: 62859 - DNA, 874 bp, Homo sapiens
gcaggtgcctgacctctccccctagactggttcaggctatccttttagggatctccagttttgaccagtgccccagttgctgctggtgcaaatcgtccctggccccacctggggaaccgccagactagagtctggtctggagctggagtcccctcctttgtttaatgctggcttcgagaacacaggagatgaattatgcaggtctgtggagactttcaggaagacctcagccaccttgttaattggagctcaacagaaccgagattggaggttggaataaaaatagctgcatgcaggttgaaaggtaaaattagctttggtgtcaggaatttggtttcaaggttgtgcgggagatggggtgaggagtcaaggaactgcatgtttgtgttctagtgtttgtgtgggtcatttggagcagctgaggggtagctcacacagaaatccgaacaatgaggtcatactaacatcctgcatttgtttcccagggctgctgtaacaatgaccacaaactgggtggcttgcatcatcggaaatgtatttgctcacagcttgggaggccagaagttcaaaagaagggttgggcaaggccatgttctttctgaaggccgtaggggagaattggtcctgtgccttcctcttagttttggtgttgcaggcaatccttggtgttccttggcttaaggatgcgtcactccagtctccaccatggtgtgattattgggtgtttgtgtctgtgtccaaattttgcattttcctagggacaccgtcctatcagattagagctcaccccaatgaccttatcttaatttgatgtcatttgcaaaaagcctatttccaaataaggtcatattcacaagtcctgggtgttagggct

SEQ ID NO: 62860 - DNA, 740 bp, Homo sapiens
agttgcctatatccatggatgaaaaatagttgagtctgtatttgaaccccggcagttcaggttcaaaatctgtactctatggactctggttatgtcctaaaatctactgcttgccaccctcaagggaagacataatgtttgcagcaaatgatataattcctacaggctttgctttgcaaaatacaacgatgacagaactatccagcagaattcggttcccgtgagcctttgttcaccagatgctatttttgtgccagttaagagtagagctacaaaaactggcgtcatagaacccgacaattagaagaaaattttggcattcatccctttaactaccagcttccgagctcatgctgtggcagccagaacatggaccttggagtctgattggcttgatttcaaattccagctctgccactcaaaagctgtgtgaccttggacatgcaatatcagccctctgaaccttggttttatcacccgcaaaagacaggtggttctaatgaggtcaaacatgcaaagtgctttgcacaatacctagcacatagtaggcactcaacaattactagtttctggatactatgctcttccatctcagttctgaagtcaaccataagtaaattttttttataaaaattatctcattttacatataaggcagacgttaaagggatgtggaaaattcttttgaagatttcataacctttatttctaggtttggtgccaaagaagtaaacctcagt

SEQ ID NO: 62861 - DNA, 586 bp, Homo sapiens
atgaacatgccagagaactaatgccccaggagtaatgctcaatggatgagggatgggagtttggtggatgagtagtccagcttccccacccttgggtgggacagttctgggtgtgtcccagatgaagccctacttgcccaatggcaacccatgtgtgaatgcaccctctgttggctttcccatttccccgtctcatgtctcactttcccactggtgctaactgagatcatcctccaactaaaggacttgcacccaggttctgtctcaggcttaaatcatgttctcatagttgaagggcaaccaatggctgggatgaatgtaatgtaaacaagacagacaagacagcccatccttgtggcttgtgagtcatggacctttgggatttccaggacttctgagaatggacctggatggcattcaggctcacaggtgactggcctgcactgcatggggctctgtgggagtctccattaccaagaaccccaggagataatttcagaatctgaggcaagcaagtgtggtggttagtgcagagaatggacttgaatgtctgggtgtaagtcctgactctcttgtgtgattctga

SEQ ID NO: 62862 - DNA, 1483 bp, Homo sapiens
cgaatattttgtagggtgttttacatgcatttttgggtagttcccaaacatggtgactgccgtaattattagggaacttaaaaaatgtttcttttctctaggagccacctatagcctcctcaatcagttattaggagtagaagtgaaaacagggatcagcatttgagttgtagtttgacccatgtgctaggggggtcccaggaaacttgggaaggggaaggagatattcccttcttctattctcaggaaccatgatcacatttttctggcttctcagaaattcttggaggttgtgtgtatttcctcaaatgatgggccactggaaagctaacctcacgttatcatgatttactgaatgttgagtctaattctggcaactcccaatgcatttcacggaaaggatcgttacggtaaacacagaatgtgtcacatattttgcacaatattttccccagtagccttcaattggctcaatttggagaggtcgttctccagtggggaagaaggaataacaaaaggagcatttttggagcatttattaacagtataggctaggctttttttctatgtattttatatgtgtctattcatttaatgcccttgataatccactgaaagaggtgtcattattatcatcccattttacagaagaagaaactgaaacaagaaggtaagtgatttgcgtcaatgttacactgcaggggaaaggaaaccggggaagagagagacaggataatagctgcctgagttaggtgtaaatgtccttcatagagattcagaaaccttcccaagaccacacagctatgaatgccaggatttggactcaggctgtctggctcaagagtccatacacttacacactctgctggtgttctgtgtgtactcctgggctgttttgttcaatcacaaattggataacattattgagtccttatgacatgagaaatgttttgttgagtggactcgagccccaaggcctgcagtgtttcagtctgttttcccacattaccacagcaaggctgtttactcatcaaccttccatccccgttgagaatggagggggaggacgtgcagaggattcatgtttacggagcacactgcaccagggtctgggatacggtgctagatagttatatacgtcactttatttcatctttactgtcccatgaaactgttggtgctcataaggaggccagatactgaaacaaagtggaaatgaactgcccagaaaactgagatctgtctatttttcttcatattcttttttcttttttgcttggataattgcagtagcctgctacaccctctacctgcagttcaagcctgccactaatccgttctccatggggtggccagagcgattacaaatataaatgaactcaagttctgcagtctagttaatagtatcatgccaatgtcaatttgccacttctgtaagtcctacaagatgtcaccattggggaaaatgagtgaagggctgatg

SEQ ID NO: 62863 - DNA, 1706 bp, Homo sapiens
caaggaagattaaaacaacaaaaaacccctcaactcatccaaattcccatcagccctaaatagccatttaaccacgttctattttaaagagcatctttccagatatctttccagtgcttaaagaaacacacatctatataatttacataagtgggattacaagataccgaatgttccacactttgcctttttgctcagatgatggtgattttaatgaacaagtaaagcagaatcagcataggagaaatacgtcctctatcacagtgacacatgcaagcttgggggtctctgcctaaatgtaaaagctaaccccaggggacccaagagagaagtaaatgatctgtgctaattctcaggaccttactcataggactattggaccagagttcttccaaccaaatacctgtgcctcaaacaaacgtgctccctgctgccttctttctgtgaccattcaagcccaaatactacttatgtacggcatacgtgctgatcattttcttatccggaaaaatagcttccagaattactgcaggccatcaaagtctggaatcagagattaaaatgtggaggtaattggtgtctgggtatctcaggtggagcgtccgtgtattgcatcatttcaaagtttaaatagcaaaggtcaaaaatgatatgagggaggaatgtttatttaggtcagttcttggatttttctatctggtggaattcctctctgcactctgattacctcacatctgaaaaaaaataaatttgaaagtcctgattgtacttcagggaagaggcacttttactgtctcagggaggtcagctgatgtaaaaatttgaatagctaatatttattgccacttctcaggcatcaggcacttggaatgcattttgtatctcctacctaggacatccttggtggcaggtgatctcagtatccacattgcgtaggtgagggggctgagcttagagcaggcaggtaattttcccaggtcacccagctagcaagaggcaaagtcaggaatctggatctagccctgtctgagtcagagctgccctcctaactgccatgttgacacagtgtaggtgcactataaacacattttcctttctcttacccttacaatagggggcctttgataagggaaagcctcatgtcctcatgtctgattttttctatcccgagcatttatttattcacgcattcatttaataaatatttcttgccctccttctctgcaccagacattgtcctaggtactgtgcatacagcagcagaccaaacaaagccacttccctctcttgcttcatggcgcttactttgcagtgtggaaggtaggttatttgaaaacacaaacaaacaaacaaaaaacagagataaatatgtgctatgtcaggggtcacaggggaaaagtaaagcagagtatggaaggtagagagggacatgggtgtgtcctacagggtggtcagggaagaattttggaagagatggtagttgagtaggagcctgaaagagatgtgaaggtgaagcctgcaggtatttgaagaaagagcattccagggaagggcacgtgcaaaggccctggggcaggagcatgcctgagggccagagagagtgcagagggaaaagagaggattagagagagaagatgagctggaagagaaaataggaggtgttgatcagatcacatggggctttgtaggccattgtgaaggatgtg

SEQ ID NO: 62864 - DNA, 766 bp, Homo sapiens
ctgtggtggtgttctgggagcaccacccaggtggggatccctggctgggagtacacttgttcatgggtcatcagccctgaggattcccagccatatctgaacagccctgggcaggaagtgtgagatgggacaagagggagtggtgttcagcttattatggtagctaaggagacgcctaagggaactcgagtgacctacgtgaagtgtcaaggatagattttgacagttccatttatttattcaataacggcttatggaacatctgctatacaccaatagagggaggcagagagcatggtgaatgcaacattgcataatggtgttgggaaaagtgtcccgatttcaaggaagctgacagccagtctctgtcatttcctagctaggtaactttgagtaaattactcaacctctttagattttattttcctacagtgcaaaatcagggtaacaatagttgctgtcttttaaaatggttgcataactgaatgaaacaatgcatacaaattgcaaagctcagtgcctgagccacattataaaagatcaataaatgttagcggctgctgtcaccactactacaaaccctggatgctagatgctagggcagtggttctcaaccttggctgagtgaatgtcaaagttacctggggaacgcagtacactgttggtaggaatgtaaattagtgcaactgctatggaaaatagtgtggaggttcctcaaaaaactagaaatagatatatgatttgatccaggaatcccattgctggg

SEQ ID NO: 62865 - DNA, 990 bp, Homo sapiens
cttccaagacccaggaggtcccctaatcattttgccccatgtcttggctcacacccctggaaacactgggggaaagtcacctaccttgtttggggacacctttttagaggataactcttggtcctcaagcttagaagctgttatgaggaagacgttggggcttttcagaataacatccgaagattaccccacagataccttctcctctggaatcgctctcaacagtgtcaggcagagccccgggagcccacacatctttctctgtgttcttgtgaccatggaaatcaggcaggtctcaagaaacaaagtcacaaaggcatgagctcatcatctattttcataacactaatgcaagagacctccaacacaagcaaagcaaaggcaccgactgggtgcagccacatatcatgagtttccaggccattctgcctgagttgagatcattatgctgcttctttcattgcacaggaacgtgggggttttctctaaactatgactcatagcaaagcatacaggcaatcatgtagagaaacctgttctccccaggaaaggagggtgagcaaatgctaaaagttttgatactttaatatagcactggccttggctaattttacttaatatgaaagatttcaaataatggaaacactgacaggcaaaaacattaaaagtttgcataaaatctcaaaaaaccctgcaaacaagagagaagcatggtctaattaaaataaaggaaaagattgctactgggttcctgaatactcttttcacaaaggcttcacgtcagatgaacttcaagcaccaagcagcagggatcccactgaagtttattcagcgcccttctgggcactaccagctgtgaaactggtaacctattgacaaataggttatttttccagctgcacccatattcaagagcttgaccagcaaagtcccctgataatatttggccatgagtcagaatgtattaggcaccttctgtagccagagcca

SEQ ID NO: 62866 - DNA, 952 bp, Homo sapiens
agcagaagaaaaatggtcctcattaacatagtggagagtttaaaaaaaaaaagtgtacccagtgcaaaagctgggaaaaaaaaaaaagaatggagaaactcacaggcagagagggcagctcctgtgagaggtcccgggctgcggccagtaggtgaccaccaacgggaggcagtgactatatcaggatgccgaggggccccagggagatgcggctgaggttggagttggggcaggtgaaggggaaggactttgtggggtatctgaggaagatggagtttctcctgaggccaccaggaggcgccagacgtcaagcggggcggggggcggggacgggctcggtaactttcctctgctgaaaacagccctgagcagggttagcaaggattagccgtggcaataaagggcttataaggaaattaaaaggtctaatgagggccataaggatgatttataccctttctgtagcatgcctcttccttgtactagaattcatgtatgcctttgtcctgtctccctaatgaattgtggggtactcatagaactaaaacccgtgtaatgattagctgaagcagggtttctcaaccttggaactgttgacatttggggctggtaattctgtgttgtgggaggttgttctgtgcatgttagggtgtttagcagcgtccttggtttctactcacaagatgccaatgcacctccatctcaactagtgacaagcaaaaatgtctcctgacattgccagctgacccgtgggagcaaaatcaccctcagtggcaaaccattgggttaaaggggttctgcaggctctagcaggatccaaatctgggctctgccacttcccaagtaggtgatcttgggcagactacgtcactcctctatgcctccattttctcatgtatcaagaagggatttttaaaaagtattgacatcagcatcagtgtaagaatgaaac

SEQ ID NO: 62867 - DNA, 680 bp, Homo sapiens
cagtggcccatgcctgtaatcccagcactttggaaggtggagacgggaggatcgcttgagcccaggaatccaagaccagcctgagcaacacagccacagcaacatctcgtttctatttaatacagaaagaaaaagaatctcaagatcgtgaactcagaacactaaaccaagtgaggggcctttttgagcatgggccctgtgtagctgatagagaccctaccttatctttctgcattaaactgttcagcactttcgtgtttgcctgggtaagagatctttcacttttcacctggaacacggagccctgttctttggtgtctgtgtccccgatggtgccctcacactttgcacttgaataaactctttcaactagatcctgagcctttgatcattttaggttgacaaaaacctaacacagcctgacctctatggtttgaagagctcagagtatgtgtgagtggataaaaaaactctttattttgtttgagacagtgtctcatttcatcacccaggctgaagtgcagtggcgcaatctcagctcactgcaacctctctctcccgggttaaagcaattcttgtgccttagcctactaactagctgggattacaggtgtgcaccaccacacccagctaatttttttggtgtgatcatggttcactgcagccttgaactcctgggc

SEQ ID NO: 62868 - DNA, 1178 bp, Homo sapiens
aaaaaaaaaaggctgtgaagttgggctcgaaacagtagaaatcagagcagctctacagccctatttttatttcaaactttatattaccatcctcagaatgtattgccctgagctgttgacaaagattctctccttgaccaaactttactcaggctcctctgaaccctcttcctaacttggccttgacctttggacttccttgtttgtctttgcatctcccagttttagcaaattttctgtcatgttgatttagccagaatccccacatgctatagctgacaatcctcaaatacttaatcaaagtcttcttccccacaacccccaggtgatgtctgaccaccctagcttggctttagcaagaatcctgttaggtcatttttagcaagaattcctctatcctctaattaatagtacttttccatccactaatccttcccaccacaaccctgccctttggctataaacccccatttttccttgttgtatttgaaagtgatcccaatctcgttctcctactgcaaaaccccattgcagtggtttcttggacaaagacttttgcactgttctttaacaagggtcagaatatcttctcctggggaattgctttaacctgggtggcggaggttcaagtgagccaagattgcgccactgcactccagcctgggcatcagagtgaaactccgtctcaaaaaaaaaaaaaaagaaaaaatattttctcttggggtgagtcatatgtccacacatggccaaggaaactgccaaaaaggctgtgtactatgggtatgatccctagagggaaagtgggatgcaatgactgaaaacaaagtagggaggtgagaaacaccaacacatctacagtaaaaatggcatccgtagaatgatggtttgggagtgaatccaaccaggatatccctaccctcctttccacgctctgatttgaagagaagttgggcttactggtaattaatcaacttatttaatcaatacttgtctctactatgaatttgtaatttagttttcctaatgatgtgtcagcaattttgagtcatgtctgacctatgagtgctcagaaagtacactgaaagtcaaatggatggttaggctttcacccaggccttggatgagttttatgagtgttaagatgtcatggaaggatgtagttttgcctttccagaaca

SEQ ID NO: 62869 - DNA, 1152 bp, Homo sapiens
acttgatcccaggaagcagaggttgcagtgagccaagatcgcgccactgcacttcagcccaggcaacagagtgagaccctttctaaaaaaaaaaaaaaaaaaaaaaaatccaattgggaccccaccttacatttagttatgtcttcttggtctcctccaatgtgtgacagtttctccgtcttcctttattcctcaccactttgacacttttgagaaatattgatcttttattttgtagactgtcccttaacttggtgtttcctcatgactagactgaggttgttaaacatttactagcacaccacaggccgttggtttgcatgagaatgaaacaacaactagggtttctctttatatatattttatatttgatgctcccaaagtgctaggatcagccaggcgcgatggctcatccctgtaatcccagtgctttgggaggccaaggtggaaagatcacccaagcccagaagttcaaggccagcctgggcaatttagtgagattccatctcttcaaaaaatttaaatattagcctgcagggtgtgaacctgtagtcccagctactcaggaggctgaggaaagaagatcccttgagtccaggaggccaaggctgcagtgagctatgatcgcaccactgcactccagcctgggcaacagagtgaaaccttgattctaaaaataaacacaaaaagggaggtggagcataactcatcatgctttaagtgtggactgcacagagtgacttccttacaaagagcacaaagggagggaaagagcaactgtacagtgagaaacttgataaacactacctcaaccaggtgatcaaggccaacatcaaccatgataagtcatgtcaacagtatgcgctggtatcacttgataaaaatggcattttaccactatcatctttcttccaaaaatccataacctcagctaatcatgaaaaaaaaacatcagacaaatctcagtagagggccgtgctgcaaattgcctgaccagtacttctcagaactgtcatcaaaaacaaattctgagaaactgtcacagcgaagaggaccctaaagagacatgacaactaaatgtaattggtatccttgatgggatcctggaacaggaaatctgtcacaaggtaaaaactaaggcagtccgaataa

SEQ ID NO: 62870 - DNA, 3018 bp, Homo sapiens
gatcacaaggtcaagagatcgagatcatcctggccaacatggtgaaaccccgtctctactaaaaatacaaaaattagctgggcgtgatggcgcatacctgtagtcccagctgcttgggaggctaaggtaggagaatcgcttgaacccgggaggcggaggttgcagtgagccgagatcgcaccactgccctccagcctgggtgacacagagagagactccgtctcaaaaaaaaaaaaaagtgtatatttcctcttgagtgggtgtggtgatgcacacctacagacccagctactcaggaagctgaagtaggacaaatgcttgggcccaggaggtgaaggctgcagtgagctgtgattgcgccattgcactccagcctgggcaacaaaatgagactctatctcaaaataaataaaacaagcaaacataccaaccacaatttcatcaatgttttcaactcgaaataatcaatatgccaatctagcatattttgggttggcacgttcttcactccttcaactttttgtggggcctgttatgtttttaaggagacaccctgggaggaaggaggagaaggccatcgcctcccccctcattattaaacaaaaaaaaggttgctccccttgtccctcctctgtcccactggtgcctcttctgtcaattctgccaagattccaccctcaactccaaatcaagaaatgcatctgaggccactatatgtgtaaaaaaccttcctgaagggcaggagaactcaggaggcattatacatttcatccatgcactatcaaccaacactggggagccacaaacaaagggagggacttttattttattttatttttatttttttgacacagagtctcgctttgtcatccagggtagagtccagtggcacgatctcagcttactgaaagctctgcctccaggggttcaagtgattctcctgcctcagcctcccgagtagcttggattacagacatgcgccaccacacccggctcattttgtatttttagtggagacggggcttcaccatgttggccaggctggtctcgaactcctgaccctgtgatctgcccatgtcggcttcccaaagtgctgggatgacaagcgtgagccaccgtgccccgcccattttatttttgagacagagtctcgatctgtcacccaggctggagtgcagtggagtgatctcagctccatgcaatctccacctcccagattcaaatgattctcccacctcagcctcctgagtagctgggactacaggcatccgccatcatgcccggctaatttttgtatttttgtagagatggggtttccccatgttggccaggctggtctggcattcctgacctcaggtgatccaccatccttggcctcccaaagtgctggaattacaggcgtgagtcactgcacctggcccaggaaggcattttaatcagggtttttatgcattgcaatttgggagaaacaaatctagcaagtagctaaaacgtgtttcagccaggcaagactctaggcaggggtttctaaaggtttactgcaagtttacctaagcggaagacagtagcacagtctgtgattgacacatgacctgtcaacctcaaagggagaagctgagacaatattaatataaagtttatttgggtcaaggttgagggcagcagtccaggacacacttccaacttgctgtggggcgtgctccagaggacattagagaggctgaagtttttaaagaaaaaataaccaatgaggagagagggtgattacaaacattgttaggaattctcatgggtttacagaaataacattggctagtgattggctatatattggtgaactgtagggcatttggtattttaggggtacgtggccttagttaagtgtagaagccacacagcaagtggcttcaagaggtgattattatttggctgggtgcagtgactcaagcctgtaatcccagcactttgggaggttgaagtgggaggatgacttgagcccaggagtgtgagaccagcctgggcaacatagggcgactatatctctgctgaaaactttttaaaaatttagccggacatggtggtgcacacctgtagccccagctactcaggggtgaaagccagaggattgcttgggcctaagagtttgagaccagcctagacaacacagtgagaccctgtctctacaaaaaatttaaaaattagccatgcatgctggtgtgtgcttgcagtcccagctactcaggaggctgagatgggaggatcacttgagcccaggagggggaggctgcagtgagctgtgacggtgccactgcagtccagcctgggccacagaggcggaccctgtctctgaaaaaaaaaaataaaaaataaggtgattattaattcaaagggaagtaacctaactgctgtttcatttcaatgcctctttggcctgatggcttaaaggggcctgtattccttgaataaaacatttcttcttgtttttttcatttgtttgttttttcctccccctataggccagctgacagcttagaaagactctaggccatgatcagcttaaaattcagcacagctgtgtcttcaggaggttcgtgatctgccccagtgtgagcagttcaaacccaatgaagctgcttctccagaacgtttgcgatctggcccagttcaaacaggtcagatccctctggatccatatatgactgagggccaacttttgccctcctggctccttgacagagacctccgacaaatcatctccacgttggctttctttctttttttttttttttgagacggagttttgctcgtttcccagactggagtgcaatggcgcaatctcggctcaccgcaacctccgcctcctaggttcaagcgattctcctgcctcagcctccttagtagctgggattacaggcatgtgccacaatgcccagctaattttgtatttttaatagagacagggtttctccatgttggccaggctggtctcgagctcccgacctcaggtgatccgcccac

SEQ ID NO: 62871 - DNA, 2066 bp, Homo sapiens
gatcacttgaggtcaggagttcaagaccagactggcccacatggtaaaaccccatctctactaaaaattaccaaaaaaatattagccaggcatggtggtgcatgcttgtagtcccagctacttgggaggctgagacaggagaattgcttgaacctgggaggtagaggtttcagtgagctgagatcacaccactgcactccagcctgagcaacagaatgacactctgtctcaaaaaaaacaaaagtgtaccatttcgtgggtttgacaaatgtgtacacctgtgtaatagccaccacaatcaagatacagactatttctattaccccagaaagttatctcaggccctataggaaatgtcttatgtctttttttaaaaattctttttttttctattctttttttcactcttgttgcactggctggagtacaatggctcaaagttgactcaccgaaacctccgcctcccgggttcaagtgatctcctgcctcagcctcccaagtagctgggattacagacatgttccaccacacccagctaattatttttagctctgttgcccaggctggagtgcagtgaagcaatctcggctcactgcaacctctgcctcctgggttcaagcgattctcctgtctcagcctcctgagtagctgggattccagtcacccaccaccacacccagctaatatttgtatttttagtagccatggggtttctccatgttggccaggctggtctcaaactcctgacctcaggtgatccgcctaacttggcctcccaaagtgctgggattataggcatgagccaccacacccagagataacatcactattatagtgcctaagattgtaaatgtttttcatacttttgcattctgacaatcaattgaccctacctggacctgtgactcatgactcaaccagtcctgtggccctcagccagaggcagactgagtgcaagaggaccgtttttcataccgctatgatttcatcgcccaccaatcaacaacacccattccctagccccgctgcccaccaaattatccattaaaacacaacctctgagttctcaggaaggctgatttgactcataatctctgggctgcattcccagatggttaaggcattctaagtcacaggatgagacaggagctcaacacaaaatacaggtcataaaaactttgctgataaaacagtttgcagtaaaggagctggccaaaacccagcaaaaccaaaatggtgatgagagtgacctctggtcatcctcactgctacactcccactagcgccatgacagtttacaaatgtcatggtaatgtcaggaagttgccctatatggtctaaaaaggggaggcatgaataatccaccccttgtgtagcatattatcaagcaataaccataaaaatggacaaccagcagctttcacagctggtctgtctacagagtagccattcttttattcctttactttcttaataaatttgcttttactttgctgtgcggactctccctgaattccttcttgcgtgagatccaagaaccctctcttggggtctgaatcgggacccctgtgctgtaatgccccactgccacacagcctcttccatagaaactgaagttcctccatctgcctaagatctagaccccccacagagaacaattggtttttctttctctccctttaaggctaataatttaaccacacctgaacagtataatgactgtctgcaaggatcatttaaatcataaagagaattgtttagaagttaatctatgctccactcattcttcctagtaaccactccaccaaattcctcctatcctccctcccatcacctgttttaccaggatccaagctcatattctctctgtaacctcaagatgaaatagaagcctttttacttcactgggatgtcagatcttcattttgaaagctctcatgtaaggctgaagcaggagatataaaaagaaaacatgaatttttgctttaggcagctccccacccactccctgctattgcaccctgttctgtaagttctgtaggcttgtaaattcctgtgttccgcag

SEQ ID NO: 62872 - DNA, 906 bp, Homo sapiens
ataaaaagactctactgcgcctgaggatccacttccaagctcactcacatggttgttgggcagcaatttctcatggtgagcctttttataggaaggcttacaggtttccaagagaaccagggaaggttcccaagacagaagtcacagacttgctgtaacctaatctcagaaatgacatctgatcattcctgccatattctatttgttaaaagcagttcaaggctgggtgcggtggctcacacctgtaatcccagccctttgggaggccaaggcaggcagatcacctgaggtcaggagtttgagaccagcctgaccaatatggagaaaccgtctctctgctaaaaacaaaatggccggctaatgcctgtaatctcagctactcaggaggctaaggcaggagaatcaattgaaccttggaggcggaggttgcggtgagccgagattgcaacattgcactccagcctgggcaacaagagcgaaactccatctcaaaaaaaaaaaaaaaaaaaaggcagttcaagttcaacccatactcagtaagaggggaattaaaaaggtatgactcccaagtggggatcactgggagtcatcttagaagctatggacgttacccccaaagtcttcaagtaaagttaacctttcataaaaatgaaatgtgtttgtggtttggctaggaatttcccttgacctggcactgcatattactgcatattcctacatattccagtttgagaagcccagtttatgccacatgagtaaaaaagccatctcgacatccaatatttattctggcagagactaagaaactgagcaataggctgggagcggtggctcacgcctgtaatcccagcactttgggaggccgaggcgggcggatcacgaggtcaggagattgagaccctcctg

SEQ ID NO: 62873 - DNA, 897 bp, Homo sapiens
tggtggcgggcgcctgtagacccagctactcaggaggctgaagcaggagaatggcgtaaacctgggaggcagagcttgcagtgagccgagatcgtgccactgcactccagcttgggggacaaagcgagactccatctcaaaaaaaaaaaagaaagaaagaaagaaactgagcaatagttctaaatgctggctgcatattagatctagctgaagagcttctaaaaaaaatgctggctggtcactgtagctcacgcctgtaattccaacagtttgggaggccaagaagagaggattacttgaggccaggagtttgagatcagcctaagcaacatagcaagactccatctctacaaaaaataaaaattagctgagggtggtggcatgtgcctatagtcccagctactcatgaagctgaggccagaagatcagaagatcacttcagccaaggaggttgaagctacaatgagctatgattgcacaactgcattccagcctgggtcacagagcaaggccctgtcgcaaacaaacaaaaaaaaaattaaattaaaaaataaataaaaatcccagctgggtgcagtggctcatgctcataatcccagcaccttaggaggccaaggaaggaggattgcttgaggccaggagtttaagaccagcctggacagtgccgtgtgacctcatctctaaaaattcccaatacgcagatccccacccggaccaataaaatctgaatatctagtatatagaacagattaggtgattacaaataactgaacagctttgttgaggtataactgacatacattaaactggatttggtgatcttttatttttgtttttgcttttcttgaattgtgtaattttaatctgcagtctgaatagaaagcctctgatcttgaa

SEQ ID NO: 62874 - DNA, 1587 bp, Homo sapiens
cgtctcaaaaaaaaaaaaaaaaaaaaaagactacggtgctaggaccaatctcctgagtcacaaaatttaaggagtcgtccaaaaaagtaaataagataaatattttcaaacaatattagaaaattcaaatcggaaactaccgaccgggtgaggagttgtttttgtaaataaggtcttattcctaataagtttcgaaagtctaaatcttcacacgagtcactcaaaagaaaggcccagctcaggagcctgcatctgcgctatggcgggtaagccccggtggctgaccggaagaagcgcccacggaggcgaaccccaggcgcccctcagcctacttccatttcccctcgcgacccttcgccccgcccactctagctggctgtgcctgactggctgggctgccgcatattcgcgctgccattggtccataatcagctgggggtgggcgtagggagacctacttcagcaggtcctggccggaccagcattgttaacggctgcggttcgaagtggctgtgggtattgctgcggctggtgcgtcgtcgctctaggtacgttggggccgggcgagtgtcctgcgagagcggcgattggcggggtggcggctctaggagcgtcggtcgcctctctgagggccggccccggaggcctcggagcgccgggcctaccggacgtttgcggcgaagctgccctgactgaaaagcgtccgcggggccgtctgacaggtccgggaagaggcccctgaggggcggacgggcgcgtctccaccgttttcgcagagggatactggtgaagcgggagtggtgtgcggcctcaggtccgggcggcactggggttagggactgcggagggaagtggtgcgtgttttttgtcctgaggggtaagtaaaagctcgctcttgtccggaatgctttcagaaattaacggataaatctccacctccaccaattttagtgtcccattgccaaattttcttgagttgttttaatcatctaatgaagtcaggtgccagaaggcaactggatctcgcctggcggccttgaagtttgttaaaaagtagggaccagagcatcaggaaaaatacaaaattctgagtaaaatgctgaaatcccgtacctctgagcttgccggtgtaaggatggtaggatttaaggaagacgatttccttaaggtagaagttcgtttttatgaatatgtttttaagaaaattccatcttatcgcccttctctaaccagttttctccaagtttggcaagcaagtttgagaaagagaggacgcaataattttttttgccttatttttgttaaaaccttaccgcacttaaggaaacggactttctacctttccgtgtttctgtgttgaaaatgaagtttctaaccacgtgttccttcctttacgacacaatggctttttctgttctgaagacttgcatatggttaatatgtatggaagaagaggacagttgtactgaatagtccacattagaaaaattatgtcatattcacttaaattgttattctagattgcgacttaatactgtttttattatgattttgtcatatttattgtagccagtaaatgacctgcga

SEQ ID NO: 62875 - DNA, 909 bp, Homo sapiens
ggcaaaattaacaggtgtgtatgccgggcacggtggctcatgcctgtaatcccagcactttgggaggccgaagtgggtggatcacctgagattgggagttcgagaccagcctgaccaacatggagaaaccccatctctactaaaaaatgcaaaattacctgggcgtggtggcacatacctgtaatcccagctactccggaggctgaggcaggagaatcacttgaacccaggaggtggaggttgcagtgagccgagatcgcaccattgcactccagccgtggtaacaagagcgtaactccctctcaaaaataaaacaaacaaacaaacaaaaaacaggtagtgctatgtaaatgcttaaacagttggggtaagttattgccacactaggctggctggtggactgatccggtaattctccctattaagtgacatgttactgaataggccagagcaaaggtgatttggcatcctctgtcgttatttgcaaacttggatctcaattcaggagctaagaccatgtacttgggtcaggcagcaagcatgagcccgcctgactctaagttcttggctgccacctggtggtaatgttgaaggaacacaccactcccatcaacagattaatgtggatggaagggactccactcaatacttcatctggttgctgagacaggaactgaaaatataaacgatgatttttaaggggcactgctctacaaatatgtgtagttcccttgctaatgaagaaagagaaaccctactccatcatcaagaggcgtcctctgggcccttccagcatttatctacatcccgtgtgcagctggttgaactgggtcccccaccccaagagatgtcttcatcctagaatctgtgaatgtgaccttatttggaaaaaaggatcggccaggcacg

SEQ ID NO: 62876 - DNA, 1141 bp, Homo sapiens
cactcaggcaacccaaaactctgttttcacctatttgttaaattttcattcatcagggaactatcgaccaatatgccagacagtgtaccaggcactatcatgaatagcaagaccagacagaatccctgccttcttgcagctgaccttgtagtgggggacacaggaggttaacaagtgaaaagtacacacacgagatttccagagagcagtgtcatacagttcacaaggacacgggcaaggagacatgaacttttatctggccaaaccaggttgctttcatttataaaggccttaattggaaacagaaaggtacagatcccaggtcaaggggaaggaaataagacccaactgctgctggggctggaatgtttgtgtgttcaacctagattcaacaacccgaatttcacccctaaaagacctgaacaaacaatttggataaatgcccaccaggtggcaggagtgcctcttcccttcatttctgcaattgaaattaaacatgcaccttatcctttaaaaaaaaaaaaaaccgttttgttttcataagctatttttatccttttcaatgttgaaaccagttgatttcacaatactactaaataacatacttaaaatacagtgccaatgtagcaagtctctaagctagtatctaggtaaaatatggcccttaccttccaggcctccacgttgatctcagttgcttttgattcttaacttgattcaccaatcttacctggaattgccttacaagtcagtcagcttctttaaactcagagtccagagctcttccttggctgtgttcttaattccagagcttcagttctgcttagagcccaacatccttgctggcggattttctcatcaagcaaaatgttccctactcttttccgtcgtgcgttcatccttttataaaattggaattgaatgacgtcaattaaaataaattagtttaagctgaaaatccaacacaagtgaaaagtgttcaaatctcaatgaaaccatagaagccatgcagtctatgtagtcaacgataacaaagcttatctgatggactaagttgaatgtggccaaataaatcacataggaaacctcaactcttttctgctccctttgaaaatataaaacaggacgaaggtttccagag

SEQ ID NO: 62877 - DNA, 1767 bp, Homo sapiens
cttcctttccccttcccctcccctcccctcccttcccctcccctcccctcccttctcttccccttccttccccttctctcccccttccttccccttccttcctcttccttccccttccttccccttctcttccccttctcttccccttccttcccctcccctcccctcctctcccttctcttccccttccttctcctgccctcccctcccttcccttcccttctcttcccctcccttgtcctcccctcccctcccttccccttcccttccccccctttttttttttgtttttttcagatggagtctcactctgtcacccaagctggagtgtaatgccatgatctcagctcactgcaacctccgcctcccgggttaaaatgattcccctgcctcagcctccaagtagctgggactataggcacacgccaccatgcctggctaatttttttgtatttttagtagagacagggttttaccatgtcagttaggctggtctcatactcctgacctcaagtgatctgcctgccttggctcccaaagtgctgggattgcaggccaccgcacccagcctcctttcctttctgagacagtgtcttcctctcttgctggagtgcagtggcacagtcacagctcacttcagcctcaatctcctgggctcaagcgatcctcccacctcagcctgctgagtagttggggcgacaagtgtgccacctcacctagctaatttttaaaattttttgtagagacaaggtcacactacattgcccaagctggtcttgaactcctgagctcaggtaatcctcctacctcagtcccgcaaagtgccaggcttacaagcataagccaccacatctggcttgccatcatttctttctggataggacaatggcagaccacagcaattgaacttcccttcctggccaaaaaaataaaaaataagcataaaaaatctgtgctttaaagtaaccctgtgccaaggtgaagtaacacctctcttctcttacatgtgttcaagaccctggtgaaattaactattgtccttctacaaacacagagaagccgtttcttcctggttcctctggtctgtttgttttagctgatgacaaatattgagcaaatgtgccgtttcagctttgggatggggaacatcccgtgctgttctcctgtgtgttcagagagacaacaagggccctggtgggggagactgtcattggctttccttccaaatgggtgtgagctactctaggccaaccaccttcgctggcaatttccaacagcccccaagtagccccaccatcatggttgccaatcaccgtatttcctggtgtatataggacccaacagcagtggctctcccttggaggcaattttgtccctaccccttgtagagggcatttggcaatgtctggagacatctttggttgtcacagcagtggtggggggtggggtgcactgttgacatctagtgggtagaggccagggatgctgccacacatcctacagtgtacgggacagtccccaccaataattctgcagcccaaatgtcaattgtactgatgctgcaaaactctgccctacaggtatacaatatggagttcttacaagaaaaactttacaaagaaagaaacttttgaaagaaaacactcacagagacttttcataatacacctatttaaaatgagttcaaggctgggtgcggtagctcatgcctgtaatcccagcactttgggagtctgagacaggggcatcacttgagcccagaagttc

SEQ ID NO: 62878 - DNA, 661 bp, Homo sapiens
ctaatacaagtggtacagcaccccacagctcactgcagcctttacctctcaggctcaaatgatcttccactccagcctcccaagtagctgggactacaggtgtgctctgccatgcttggctaattttttttctttttgtatagaggaggtctcactatgttgcccaggctggtcttgaactcctgggctcaagcagtcctcctgcatgggcctcccaaagtgctcctgcacctgaccgggactttcagttttaaaccagaggatggtcccaggcaaactagaacaagttgtcactgcactgcactgatgacacatctcagggtcatcctgagggcatggcaggtttggacttgaccctggcccgggaggtggagggctggaaggaggtggtagttagagtggttagggccaagcagcctaagttggctcccacacccagatttcttgccttcatcaagccactcgtcaactcctgattggaaagcaccctagaagggacttctgtattttgtcatcagaaagctttaaatcgtcactgagaaacaacaaatgatcatggtgtggcttctgacttctgatctgacttaagccttgctaaaattcctaagtagaaaaaaatgctctgagacctctgcttcctccaagttcctccaggactgag

SEQ ID NO: 62879 - DNA, 1420 bp, Homo sapiens
ttttattttttgaagaaatggagtcttgctgtgttgcccaggctggtctcaaactcctggcctcaagccatcctcccaccttggcctcccaaagtgctgggatcacaggcatgagccagggtgcccagctggagtttcaagttctacagtttgacaggaagaaggatagtgctcccagaaatgtccatcctgaccccagataacaaagagaattgacatctcctcgctgtttcctaagtagaggtgccgtccagctatgccttagtccaatgtttgcttaaagtgtgtgtgtgtgtgtgtgtgtgtgtgtcgcacgtctagctctgggtgtggagaaacacaaacaaccttctggaggctcactggccctccctcttccagaagcaacatttggtttgctgttgctcgtggaaagtcaccatgaggttctcgtggataaataaaagtctgtgggatctgcccacggacagagtaagggtccactgctgtcctcttcttcataataaccacgaatctccacccgtgagccccatcccctgcttgctgttgccaaaggaagtcactttggcacatgctcctttacgtgccagggaacaagagtcagagagcccagctggcttcccgcggagagagaacgtgctgttaagatgaccgctccgtccgcccaactccattcccgccctcgggagttcttcctactatttaaaccacagccgattcccagtctgagttggagccttttcccggaactgtaggcaagaggacaatcccgaggtgtggaacctttcaatacagacctgagatgttcggcgtctggaggtccgaggcaatctcccaattcagaagtgttccacccacagctcccgctccaacggccagggaggctctggcccagaaccctggggagggccgggctggtgagcagtcacccaggccaccctgcaaggactcccaggcctgctccggggctggtggttcaacctcaggctggccagaacccaggcccctcccactgcccagagcactccgaggggacggtggctttggcctctgttttcaggaaggcagaggtcagcccagcctcctgccctagtatctggacaccagccagccaggagtattcaggcgtctgagatgccatggggaagaaagaagcccatttaccctgggccgcccagctccatgctcactgtggctggagctctgggcacaaagtcagcatttggctctctccggaaatggcaacaggcgggacactggaatttggcagtgccccagggcagaagccactgaggatcattctgtctgtgcagccctgggtcttccaatctcttggaataataacaaccacaatttcaacaataatgatagccaacattagttgtctagtgtgtcccaggcactgttccaagcccttttg

SEQ ID NO: 62880 - DNA, 1120 bp, Homo sapiens
ctggagggagagctttgccctgtggtgtcttcggagtccccatgtccagccccacatcttcacctaaaagacctccctggagcgtgctcagatctctggatttggggagggcgtagaatacacactacgagctgcagcctctcctacctctggaacacatgggtgcggtctcgcctctttaaagccccccaagcccttctagagttggcagggagagaggtgtcatcccagcagcgcctcccggctcctccaccgttcctgacccccaagaagtcgctcctcgccgctcgggggcgcgacggagcagcggcgggggcctagaggggtacgcagcccaggaggacccgctggcccggcctggcgcaccagtcctgcccgcgaggcgagtctggggacgctgcccgggaatccctcacgcgacctggggatctccctggactccaagagccccgggtgtaagtccggcggggcgaggggaggcgccctgactcctccccaaacttttcccgcctgcttcggctcaaaaggcgtgggaagctgtcccgggatggcgaagtggaattctggggccggagcgagcgtggcgcagaccagaggtcggcggcatgggtggcacctcggccctcccgttactgtcaccaattccgggggctgctcccggtccagtaagtggaggggtcgcgtccctgctgcccgggcgtacacgatcccggggcccccccgatgtcgccccgcgccctgggtgcgcccacaactcacccggcgctggcggctgcgctggcagctggatcgacggactggctgggggtgcgaggcgaggccgccgggctgttttgaagctctgggctgggactgcgcgccctccctccaccctctaggcggcggggcccctccttccccgatcccgcctcccgggccgtgacgccaggagccgggagagccgagtgggaggggccgccggcgaaaggagggggccctggagggaaaggccgaggccgggagcgccctggcgcccccgcaccaccgttcccgcccgcctccctgcggctctgtggccagctttggggcggagccggtggcacgggcccgggggaaaagggagaaagggaggctcccggga

SEQ ID NO: 62881 - DNA, 738 bp, Homo sapiens
caggaggaatgcgtgctcatgacatgaaggcagtgtcagaggaccttgcaactctctgcacccagcctggggacagctggcttccatctgccagacgtcaggctgttgacaggggtggggtggtgataccatcccagcccagcattcagggagctggcatctcagattgccccaccctgcccctccctggccctcaaggagccgagaggagagtgacatcgaaactccactccatcaagagtgggctgacccagccccctcgatatctgggtggggtcccaggaatgcctcacccccgtgttgcacacagtaggcacttagagtatttgctaagcacatgcagggtcctcctcagctggcctggagggagccccagcccattggccttccccagggtcacctcagtagccttcaggccctggctgcattgttccaattcctgcaggtttggaatgtctctgtttaccgtcaatgtcaatatgactgggagaacatccagttcccacaggccttctgggggctggcgggggacacaaggctgagagatgggagcaggccacacctgggccccccagctcccttcaggtcccctatgttacaaaccccaatccaggcacattgtcactctgggtcctggaattgcataagcagatgggtggcagccagcaggagttccacagggcctcatacctctacccacgccttccagcccctccctccttgcccttttatttggca

SEQ ID NO: 62882 - DNA, 1111 bp, Homo sapiens
aggtgaatgtccatgaagccagccgtaaataagaccatagattaagagagcaaagtcagaatccaagatgccacctacccagtctgttccaccctacctgagtcaggagggctgtgacctcctggctgtgaacacatctcacctctctgcccccagggaatcccagccaaggcgcacattttgagaaaaaaaaaaaaaaaaagaacttcagcaaatgctctgtggagccctaatgctcgctgtcttgtgaaatcctggatccaggatttccggggagctgggggctcctttctgggccccatgtgagctggaggccagtcttcaagaaaggaagggcagagctcagactgcttctgtgaaatgcactcaggagtgggctgaggatttttgatttcccgggacgcctgctccagggagcccgcagcagcaggagcgagtcctggcctgtccaacgctctcacccttcaccctcaagtcacccagttggccacactctcctggggggggcggaggtggaggttggcagagtcttcagagccttttattaaaactttttgggtgctttgttcacgaggcctggcaaagtccagggctctggcttaccctggtctctccctgtcctgccccaaaggtcaccactgagaatcccagtcccttgtcctttggggcactctcagagctgcccctctggggagggggagccgatgggcacaggcctcctgttagcggcaacctccgcctggggtgcctggccacacaggcgattcccagagagtgtgggcggcagacaaacaagcgttcagtgtcagcacagcccacccagctctgaaatgcctcctttctgtctcccgggggtggggcctgacagtaacccctgggcccagtgacagcaggggccacccactccctagcgcccctacctcccactcctcctactttgcagattcagccctcccctcccatcaaggggcagggacaaggccagctctgcagggtgtgggccagttggtttttgatctcaaagatactgttcatcccagcctgggcagggcactgggaaagcctgtggctcctcccgccctctctttccatttcctgccccctcaggcgc

SEQ ID NO: 62883 - DNA, 477 bp, Homo sapiens
tcaaagtcctggcttctgtattagcttaagaaaaaatccaggaaaaatagatagcagtttgctccctaaagaggacaaaaggatgcctgtttcctactggtggagtcaagacgagaagctgggttatgggagggcaaggaggcccagcctcctccagagcccacctaggaaggaggccagcccttcacctggtcctctgtgagccacagcaactcagcccacacgctggttaaacattatcccataagaatgttctgtgcccagaatgtgagtggcatataaacactcaatgcggcaacacctctcttggaagccctggggattttcttcagaaacctcccctttgtgggggcagtgggtgggatgtacaacccttagaatgcaccacttcagcccagcgcagaagaaaataaagccttatatagatgaaaaatgctccttggtgccactttgcccagtgtttgccctgtcatggaa

SEQ ID NO: 62884 - DNA, 777 bp, Homo sapiens
atctagagatgcctcaggccagagacctgagcccaccttgtctctttctttgttcactttctccatttcctggtcaccatgcttagggctcagtcagcctgtgatggggacctgaaactttacaaaaggcctgtctcctgggtctgggaaaggaagagctaatactcattcataagctcaatcttttcttcattcattcattcatccacagagtcattgattcatatgtcagtgcaacaaatgttcgttgagcacctacttagtgccaagcactgttctaggcagtggatccgagtaaccacaacagctggaaaaccctgtccttgtggagtggacattctgctggactttacactctgttgtttgcttttttacacaacaatcacttgttgagcacatacgagtactggctacaagtgagacaaatggtcactgtcagcatcacagaactcaagtccctcccacctcctgttaaaaatatttattaaatgcctttgatgtacagcacatgggtgggggacagggccacaaaaaaaggcaccatgtcagttctcctggaattcctgtgtaagcagaggaacaagggcacaggcacacacaaccatttatcaagagtttactccaggccaggtcctgcgccaagactcttacatgaatcatctcattatagaaccaaaccaatcctatgcagaaggttctagcaacattccctggcttttatttttatttatcatttttttttttgagacagagtcttgctgtgttacccaggctgga

SEQ ID NO: 62885 - DNA, 406 bp, Homo sapiens
agaacttcatgttgtcatctcccggccacgtccccacccagccccaactcagggcctgctcacagcgggcacctagcaccctccaacccgcccaggagcagctacacagcctcactcatccctgttcacccagccccagatccctgcaagcacgggaggcaacgtgatattccgaggaggaggaggggaagaaagggagaatccctcagatcaaatgagtcatcagtgccactcgagccaacaggcgttccactggcgcaccctatggcaggcaggaatcttgtctaacctttgccttcctcgaagccaaaatttgtgactggaggtggctctaagcagtgcttaggaaacagggaaatggggacatacacacacacacacacacacacacacacacacacacaca

SEQ ID NO: 62886 - DNA, 2709 bp, Homo sapiens
caagagcggaccacaaggaaacctttgggtacatacatatgtcaaaacttggcaattgtatacttacaatatgtgcagtttgttgtatatcaggtatacctcaacaaagcagcttaagaaataaaccggccgggagtggtggctcacggctgtaatcccagcactttgggaggccaaggcggatggatcacctgatgtcaggaattcgagaccagcctggccaacacggcgaaactccgtctctactaaaaatacaaaaattagccgggcgtggtgccaggcacctgtaatcccagctactcaggaggctgaggaaggagaatcgcttgaacctgggaggcggaggttgcagcgagccgagattgtgccactgcactccagcctgggagacaaagcgaaactctgtctcattaaaaaaagaaataaactgataattactaacacctatatagggcttgaaagtgccagacactctaaaaaactgttttactcattaacttgtttaatcttcccaacaataattccttgaatattattgttgacatttttcagagacggaaactgagacagggagcctgaatgcgaacacctggcattcaaggatccacgtcctttccagtttctctctatataatgcatctgagccttgtttttcgactcaattatgtgttgaacacctggtgtgtatatagccccttgttatatttgccggatcccagggaagaagcagaaaattttctacacctaaacttaattttgtttccattgcctgagtaccttgatcataggtggggggagagctccacctgctggtataactaaggaaccgcaggcacttcctgtgttttctaagggtgctcgctgaccttgtttgaatatttaaagtgcccctgtctggctgaaatttttagccgctgtaaccaggttttagtcttgtttcatccactaatcttttttttttttttggtaaggcagattctcgctgtgttgcccaggctggagggcagtggtgagatcgcctgccaggctcaagcgattttcctgccttgcagccttccgagtagctggaactacaggcgcacaccaccacatccggctaatttttatatttttagtagatacagggtttcaccatgtttgccaggccggtctcaaactcatgacctcaggtgatccacccacctcggcctcccaaagcgctgagattacaggcatgaggcaccacgcctgcccagtttcccccatttttaacatcttgcattagtgtggtacatttgtcacagttgatgaaccaatattgacacattattattaaataaagcccatggtttatattaggcctcactcttggtgtcgtacgttctatgggatttgacgaatgcataatgacatgcatccaccattacatagtcacacagagcagcttccctgccctaaaagttccctgggctcccgtttaccccttatcccctcccacccgctgaactcctagcaaccctgatcttcggactctatagttttactaatttatttttaaaattattttgaagtctatttaaatccttggcacttacttagctttgtaaatttaactttcatttttagtcattattcaccatcttcagtcagaggaactgaaataaaaaaatttaaatttaaatttaaaatctagtctttcaaaatcacagaactaagtaagtgtaaaggaaaattacacaaaatttcaaatgctaatttttgttaagtttatggcattcatacttcggaagttgttagaatggaaaaccgtgctcagacttctggaacgcagtgtgttcagttccgcaggccaggaatggcctccatggggagatgctgctgagacttggcctgtcacagaggactgggccacagccagataggcgagagacaggcagtggcctttcctggcagaagggcctgtgtgagtgacagcaatgaactagggtgccaggcaaaggccagctgtttagtgaatagactcgatattctcagtgacactcaggctggaagggtcaaaatgagtcatgcaggctactgaacaccatatgaaaactgggccttatcctgtgggccatagggagccactgacggtttatgagcagcagagtgacttggtctgattttcatggggaaagaatgttaagactgagaaacaattcagggaactgtgggaaacatcactgtgatcctggatatctggttttcctccacttccagtcatataaaactgtacttcctatacttttttaggcatgaccatgtgacttttttttttttttgcgacagagttttgctcttgttgcccaggctggagtgcagtggtgtgatttcgggtcactgcaacctctgcctcccaggttcaagcaattctcttgcctcagcctcccaagtagctgggattacaggcatgcgcctctgtacctggctaatttttggtatttttagtagagacggagtttcacactattagtcatgctggtcttgaactcctgacctctagtgatccaaccgcctcggcctcccaaagtgctgggttacaggcatgagtcatcacgcccaaccttttttttttttttctgagacagagtctcattctgtcactcaggctggagtgcagtggcacaatcttggctcactgcaacctctgcctcccgggttcatgcaattctcctgcctcagcctcctgag

SEQ ID NO: 62887 - DNA, 1294 bp, Homo sapiens
acctttagcaagcgatcaagcttcacattaccaaaaacgggacaaactgacattatccaagtgtgttctgcaggaaaaaagaaaaattaacctttatctaattacaaggcaagagggaggggaggattagacaaatcaagaatatgggatattctattacacaactggtctggacccgtcaaaattatcaaggtgatgagaccccccctaaaaaaagaaggactgatctgaattaaaggagaccgaagagaaataactccaggcagtgagtgaatccagcaggggagggggtctaacaactgaaattgaaatataaactgtctattggctaatactgcattggctagtactgcatcgatattaaatctcttgggtatgaaaatggcactgatgtcatgaagaatggctttgttcttaggagatgcactgcagaagtatttatgataggaaatctctgaaaaggaacagacgttgagtcccagtctttcggcccaaggttcgcgcgtgcgcacagccccctttccgagacttatttcgcgcggtcggagaatcagattgtgcccacaaggcggaaatgtacgacagcgggttccggtgaccacgaaggcggcaaaggcgacggaatggaggaggtgcctcacggtaagctcgcggagggggcgtgggtcgcggggcgaaagtgtcgggagctgctctaactgtggtcttgtctctgcgcagactgtccaggggccgacagcgcccaggcgggcagaggggcttcatgtcagggatgccccaaccagcggctgtgcgcttctggagcgggggccactccggacacgggtgagaaaagggcaaggcctcaacaggaacttagaggcgcaggcccggaaaaggcggggcgtgggagggagggggcgggatctgcagaatgactgacagcggcaggctagaaggtattgtattcggagaggggtggggcccagaaggggcggggcgtggaaagtgggcagggtgagggcggagcttggaatgactgacaggaacgaggcctttagaaggcgagcgcgaaggacctggcgcggatggagggtggagactgaccggcgcggagtcgaaagggacattaattaagagggtcggggccagaggtttgagtgacaataacagaccgcagagaaaaacgggataagcttcgaagtcggggagtcttcggacttacatcctggctctgccagctactttcttgacacaattttcttccttttgaggagtgattctcccactcattcagcagaaatgtgttgatcgc

SEQ ID NO: 62888 - DNA, 2281 bp, Homo sapiens
tcctgagtagctgggattacaggcgcccgccaccacgcccagctaacttttgtatttttaatagagatggggtttcgccacattagccaggctggtctggaactcctgacctcaagtgatcctcctgtctcgggctcccaaaatgttgggattacaggcataagccatcgcacccggcctgctaattttattttttgtagagacaggatgccagaagcacagagaggggaaattccagaccagggaacaaaagggacagccaagttttgatgtggcccgcctggcctccccagcaacacaccctgtcaccagggacgtggagaagtcagcaaacaggccaaagaaggcctcttgtcactcaagggcctggacaagagacagaaatgtcaggtcaacagggccttctctgcggccagccgggatgggggacagtggctgtgaccccagtggacaggatgggccctggacctctgcctcctgttggagcagccagaggtcggcaggcccctcccatggaggcagggctggggaggtcatgacactggtcgctcccttagcagccggggggtctgaagcttgtccctactagagaaagtgacctagccgggccctgcttggtcaggaactgcggatctttcccacttctccctgcaccactcatcatgctctgaccacaatggccagactccaagattttcagaaacttccaagcctcttcctggctcagggccttcgctcctgctgactccctggccaggaaagcccttctcctcctgattttctcagggctgaaaatatgaggtctccccgcaaggggccttccctgaagcccagctcatgtcccacccagtttctcagtccctcttgagggtctgggatctagactgtggcctgacatgtttgttccctttctagcactttctacgatctctaattctcttgttttcttattggtttagtaagattcccctccccatgcctccactagggtactgtctccataagggcaggcgtctcttaagttcatagagcatggggccaggtacacagctggcattccacaagccagccagagagtgggtgaacaaagggatgagcgactcagaacacacgcctggcagcgaatctctgcagagtcccctgatgaggaccttacaattcaggggacacagagacctggattattgcctcccgaggggtctggtctcaatctagttctctctttcacacacacacacacacacacacacacacacacacacacacacgccacctttcagcacaggcccacctgtccccatccctcccaaaacgccctgccctgcatgtcaacatggaggacgcatttaagctatgaggcggggagcccagagtagccgctgcagcatgcctggccctccgccgcagggaggttgggttggggcgggcagcgggacttagattacccaggacccgatttgggagccctgggggcctcttgcaggaggagcccaagcaatggctggctgcctgccctagcaggtctgcgagccagcaggcaggctgccaccacttacgggaaatgctccactgaggagaaagagtggtaggttgtttagcccagccctggcccctgtccagactgggtcaggaagctttgccctgtgccagcgtcgcccacgcaggctcagttcctccccagacggcttgtccagagacccacaaggcaagccggggagtcactgcccatctctctccttcctgtgtatccaaagcaacaacaacaaaaaccaaaacagcagtttgtggactcagacactttgcagtcagcgtgctttgaagctcagctctgcctcttatcagccgggaaataaatagcttggacaagttactaaacctctctgaacctcagtttccttcagtgtgaaatgagaatcatgacctgttttaagggccgtgaaggggtggcctgcccctccacacctgtgggtatttctagtcggatgggacaagagactgagaaaagaaataagacacagagacaaagtatagagaaataacagtgggcccaggggacccgcgctcagcataccaaggacctgcaccgggcaccggcaccggtctctgagttccctcagtttttatcgattattatcttcattatttcagcaaaaaggaatgcagtaggagggcagggtgataataaggagaagatcagcaataaacatgtgagcaatagaatctatgtcataatgaagttcaagggaaggtactatgactggacgtgcacgtaagccagatt

SEQ ID NO: 62889 - DNA, 1022 bp, Homo sapiens
acccacccaggggtggggacaagctccctgcaactcaggacttgcagatcacttgcccaagtggctccctagctcctggctcctggcccggggcctgggactctccccgaagtggggctggccactgtgaggaaccgactggaggcagggacctcttggatgccccaggcagttgggatgccacttctgataaagcacgtggtggccacagtaggtgcttggttgctccacagcctggcccgagctcagcgctgcagaaagaaagtgaaagggaaaaagaactgcggggaggcggggaggtaggatgaccagcggacgagctgccacagacttgccgcggccccagagctggcgggagggagaggccaccagcagcgcgcgcgggagcccggggaacagcggtaggtgaccaaagtctcctctgtaacccctaaggtcgggctgagaatcgaggctccgagactgtcagctacttgctcaaggtcacacagcaagtctgggaggatggggggatggaatatgcaaaatgtagggccgggaaacacctcgtttccagcatccccgcaacgactctgcgcgggaaccaggagccgggaacccggagcttggcttgctgtgcccagagctccggggccgtgggcgggtggcaggaaagcctggcggcagcttctgcagagaagccggagcgcagactgggagcgcggagcagacacactcccccggccacccttggccgactccgcgcgcccgggatcctgcagaggtgcgcgcccttcttgtacgccagactttggaccagggccgccgttccctgagcttcactttccctgttgggtcatattccatctctaactctggaatcttgggtattgggctctccaggcggggggccctgctcagggaggcagtagggagccaaacctttaaccagaggatgggataagtcctcaactctcgttgaacatcttggcgaaggtgtgtgttgttgggaggggtgggggagggatccccccggactgaac

SEQ ID NO: 62890 - DNA, 912 bp, Homo sapiens
agcatctggagtgagtatagactctgggaccccttcctctcaacatctgggtgcagtgctgtgatcatagctcactgcagcctcgaattcctggcctcaagtagtcctcctgcctcagcctcctgagtagctgggaccacaggtgcatgctacagtgcccagcaacctctgggttttgacaaccccaaatcctgcccccaaggcacctgcagaaagaaaagccctcactttgtccctttttttctctcttccgcctactgcatcctcaatgtggctggcacatgagtgatgagatgacgccacatcagatgggaatccccagtgacaaaaaaagttgtagatcctttcgtgacctttgaaactcctttcctcacaacctcatttgctgctctcagcaattcagctggggagggattggggagcatagtcctactttacagtggaggttaaggaagttgccaagcctcaggggcttagttcctaagaagctaaacagggattcaagtccatcatgagttagactttgccctctggctgcctggttggagcccccaggtgatgaagtcctcgtctgaaaagctcaggaatgtgccggctgcctatggtgtattagagctggggggtgggaagggcaggtgccagggctgaggaggccctcactgggatgggaagggtcagatggccccaggacgctagctgatggcccccatctgattccacctgcagcctggatgcgctgagtgagaacaagatcggggacgagggtgtctcgcagctctcagccaccttcccccagctgaagtccttggaaaccctcaagtgagtgagctgggcctgcccttcctgctgaatcgggcccccaaagtccggctgactttttcaaaattaatttaaatttgtttttttagacaa

SEQ ID NO: 62891 - DNA, 631 bp, Homo sapiens
gcagggaacccacatcgtgctggctgcaggggacactgagaccctagaagcaatcaccacagccctgaacaaaaggattagcgggacgtggtgaaagaaactctgagcaagtcagttattcattcctagccgctgttttcttacctggaaaatgggaaccatcctaatggtctatgtaagcacttgtcacaatgccaggttctgttatgcaataaatattgctccttttcccccagggatggcgggaccaggctttttccggaacctaggggtggtggcttctggaaggctaaccacgtacgtcagcttttgccggccttgtcacttacatgccggtcagtgtttcactgccaccttctggtaggccttggcatagcacctcttgcttttgagtgacttccatccaggccctggtgtggtcccagaggtaatgagcggactgagcttggaccagagccccagtcatccaactcagcattaccagctcttcttactcgccagactgagagaaactgctctcctcttcgccagagctcttcacttactgaggacaaccagagtcagattcccaggaaagatggcatttggtcccttattatttatttatttttaatttttttaatttctgttt

SEQ ID NO: 62892 - DNA, 2202 bp, Homo sapiens
attactctccctgtggggtggaggaagggtctccagggttcagagattgcaaaacccccatctagtttctgcactggtaccggccgacccgtgatgtgagttgatttagcctgaatccacttggcagcagtgtaaacctgctgcatttatttatttttttctttttttttcgagacagagtttcgctcttgttgccaaggctggagtgcagtctcagttcactgcaactccgcctcccgagttcaagcaattctcctgcctcagcctctcaagtagctgggagtataggcatgtgccatcacacccggctaattttgtatttttagtagagacggggtttctccatgttggtcaggctggtctcaaactcccgaccttaggtgatccacccgcctcggcctccaaagtgttaggattacaggcgtgagccactgcacctgctgcttttatatgcagccctgcaagggagttctgaggctgaatcatggcaaagtcatggccctgaaatcatacccgcagcagcacctgacctgttaaaaggctgcttggtgtcgagtaaacagctgaagttggcatcagtgacactcatcatgctattttcactgctactaatgctggttgtgaatatgctgcagaaactggagctggtccagtgactggctttttctcttcctgcccccagtgctggtcacaccctctatgttaactcatgcgaccctcaccaatgttcctgtgatgtagtcagaaccatagctaacatttagttcattctaggcaccaaggcatgttctaaatgttatatcagcattgattcatttactcctccccacaatgactctatcatgcccattttacagatgggcaaactgagtctcagaagagttgagtagcttgcccaaggtcacataggcagtaagaggcatagctgggatttgaacttgggaagttgttctgacagtttccacacagtaaggcaagaaatgacttccttttagtcctgctgttttcctgggctcactgtttgaccacagagaagtggtctcaactctctgggtcttggtttgcctgtctttaaaatggggcagtaatcccagtaggtggtgactcccacggggctgacctccaggctgcaggggacactgagatcctagaagcaatcaccacagccctgaacaagagaactagtgggacctggggacagaaactttgagcaagtcacttattcattcctagcctctattttcatatctagaaaatgggaaccatcccaatggcctatgtaagtacttggcacaatgccaggctctgttgtgcaataaatattgattccttcccccagggatagtgggaccaggctttttctggaatctagggatggtggcttctggaaggctgaccatgcacaggcctccaatccctccccctggcctctgtttccgacagcttgtacaataactgcatctgcgacgtgggagccgagagcttggctcgtgtgcttccggacatggtgtccctccgggtgatggagtgagtgtgggagtctgggcggtgggtggctcagcccggggtgggagacactgaagtctctccctggtgtcctggaagagctggatgtgggggtggccttggtctggagctggggagtcccaagggccaggccccaaggtgagtttctcttgccagcgtccagtacaacaagttcacggctgccggggcccagcagctcgctgccagccttcggaggtgtcctcatgtggagacgctggcgtaagtccaggcaaccctggtgggtggagaacaactcactccccaggcgtgtggcccagtgtgaccccggagctcaaatcatgctcttcccttcaccaatctgcaaccctgggtgagcagacacttccccctctggcttcagcttcttcatctgtaaagtggggacagtaataatatccacccaagaggttttgtgaggcttaaactaatcaagccctacaaagctcttataacaacagtagctggcacacaaaaatgccaataaatgctatattaggctgaaccatatgaaattgctgacatccacccatttttgacctgtaaaattggcaatttcatatggttcaggtttatcttttattaagtcaccatgatgtccaatactggttactttatattctttcaaagcacttttatctccacaatcactcacct

SEQ ID NO: 62893 - DNA, 1143 bp, Homo sapiens
gggggcagctgtcactggggccccaggccgccctctctcctctaacctggctctgagtcccatccccccttgcaggatgtggacgcccaccatcccattcagtgtccaggaacacctgcaacaacaggattcacggatcagcctgagatgatcccagctgtgctctggacagggtaaccagggtgggcttgggaggggagagccgcagtgggttgggggcagtgtccttgtgaaggtggcattcaaaaaatgtgggcgggacacaggtggggctaggccaccacccttggacgcatgcgtcatcagagacatcccctcatctccaccctgggctcggtggagctgtcctccaggctttgcgagcttggtccctgtggtcaggcttagagatcaggggacaggaaagttggccatccacatcccacagcctcagtgcttggaagagcttcctttggggactccaagccttcccagctgctgtttcggcttggtggctgccctgatgctccgggtttgtctcagatgaacttgcttgacaagtctcctgctcctcactatgaagatcactgtcccccagccctgtgctccccgcactgtgctgcacgtccacctccattccactgcccctcccatccccccatcttgatagcacccttcccaggtgtcaagctgcccctcctagagtgtcctgcctaaaccccctctcctggctcctcccgctacagcatgttctctgaggacactaaccacgctggaccttgaactgggtacttgtggacacagctcttctccaggctgtatcccatgagcctcagcatcctggcacccggcccctgctggttcagggttggcccctgcccggctgcggaatgaaccacatcttgctctgctgacagacacaggcccggctccaggctcctttagcgcccagttgggtggatgcctggtggcagctgcggtccacccaggagccccgaggccttctctgaaggacattgcggacagccacggccaggccagagggagtgacagaggcagccccattctgcctgcccaggcccctgccaccctggggagaaagtacttctttttttttatttttagacagagtctcactgttgcccaggctggcgtgcagtggtg

SEQ ID NO: 62894 - DNA, 1337 bp, Homo sapiens
tcctcaagtaggtgctcagcaaatgtttgaggaactgaattatgtgggtccacacataagagaaaaaaaaaaaaaagagggagcaaaagtaggtgcacctgttcatcttgagattcatcctgggccccactgtgtgacatgctccacgcccttagtcactgtttcctggattggcgtgtggggaacacatgtgaccacatgagaatggctgagaaagagcaggactgactaccggcgttcccctgcttatggaaaggggcctggagatgaggctcggtcagatcatcttgaggtctttcctggcggcttccctgctgctagctacccctctcataccctggggttctgagcttcctcggcacttgggggcaaggcctccttggcttggatttgagggtggggaggagggaaggctgtgcatggcttccaccacttctccaggcctccccacttcccagggtcaggccctgacaccccgagagctttgcaagggtgtccctgagagatatttcctggtgtttctgcttaaacagcgtttgctgcaaaatatgtcgaagcatttgggattcagtttttagttcagaatatgccaatgttttcatttggaaggggaagtgtttctgttgatgtggtaaagagataaaataagacgttcctcaccaagttacactgcttcaaagtcaaatgcttggcttggagacagggatttatcttgggatcgcaggcccttagcacacggcctggcagaagagcaggcagggtcaaagtctgttgaatgagtgagtgcatatgcaaagggcctagacacaggagtgcgatacaatcaatgctcagtacagattttgaatggattccataggttctacttttgagagttgttctcagtctgttcatgtttctctatcttcactaaactcccctcatccaagcctctgtcacctctggcctggacaactaacagcatctgaggtggtggccctgcttcccctcttacccctcagctcattctgtccacaattgccagagtcatttttgcaaaatgggaatgggattgtgtcatctcctgcctagaaccttccaatggctttccactgctcttggctatggccttccaggtcctccatggtatggctcccacccacctcactgacctttcctggggctgttctccagccacatgggcctccttttggttgcggaaaaaccaactctctctcacctgaaggtcttggcaccactgattccctcagcctggactgcttttctccagatccttctatcaaattaaggctcagctcaaaagcatcatctccttagagaggctttctctgacccct

SEQ ID NO: 62895 - DNA, 1054 bp, Homo sapiens
gacctggcagctgcctgacagcttgtctggctcacgtgttctctctaattgagtctagctgcctctcttccttgtgactatgaccaagtcttactccttcctggaccttcatttccctacctctcacatacacagtgggctggatgctggatgcaaagctccctcgtcacagccccaaagacaggacttgaccatctcagtgcaatgaccctgtggtgccttctcccgaggacctaagagccccctgagcgcttgcaaacactgcagacaaagcgagccctggcaccagctccctgcctgcctgttctgtgaagggagcctacaaaactggcagcccctgcagttctgagctgcagaactgatgagctggggcaccctgaaacctgactccaaaatagcagcaaacccaaggccaaaaggaagtacgggcttctttgcttgcgatttctcctctcacagctttggcctagagcccctgcacttaatccccacccagctaccccaagggccacagtacaaaggtgattcgtgcctggctccctgtgtcttctgacacccctaaatctttatccttctaggacaagcgagaatcccccaaaagccaaggtcatcatcaagccaggatgaggactggaggaggagctgacagctctgcctcaaatggatttgggagcgaaggctttttccataagctttgggggtaagtcacagagctaccccaaatgtaacttagtctcggggtctccttccttttcaccagctgtcccctttgctggaggaagctttccagcccaaacgaagggcttaagaggagtctggccattcctggcatccagttagacctggaggaggtgaacggaggagaagcctgagggaggggtgtgtatccggcctgggaattcctccctctcccttgctagcgccccaacccgccctcatcctgttcagagagggcacttacaggcctcggaggcaggggagggtctcctcctggggaaccatccccgtccagatggtgcccccaaccagctgcggcggcatgatctgggcggct

SEQ ID NO: 62896 - DNA, 1182 bp, Homo sapiens
tacaccatccaatactattcttattcttattataaatctagtaattgttactacagtggtgactttccttgacccatctacgccgattccctctccgggactgcgcccaaagcttccaattcccgcccacccggaggattctgcggtcgctcctcctctcgccccgccttttgtggatggccgtaggcccgcggttgcacgatgcatgccgggccttgtagtccgttcgcggagtcctgccgccgaaggccacgcgggtgaactgcatttcccagcgccccacgcggcggcggccgtaaagcgcggcggtcgaacggccggttccggctgaatgtcagtgctgggctgtgggccggggaggaaggcggctcgcggttcctccaccgcctccgccgccgcatcctccgcttgtgctaccgccgcgggcgctgggccgctctgctggtccggcatgagaccgtgagacgagagacgggtcggggccgccgacatgtttggccgctcgcggagctgggtgggcgggggccatggcaagacttcccgcaacatccactccttggaccacctcaagtgagtgtggggggcgtagcgggaggcctcggggctggacagggggacggggcgccgagctccgggtcggggctctaggaggcgtgagagcggcggcgaagggcgcccggggaagcccgtgtggtggttaagagcgagggctcgggagtcagggcgcctgggttcgaaccctgaccccgtcgctcttggctgtgtgaccttggacaagtcgcttaatttctcagagtctccgtatccccacctgtaaagcgagaggatgcgatttcagtttatggacacagactttgttcttgacggtgtccaccaagtttcctggcggggtacttcttaaactgaacagcttagagggtcaaaggcctgggtcctggagtcgggcagatctgggtccgaatctatctgtgtgaatgtaggcctcaggttccccacttgtaaaaagagtagagtgacagcacctgcttcctgctattgtgttgagagttggttggataagagaatgaacgttaagctcagaacacgtacaattgctcattaaacggcattaattattataaaagaacagattattttccgaggggagtctaagctgggggcatgcacgctgagacccaggat

SEQ ID NO: 62897 - DNA, 719 bp, Homo sapiens
tttgcttttatttttgttttctaatcacagaagaaaaaatgtcctcattgttaaataacgaaaagccaaatgttagaaaaatgtaaagtcaagtttctgcagaattcaaccctaacgatccattgtgcaccagccattctgctgtttgcttttctttttcccaccttcccagtgtatcctagatctcattgtcccgttctgtaaccctgcctggtttggtttaggagtggcagcttgttgtgctataatctatttaacctgaccacgggcatttaggtggtttccagcttttcactattacaagctaccatttcacaaatgcacctgttgcctgttggggttagtgacctaagtgacagagtcccgagagactgagattacgtacaggctcccgggtttattagaaaaggataccacagaaagtcagccacacagtgagggggtagtagaaaaatcccagcctgataatagaggcacctccaactgtcctatggtggccccccaccacccacagagtcatctcttggaggccctggaaaagtccctgctggggagtggagggagcctgtcgctgttccagctccagggtacagctgagagactcacagttgcacatctgaagctcccagtatggtgtctgtgctgctggtggtctggaagccactagccagtcacagcagggctcagtaagacaccccaacagctccttatcctgccag

SEQ ID NO: 62898 - DNA, 732 bp, Homo sapiens
gaaatgagtctattgttaaagggctttatcgcggttctagttcccagattaccgtgtggaaggaatcttgtagcaaccttagctctcagatttgtgtcttgagccaatttatctccctcccctccttcaacaagtgtgtttccttcatgtaattatgtaatatttacaagaagggaaaaactccatggcgacccagttacataactttaaaaatatttttattacaagcagtccagactctcagggcatctcattagactattaagtagtccagcatttacccagaattctgtttccgcttttgcaatggcacaggtatttatttgctttgatgaggaactgtccttctgacttgatccccagctgttttgaatttggggcggggctttgtctttttggcccaagaggagaggttcagaggccacctcctccccggcaggtaggccaatccggacatgtcctgaccatcactcacagcccagagtcctattctggggctatttgctcagagctctgcacgaggccaagtttgtctgaatgccgctctgtacgacggcgctgagcataaaccccagcctctcctggcagcttttttctgctgcctctttccaagtctgccggcatctcctgcttgagattctgagagtccaacaggacccaagcaagccagttctcagccccaggaatcatatggaaagcatcctcaggacccttcagctgttggagcattgc

SEQ ID NO: 62899 - DNA, 578 bp, Homo sapiens
gtctagcatggttcctgcagtcaacgttgattgtcttgatgtgacaagtctcggtacgggaatcaaacacatatctctaatgagcggtggacatccggtcttggccagtgtcagagtccttgaaactggttttgctgcgggatgctttgcctgatgggagcctgagggctgcacttgagcaagaagggagcattttgctcacttctcagagacccctgccctttctgggcattccagcagagttcacaagagtggcttggtggtgtgagtcattcgtttcatgcctgagggcagtgcagctctcatccctggaggtgattaatgagtgggagtttccctagagagttctgaggccagttgagtagcagatcctggctggcctgaaattgattgcctgctgaccacttgctgggttgcttataacctggccccaggacagcttcctggtagcctccagatacgcacggggacaaatttgttagtttcatgggcaaagagaagaaaaaatacaataccttactgttaaccacagtcacccttctgtgcaatagaacaccagatctcactcctcctgtcta

SEQ ID NO: 62900 - DNA, 1670 bp, Homo sapiens
atttttcctactttttttttttgcatttttcaatgaaatattttgtatcagagatacatgtatagagtcaaaaattcaaaactgtgtcaaaggttatatagtgaacactccctgtttctccccagtcccctttcactccccgtaggcatccaatgttcattggagcttgggtgtccttccagaaattaaatgtgcccttggtcactcatgaaggtgctctgttctcttggcctcagcctggcattcagagggggcagccacagacagtgggaggatcagagcctctggcctgtgggccagacctgtgcatattctattctcctggtgttgaagagtatttttctgtgaggcccttcacctggaaaggcagcatttgggatgtgccatttccgatttttgcagcctctctacagatctcacccacaaagcatcagaggtgagagacctcactatcgattcttcgcagtcagagaaagtcagcctgagaaattgctgggtcaggaccctgccaaagtgaaatcatgaagtagtgcccttggtatattaaaaatagaaatcaaatagcagctcccatgcattggcaccgtccacagtgcctgaccctgtgctaaatgcttttcagtcttcattgcgcttgaatcctcacaataatcctgcaaggttggactccaccccatacagatggggaaataggttttatgtgacttgcccaagggtttgctgaataaaaagctaagaagaggcagaatcagaatttgaacccagacagtctggcactagggctcatgttcttgaacttgtttggattgttgtttgtgccttgtgtgacatcacactgtcctgttttcttcattggcttgtgacacacatcactttgcattgatgtctgtttgttctgtgtctaccagctgacacgggagctttggtgtggggagtttgtataattgattccctgtgtctggaatacctggtgaatgattgttgtgtgactaagcaagcagtctgttccttggtcaggttcccctctggatagcggcttccgcaggcagagcctgtctctcatttgtctgtgtcctcagtgcgtggtgctggaccaggcacacagttgtggcctaaagagctgtgtcaaaggcagctagcaccccatgtgcaggttagagaggggaggtgttcacccttgtgcaccgtgaggctcatacatgcccctcctcttttccagacccttcctggatatggtgtaccacgcgctggacagcccggatgatgattaccatgccctgttcgtgctctgcctcctctatgccatgtctcataataaaggtaagcacccttgccttgcctgacttccttgctgggccctgcatacccatagcatccttcccctctgctgcatggaggacaaagaaaggtgctttctgtacagaatttcctttctggttttggtggtcctttttggttttgactcccgctcctctttagcttctttagaatttctcaggtgtttttctaccaactgaagccacaggaattggttactcaggcaatatggaggaaggtgacttgagtgcctaacccaggatgactatattcaccctgtggttttcttttgaccccttgatttacaactgacttagcgtctgacctctttcctaacatcagaactgaaatca

SEQ ID NO: 62901 - DNA, 706 bp, Homo sapiens
gacggcagtgtggccacagagtcggggagtgggagggtgaaggtggttggcaagatgaggctgggtaggaagccatgcaggccctgtgggcatatcaagtgttcagggttctatcttaaaaacagtgagaaaagtttttacctagctgatgtgatcagatttgtatctcaaaaggccctctctggcctcagtggaagagatttatgggtcagggcagcattacagcagggagccccatggggaggccaggcctacaaggcatgaactaagaggtggtgtccacaagctggcatccacaccaggctcggacagtctggtttgccccagagacttgtcttgaatgctgctctgtccactctgtggcctaggtacaggggcttttattgcacagaggtccatccagttggatccggcgtgttctccaaaccgtcgtacctttgaagctaattattaacaacaacccaactatttgggttgtattcacctcctggcaaggcaggctgctgtggaccttccctttgctctccttctggctgtttccaggccaggacttgcctgtttaaaagtcaggctgcggttatggaggaagccttggatcctagacaaatgcagaccgaatctcagccatgcttcttcctagccatgtgactttggacaaatctattcccctctctgtgctttagttccctcattgatcaaatgagaa

SEQ ID NO: 62902 - DNA, 580 bp, Homo sapiens
cagccagccagaccatggaggctcagaagttgttggggctgagctggcctcccccagtcctcacaactttttagtcatttgctaataattaagagccaaaagttctcatcccatcttccctccagcctttggactgactgggatgccaccattttttatacaaggttcaaggtgagatagactttctttccttttccttccaaattctcatgtagaaaagccgcatgcaacttcctggtttttcaacttggcacatccacattatctttttgcatttatcttttttttactacctataccctggcctttgaattttataatacactttgcatttttctaaatgcagttggggttttccagagctgtgcaaagccaggaaatatgcatgtcatttaaatgactccggttaacctttagcctttaactggtttctcataaaactcgactctctcccagctatggtttgcattcttcagagcagcaaaactgatgaacatctacagctttcactgttccctgctgggcccccttccctttgctgcctccagtctgatgagccatgctggcagactctgggaaa

SEQ ID NO: 62903 - DNA, 1102 bp, Homo sapiens
ggaaacagcctctgaagggtcacccagtgtaaggatgcatctgccttcttcatccctgtagcccagtacccgacacacagtagccccatagccctaggcacaaatggggtagagagaccctgaccacatcctgtggaaggtccagagcagagccatcacagagggcttccgaagaccaggatacccttgttcctgggctgctgggctgctgaacagcggggaagaggagctgtgtgaacctagattccatgtgactttatctggctgcataatgagcttaagtattcagatcttttcttggaaatctcaagtattccatttggctgcctcacagagttaggcaattttatttactcatgctaaacagggccattttcagagaggaaattatgcaatgtactatgcaaatgtggcattccgagagcagagataagtgtggtcaccgatgcattgtaagatgagatcgtgtctctggcagctgggtgtcacttgataaggggatatgccagactgtacttggaactgctgctcccttggactcggtttctggtaattgtgttttcaccaagttgtcaagctgtgaactgcacgtattgaagaagaggaacaaggagtgaagcttttgcaagttgctcatccttaagtagacttcagcagtcagagaggctgcccccatacatgttctggacacatgggaacaaggagggtaaaattctcatcctccattctcccaagaagagtcttaaaatttgacacgggggaaagatgaagacacacaactggttttcctggccactgtgaaaaccagtcacctcattttactagacatggcatgtgcctttcatactgagagaaaggaagtagctgtggaaaaccccacctttggaagcagacagagctgagcccaaagctagcacttcccccagcctgtgggtacctgagattgaggcacccagcctccccaagccttcagctccctgcctgaaaatggcactttcagttagttattgctcctgggccgtgtaccagtcacaaagacagccaacccttcacacagccactgctcagatagttgctgagtgagccagtgacagatttatcc

SEQ ID NO: 62904 - DNA, 953 bp, Homo sapiens
ttgtggggaacctcgtttgtcttgtccttgacagtgctcatggatgcctatgaagtagttgctcagtgaataccgatgtgtgggcggatggatgcattggtggatgggaggctgggggacagaggatggggctggaggaattgttcagtcttgttttcccaacagactgtaaacccctaaggccagggtatttctgtcttattcaggtctggtaccctgtgccagttggtggtggtttgggtgtgagctggcaagttggacttcatcccttaagggctaagctggactttattcacttcctgtcccagcttcctactgggtttggggctccagctgtcttgtggtagatatttaactcccctgtatcacctgaggtcaggagttcgagaccagcctggccgacatggcgaaacctcgtctctactaaaagtacaaaaattatcccagtgtggtggcgggcacctgtagtcccagctactcgggaggctgaggcaggagaatcacttgaacccgggaggtggaggttgcagtgagctgagatcttgccattgcactctagcctgggtgacagagtgagactctgtctcaaaaaaaaaaaaaaattttttttttgactctcctgagtatctgggccatgccttgcttttcaccggtgttatctttatcaaaggcacctaaaccggcagggtcagtcacgtgacccagagcacttaatagttccgtggaaaagcctcgccggttccagaggcagcccttggcagctgagtaacttaggaagaatgcagaaatgacagtgtgctatgagccagctgagctgaccgcaaagcctctgaccgccatccaaaaaggcaaaaagaaaattgatgtttcattcatagacatcagttcagacctcccctgagaataacgtcctaggtgctaatgtcatctcatggtggcattttccaggaact

SEQ ID NO: 62905 - DNA, 2252 bp, Homo sapiens
acattggtcaccctgcctttgccccagctggctgctttcctgggatgtgacctttcacgttggtggccaaacctgtccatccttgacactagctcagacatcccctcctccaggaagcctcctcagatgtcactggccaggcatttgccttccttagtcttctggatccctagtctaggactgagtgcttcctgcctcctcactgcctctgacttctctggggggttgatttaacacggccacgggggcttatttccataaccccagcctctgccacaggagccgctatagggttgagctttacatcctctcagtgggctcgtgaccccgtcatccacaccttcccttttatcgggtccctttcatgtggtgtctcatcgactccttaccatagccctaacggatggacatcgctattcattcccattctacagatgcagaaactgagcttcagggaagctgaggagctcaccctgggtcatacggccagcaagtggcacagtcaagatccgaacccaggtcaggctgtgtccacagggtatcttggacagggctaaacttccaccacattgtctcttcatataatgttgaaatctggcttctctttcaatagctgccccaacgcggccggagcactgggactaaggcagacgtgagcgctagtatcgcagtcaccagcactgctacagcgccttcccttttagtgcctcctgtcaacgctgagaggtagtcacaagtatccccatggcagatgtgggaggactgaggcccatgaggtccagggctccaggggcacctggctctgatgaggctaaactcaagcttgccccttctctgcaccccaaactcctggtttctggacccagctcagcacgtggagccttgggtcacacccagcacccagtgaacggcatccgagaaacactcttcctgctgaaagcctggctttctggaagggagctgggggaaactgggagaggatggaggggggccaggtagcagatagccacactccttgcggcaggaagttctacacatcatttctgggaaccaggatagcttggcagtaactcggcgcactttgaccccaatagagcacccagctgtcactgttgacagccccccttccttcccaggggatgctgctgagctgcttggagccttcatgtcggacatccaggtgggcctggggacagccttggagctcccgggccacctgtctggccaccaccggatggagtgcccagatggggcttctgccagctgtccaggaggcagcccaggctgggacatccaagctgagccctgagctggcctggcctggcccagcccgcactgatgaggcaatgtgagtcctgtttcctgttactgtggctatgcaaatggggggaaatcagggcctctcctggggtaggcttcccggaatgatggcattgattgtcccaagaaacctggccccagtggggctgctatgggagggcagttgtcaacggctaagatccctttcctggtgcatctctcctgcgtgctgggctacatactgctgggaaaagcttcttcagcccagacctaggtcatcactgcatgtccactcccggacccactgcccatgagagctgggctgtggcttccacttcttgtcactgcatccccagctcctggtacatcgtgggagtggggcggacaggaccaggaagtgggtggcctcaatggctctcagcccctggcctggagatcaccacacccttctctttacacataaggaaactgaggacaccagactgggccagggacttgcccacgtctctctgcctcgcccagacatgccgcagcagcagtggcaaacttctgcttgcccccagaagccagctgagtcttccaggtcaagtccctctcctgctccccacagtcctgtcacacccctggctgctccccaggtcagcctctcctaggggtcgttctcagctcacatctgaccatgccactcccctgccctggcacctagccctcactcaaagccaggcctcataagccagcagtgattgggtaccttccaccctgagtggtctcatctcttgacaactctgcctcacacattacccctggtgatgccagaactccttggaattcccccttgcacctctgtggctttgcaaagctgttgcctcagcctgagaggatgcctccaacacctttctttctctctttattttttttttctgagaccgagtctcactctgtcacccaggctg

SEQ ID NO: 62906 - DNA, 2167 bp, Homo sapiens
cgcgggcgcgcgggggccgcgggcgaggaggaggaagaggaggaaggttctggccgccgtcggggctctgctgctgtggagactgcattgtcggctgccacctggttgtgtgctaccatcctacagaaggggccagccggaggggtgggccatagcgtccgggggtgcgctgcgggagagacaaagaggtgagctggggcgctgcggggccgggcaggtgtgcgccggccggacaactccggagggcggcgctcccggcggacccggccctagggggcgagcacggagcaccaagtccgcgcggatccgttcagcctcagtggacacagctagaaaatgggctctgtactccgcggagctcttcccggcgggtgggggctcggtggaggcggagtccggcctccgggcagcaccgagaggggggcgtggagagcagccggttctggctccagccgtccggccccggctcgccgccccgcgcccgccgcctgctggccaggctgggatccgcgcctggtctgggcgatttgggctagggccggagaaaggctgtgctgcgggagccccgcgcgcggggggcggcctgggtggggccggcgagggtcaggggcatcgcggccgcgaccccattctgcagcccccgaggctcgcccgactcctggctgccctggactcccctccctcctccctcccgcctcctcgcccagggcccggctcacctggcggcggggcgcgggacgccgcgggcgggacggcggggggctccggggcgctccggggcggctctcgcgcatgctccggggccaggagccgtgcagctgccacggccgcagctcgctctgttcggcgcccgcccctgcgccagtcttttaaaccggctcggaggcggggctggcgacggcgggaggccccgccccctgccggccccgcccccagctccacttttggtttctctttccgcggtggcgtccggcgaggaccgcttcggccctgtttccctctcttctggaccctcccgcggggccctctgcccgcctgttcgcacctgccccagcacccgcctctcgaggggctctggccccgaccctgcgccttccggccacttctcggacccctccttcggacttggcgaccccgattttgccccgctacctcgggttccactttctgccgccaggccctcttgggacgcgccctgacacaccctcctccgccccagctgtctccacacccgccgggggcagagccctgtcctctcctcccctgcagccagatccccctaggaggccacagaaggtgtccccaaccctgagcctgaccccacccgtagaccccctcctagcccctgctccacccgccgtcgacgccctcagtcgcccgccctgctgtcccgaagccccggccggccgcggtctctggtcttggctcgggcttcccgggaagcggcggcctgaccacaggcttcagaggaacccctggcggcgcgggcgcctccaccccggcccagttcctcggaaactgggcggggccgggcaaggtccctggtggcctcgactgccctccctgcgctcccactacccggctgcggaagaaactgaggctggggaggggctgggatttgcaatggcttgcagattgggagctctggacctggatctcgccttccccgtcttcattttggggagaggtgcagctggacgacatcaaattggagcccagtgaaaaaatggtgcattctcagacgtgatgaatccccaaacctggtttcctagccctcctctcccccgaccccttcctcatagatttccccctcctactgctccgtcaggcatctgcccttcaaagactgccttcccaccacacacacggccggggcttgggatggtgggcggtcggtggtcggggctgtaatttgcacacgtgtttgtgatttagtgattccgattgtcgtgcgaggccatggagtaggtgcctggctgctccgtgtatttttgaatgaaggcatgtgaggagccccagcatcacaaggggccacataaaaacctggctaggctgggcacttggttactggcctcacactgggacacactgccctctacagacagctctcagacggcttctctcctggaagccctggtgcccagtcccttcccgcctccctggcccc

SEQ ID NO: 62907 - DNA, 1228 bp, Homo sapiens
ctggtctcgaactcctgtcctttagtgaccctcctgccctggcttcccaaagcactgccttatatctatgtttgaagccctagtccagggaccacaggccagggaaggcacagcaagggagcaggaaagcttctaaaggtacactcagcacacgtgggttctcctcactgccaccagtgacagacagctttggtttcattttctgaagtcctgtgttcaaaatgaaaccaaatccagatgccgaaagagaaaaggaaatctgctggttgacaagcatccaccttgtgggctgttctgctggagggctgggcaccaggctcacaggaagccaggcagtgcgaaaccctgaggggctcagagtgctcggtaggatgggaccaggctctgaccccagacctgctgcatgaccttgggcaagtgacctgtcctcttgggacctgatttgccccaactgcaaagtgatctctggacatctcgtacctcacagagcagccagacatgcagagccaagggcaaaatgccaggcatggagtcggtgcttggcacaatgacctcttgtcacagggcggatggaccagccctatatccacagcttactaaaccacagccacagccagatgtgtggaaacattctcctccctatcttggcagatcctcgtaccccaaatgtgaggggcccagccagcatctgggggaagtcaagatcctggtggcttatggcacttagcttttcagtttctctttccggctttggtggcgccttgctgggaaaagtagctcctggccagggtgtgtaatcgtgaaactagcctctgccccggaattcctcagccctgcttttcctctaacccatgtgtcgggaaggttcccatgggagtctgtgcccctgggaaccccgagcagtggggctcacagtgtggattctgctgaccgctggtctgaatttaaatgggtcatttcataagtatgtggcctggggccagcttcttagcttttctgtgcctcagtttccatatttgcaagatgggataataacatatctatttcacttcttcagtatttattcagcagatatttactgagttcttactgtgtgccaggcgcaggggactcagaggtcttcaggcagacctaggggagtcagtgaattcacaccatcagtgcagaccatactgggtgctatgtgggaaagaaacagagagaaaggggtgactgggtgtttgtaagg

SEQ ID NO: 62908 - DNA, 632 bp, Homo sapiens
agtcatactgtgacatttctgaggtgcttggtgggccctgtcacttcagggaactgggtctcagagcctctggtctctgccaaaatgctctgggtttgctctaccatcaggaaatgactgtgacccagggcctgtgtcaaggaatcggagaggtgggctttcttaggctgtgggtgagccaaggagaccagtgcccagcaggacttcttatgtccttccccagatctcactggggtcttaaactcttgccttagaaattttagtataggtggtatatcaagcagcttgagtgtggacttagatccgaccagatggacaagttaacctttgtttcttcggtggacataacgttgtgaaaccgtgccccaaagagtaaagaaaccggtggttaacaaaaatgtttgagtttacaggatggcagataagagacttccttaatggtgcttgattaaatgtgaaaagttcagctccactgctacctggacaagttatctctgtacccaaatggggatgaaaacttctggcacagagtgaggaataagcagttttgaatttaattttcctgatggtgactggcttaatctatttaagttataacctaagagttcctttgttgaagagtggaaatttca

SEQ ID NO: 62909 - DNA, 1033 bp, Homo sapiens
ccccgtctccctccccagccttatctcctgactggattcttgctcactcccaataaacacggactcttaattcgtttcagtatttactaacctcaaaacaaggcaatgtaaagatgaataatcatactctgtaggtgatctgcatccacgccaaattttgagatgcgttgaaagaggaagttctttacctctctgccttcaattatttattctcgtttaacccatttcctccgttcattcctaacttgagggcgtttatttacttttatctacgcatgcgcactcctggctgctagagagggcctcttcgcccggcggtcccgccttctgacgtcgaccattggccggctctgccagcgcgctcctgattggtggctgagggccgggccccgctgcttctcaaagttggcgggaaagcggaggcggggcggaagggtgcggcgaggcggaatggcggcggctgcggactcgttctcaggcggccccgcgggggtgcggcttccgaggtcgccgccactcaaggtgctggcggagcagctgcggcgcgacgcggagggcggcccgggcgcgtggcggctgtcacgggcggcggcgggccgcgggccgctggacctggcggccgtgtggatgcagggcagggtagtgatggcggaccgcggcgaggctcggctgagggacccgagcggggacttctcggtccgcggcctggagcgggtgccgcgcgggcggccctgtctagtcccaggtaatgcccgggccttaccgggcgccctcttccctgctgcccgccgagaagttgccgaggccagattcgatcttgttgttgacactcgaacgggggcggggcgggtctggccctcctccgggcctctgcccctgcgggtccccgcttgggtacccttgctccggtccctccttggtgaagttgatctgatgataagcatcacctgccgtcccttttacaaatacagattcctgggactctcccacccctagtgggaatcttctggggagggactccggcaccttcgtt

SEQ ID NO: 62910 - DNA, 710 bp, Homo sapiens
ccagtcccttattttatggaaaccccagcctattccagccacccaagaaccttcgttaagtggctctgaagtgggaatggctacttaatttgcagggatcagcacaaaatgaaaatcaataattttcagaaattaagattcaagatggtaatagagcattcgagtgagcattggggacccttctgagcacagggccctgtctgtgcagtttgcacacagcccaggtctggggagagtacaaggcaggcagctggcttgtagcatgtgaatgaactgagtcaccctgccctttgtgggagttgacctgcatcttttctaggctgttggccagggcagggctgatgacatgagcggggcttgccctggtgtgggctgaatatgatacactgtgagaagttgaagggagggggattggagtagggtgctccaggcagcatcatctctgtacaacaggaagtccctgagcttggacacatgacttgatcacctgtcacaaggttcaaggtgaaacccagaaggccaggcaatgatgcattgaaactgtcactacccaagtcagcattttctaataccattaaacacttttggccgggcgtggtggctcacgcctgtaatcccagcactttgggaggctgaggcgggcagattatgaggtcaggagaccgagaccatcctggttaacacggtgaatactaaaaatacaaaaaatt

SEQ ID NO: 62911 - DNA, 1738 bp, Homo sapiens
gcctcaccctggccacacaccgactcacctgggcaacttcataatacagagctgagtcccccagagtctgaacaaattgctcttttcagggaacattttaaaagcaccccagaggccagacacggtggctcatgcctgtaatcccagcactttgggaggccaaggcaggtggatcacctgaggtcaggagttcgagaccagcctggccaacatggcaaaaccccgtctctactaaaaacacaaaaattagccgagcatggtggtgtgtgcctgtaatcccaactactcgggaggctaaggcacaagaatcccttgaacccgggaagcagaggctgcagtgagctgagattgtaccactgcactgcaccctgggtggcagagcgaaactctgtctccaaaaaaaaaaaaaaaaaagaaaacaaaacaaaaaaggcactccatgtggcccacgactcagacgcccagctaccctcactccagggcttcagtgaaaggaaggcaaacaggagggggttcaggacacagctgctccctgccccaggcacctcagagaaatcagaccaacaaatctttttttttttttttaagatggagtcttgctctctcattcatcctggagtgcagtggccctatctaggcccactgcaacctccacctcctgggttcatgtgattcccctgcctcagcctcccacgtagctgagattacagacacgtgccaccacccttggctcatttttctatttttagtaaagccgggtttcaccatgttggccaggctggtggtgaacccctgacctcaagtgatctgcccgcctcggtctcccaaagtgctgggattacaggcatgagccaccgtgcctagtctagaccaacaaatcttagtaaacaaactgtgttcactacaagccagactgctgataacatgtcacacacgttgcctttcttatcattcccattttgcagagcaggaagctgagacacaggaagctgagacacagaaagggtaagggacgtgcctcaggtagcccacagctatagatagaactgagacttaacccaggagaggctggctcccaggccaggcatgataccaacactcacggcttctcaaaatgcaaattctgggctcactctaaaatccagccctggggccctggctgtgaacaggggcctctgtgctagacccacgtcactccagaacagggactgcttggcagctgtggagaaataaaatctctgcctagctctgtcctttttttttttttctcgagatggagtcttgctcttgtcacccaggctggagtccagtggcacaatctcagctcactgcaacctctgcctcctgagatcaagtgattctcctgcctcatcttcctgagtagctgggattacagatgtctgccaccacgcctggctaatttttgtatttttagtagagatggggtttcaccatattggccaggctggtctcgaactcctgacctcaggtgatctgcccacctcagcctcccaaagtgctgggattacaggagtgagccaccacgcccgagctgcccagctctgttctttctctggattcgtgactcttcaccagatctgtgttactacgctagggtgtgagcacactgtgtgaaggtgtgaacataagcatctgtgtgtgtgcatattggtgtgtgctgtagaatcctagtgcttgtgggtgtgtacgttcccacttgggtgtgcaggtgtctcag

SEQ ID NO: 62912 - DNA, 1626 bp, Homo sapiens
atgtcttcacatgtgcatacactggggtgtatatctgcatctccaggtacgtgagtcttggcgtgtatgcctcaatgtgtgtgtgtgtgtgtgtgtgtgtgtgtgtgtgtgtgtgtgtgtcttgacaggtctatggtgtgggtgtgtgtccgtgcatttccccatgtgggtgtcctgggaaagcctgcctcagtgtgagcctgcaacagtgtgtgtaggtctgtgtgtgtacacgtgatccagcatgtgtgtgcatatccctgtgtgtttgtgtgtccctgtgccttggtgtgagcctgtgtcagtgtacgtgcaggtctgtgcatgtacacatgatccagtgtgcgtgtgcacgtcccagtgcaatgggtgcctgcttcagtgtgtgtgggttgtgtcccatgtgtgtacacgtgcgctcaggatgcatgcgtgtgggtcttggcgtgtgcatctcactgcatattttctttgtgaaaggacaggggtgtgtggagcctggaaaaagcacattcaatgtttccctatatttgagcaaagaaaacaaagctgtctgttttcttaatacagagcagggcaagcgggcttggctgggagggcaggggttataaaaagactaagaagctctccggcacatgggaggggccgcctgctggaggttcccgcctctgactgctttgcccaagaaaggcggcgggggcacagacagggcaggctcgggcctgtcccagaccaaagctggagccagaagcctggtcacagcctgcagggctgtggggcaggctggtgccacttggctggcagagagcccagatctgtgagccacttccggtggccctgccaggacaactgggccagcatgaggcctgggtgctgagcagtccacacagtaatgacccagttggttctgtgtatggctgcccgggggatgaacccagaagggccagccttccctgttttcacaaaaaccagaaaccacatcgcaaagagaagaacaaacaattttgaaagggaaataaatttaaaaaaaaaatgggaggagaagaaaacaatcttaatgcaaaaatctctaacgaaggcttacttacacttcagttagaagtctgtttaaaatactcactttttcatttttaaagatggaaaaataaaattaccctcaaacctgtgacccttattaagctgatttcacttttccaacatgattctaaagctcagtcatcatgctcaaaccaaccctccctgaaaagctaagaaaacagaactgggagaagacaagccaggaagcactgggacctgggggagatcaaacaccagctacaaagcatcaagaagccacacttcaccaacatgaagaacttttgttcattgaaagacaccattaagaaggccgggcgcagtgactcatgcctgtaatcccagcactttgggaggccgaagcaggcaaatcacatgagctcaggagttcgagataagcctggccaacatggtgaaatcccatttctactaaaaatacaaaaaaattagccgggcctggtggtgtgcatcataatcccagctactcaggaggctgaggcacgagaatcacttgaacccgggaggtggaggttgcagtgagccgagattgcg

SEQ ID NO: 62913 - DNA, 2508 bp, Homo sapiens
ctttaggaggcgaaggcaggcataacacccaaggtctcgagttcaagaccagcctggccaacaaggtgaaaccctgtctctactaaaaatacaaaaattagccgggcatggtggcgtgcgcctgtaatcccagctgctccggaggctgaggcaggagaattgcttgaacctgggaggcagaggttgcaaagaaccgagattgcaccactgtactctagcccaggcaacagagggagactccgtctcaaaaaaaaaaaaaaagttaaccttgtcctgctcctggaaggaaactccaggcccttggaatgtgctgcctgatggtaatgtcagtgtctttgtttacctgggggcctggaaccacgccagccagtctctgctaatgacatgatttagggtggggggtttgggccaggtgataccagcatgacctctggaggggctggagactgaggtcaactatgggccattggccatgactggttgccaataaaaacattgcacacaaggctctggtgagcttccttggttggcaatgctctgtgcacattgccacacattatggctgggagaaataagtactgtccacgagtccacagggagaggacatctgggagcttgtgcctggcctccctgccttatgcaccttttccctttactgattttactctctttccctgtaatcaacagcagccatgagtgcaatgtcttttctgagctctgtgattccttctagaaaaccatagaggccgagagtgatctcgggcccctcctgaaatgcaaacatctactgtgtgccagtcactgtttactggggatacagcatcagacagatgaaagcccctgccttcaaggagctgactttctagtgcaggaagacagatcagaagcaagacaaataggctgagtgtggtagctcagcaatttgagaggccgaggtgagaggatgaagagtttgagaccagcctggccaacgcagtgagaccccatctctatgaataagaaacaagaaaagatgacaaagaagcttgtctttcaggagcagacgtatagggggccaggaaacgcctcgagacacaggcttggcacctatgagccagtctccattaggaccaggtcatattcagctttgataagcaggagtggaacaagccaagcaagtgacactcaattttgcaagcagcagccacctgtgtccccttctcatcgtggactcccgggtgtgggtcagcatcagcacacctggcttgggtgaggatgagctggtggccacctctgtgtcatttgaaaacacccatgtttctttcacaggcggaccataggtgctgcctatcgcccgggaaataaaacatgtagtttatgagtgcaaacaaggaaaaagttcaagcacaaaaacacaaatgcctctgggaggattgacatgttagctgaggaatcccagcttggaacctgggaccggtaacttcacctgtcagaatttcagtttgtctgtaaaatggagaggggatgttcatcttacagaatcgttgtgaaattcaataacagaatgtgccccgcccatggcaggcactcaacagatactcactgctgctctgtgctggggtgatctacagtcattggtcattatcttcctggcatccagaagcttactcactaatttacctttactgtttacaggttgacatcatttcacaatcaaagatcgagtgccaattcctatagctgtcaggagctcagctgagctgcaagagggcgggctgagctgtcaggtggcaaagcaataagccaaaaatgacagcgttacgcccgtgatcactcaccgtgatggtacaagcaggaggttaaaaccggagaaagcaccaactgcccttctcccgtttccccacggaacagggcatcagttgaggatctggtgtatcatccagatgtgggggaaccaggcaaaaggctcctgacagtattatggacctgggtagggggcaagagagggggctaggactggaaaagtactgagtaacaagccagggtggggaaaagggtcttcttttccctccttctggtcataagagaaccctgaagaagatccctgcccaaggcctcagatcaggagacctaggaaggcaggcagcagggctaaaaatgtagacatgcatcagagcagagccgtggggactgagaccacgatgcaaccccctctggagatcacagggtactggctgtaccccaagtctggtgtggggagggcagcttcccctaaggcctgccaggtaaacgctttcggaattgcctatggtcaggccttaaaaaaaaaaatcacatgtgggttttttggttttttgagacggagtctcactctgtcactcaggctagagtgcagtggctcgatctcggctcaccgcaacctccgcctctcaggttgcagcgattctgcctcaacctcccaagtagctgggactacaggtgcgtgacaccacacccagctaatttttgtactttttagtggagatgggg

SEQ ID NO: 62914 - DNA, 920 bp, Homo sapiens
tattttcaaatctggggtcatttgggagtctttcaaagtcttagatgggcttggtgaactttttttgcaaagggacagatagtagatcttttagtctttttgttgctgtgttttgtttgtttttgtagagatggggtcttgctatgttgcacaggctggtcttgaactgctggcctcaagtgatccttccacctccgcctcccaaattgctgggattacaggtggaagccaccacacacccggccacatactttcatcctgatgagccatggcgtctctgttgcaactgctcaactctgcccttggaatgagaagacagccacagagaatccaaaaaccaacaggcgtggctgtgttcccgtaaaacttaaaacaggcgcctggctccagggtcgttttgccaacccccgtcttactgatctcttttccatatagacaggctgcttcttacagcaaccaagtagagttccccaaataatgcctcttaacctacataatccacctttggcacacacaggcaggaacctcagaccgcctgacaaccaatgtttgccaaaaatggagttaaaactcaacccttcacaggaagacgctggtttacataaagcagaatttggaaatattctgatgaggaaattatctcatgaaagaaatttcctcctattgcctaagctttccagagctcaaataagggcagtcaatccattcagcaggaatcctaacctatggcttacaggtgcaggcacggctccaggcagcacacacacatatttcatcctcagcaggccctgaggtgggcgttattgccccgcacccccgtctacagatggggaaactgaagcacagagaggtaaagtcacttgcccatggccacacagctagtgagaggcaggatttgaacccactctaccatgtttaag

SEQ ID NO: 62915 - DNA, 649 bp, Homo sapiens
gagatcagcctaggcaacatgacaagacctcatctctacaaaaaaatataaaaattagcccagcgtgggagtacacgcctgtagtcccagctactcaggaggctgaggtgggaggatcagttgagtctgagagattgaggatgcagtgaatcatgattgcgccactgctctccagcctggacaacagagcgacgctcagtcccaaaaacaaataaataaattttaaccagcctcacactgtgcctagcagctcttgataaataatccactctctttacacaaaccctttgataaactctgacagccaatgataagggtagagtttaccaagccaggaaacgcaggccaactctgtaagacaacaagctagtgaactgtgttgatacaagaaatgaaaatataaaataatgctaggaagaaaaagctatgtgaaaacatgttcgaacattctcaagaatcagaagagaatccaggccgggcacggtggctcacacctgtaatcccagcaaatcccttggctttgggaggccgaggtgcgtggatcaccagaggtcaggagttcaagaccagcctggccaacatggtgaaaccctgtttctaaagacaaaaattagccgggcatgatggcacgtgcctgtagtcccagcta

SEQ ID NO: 62916 - DNA, 2045 bp, Homo sapiens
ctgggcttcagacagtctttgaaccagcaccagtgcaccaggccaaggggagggaggcatcctctttgggaagactggtaggagcttggaagaccccgtggcttccacaaactgtagatttcccagtgaccactgctcagtccaacagccagtgacatcagctccactgtcgggaagtagaaaaccagtgaaggtccaactagcctggtccctgaagcatgactggcccttccagaacatacacctttcccctatcacctcctctccctgaccccgaagagcttcgggcacaccaccaactgaccacctatccacagtgacctgcaaaccagagcggggagggtatttgcctagcttggcagggaggggcgagatccacttctgccaccagtcaccagctggtcccaccagcacctacccagcaccggcggtggacggtgagcggcgtctgggcccagagctgggtgccatcagcagtaagaggacccctgcgctcgcggggtgcccgccttaccccgcggggaggggtcaggcctaggggccacggcccgcttcgctctctgattttcacctccccagggtctcccaggggcctcgggtgtccttcccggatcttgcgcgaagtcgcgggggcagggagagaaacgcgggtacccgcgcccctagaagtcaaatgtttggcaaatagcatttgggaattcgttggggtttttttgtttgttttggttttgtttctgaacccccgggggatatttctggaaatctcaacctgagtcactagagagaatcgcgcctttttctaaaaagcccaggggccgtcctctccggggagggggacgcggcgggccgcgaagggcgctcgttcgggtgggggccggacgaccccgccacgcgcgatcgggccactctgggacgcaggagctgaacccaaccggagacgcggccgggaccagcgctgggaggccggaccccgccccggccgggcccccacgccctccgccgcgcctcgatgcccgcgacccgacccgcgccccctggcatcccaggaggccccagccaagggctcagtgcccggggcccccagcaggtgctggcgccaccggccccccgctgtctcccgctggtccccgcgccccggcgtccccgcgccgcactcaccgccgcccgcgccgcctgtcgagccgggaggtctgagctggcctctcgggcgccccgagaaaagggccgggcggcggggacgggggcgggggctggacccgccggggcggagcgcggccggcttgggcttccggcttctcccgcccccgcggcccgcacctgggccccaggcgagaccaccgccggttccccgcctcactctgatcgcccccaggctccatcccacacccggctcgctcgccaccccagagcttcccaggcttacccccgagacgcctggcgcggacctggtgtctcccccactctcctatcctgcccctgcctctcggtgccagccccacccgtccgcccccgacagcctggccctccctcctgatttgccgctcgcggctctccccactttcccccctccccgcgccgctccaccacttccaggcggcgggaccaccaacctcgaccccggacccgcgctggggcgctcccggccctctggagggcggcccttctcttcctgtaactctacagacgcgtccggacagaccaagacactctctgtgccttcgggcatgttacccatcctctctgagctcggcttcctgtctgcaaaatgggcacaatagcggtcctgtctcctaagaccgactgggagtgaactgggaagatggtaaagtttttagcacaggataggtattaggtaaggcttatcagctgcctgtccgctttgtgcccccagggtggtccgtgccgccaggtaggcctttctcagccatcactgaaagcaagctctggaaatcagtagccccatttcacatccgcccctaaatgggtgccatctgcccgtctgcttggagccccatcggccggctgcagtgataacagcagcagcc

SEQ ID NO: 62917 - DNA, 1340 bp, Homo sapiens
gggatgacaggtgtgagccgctgcgcctggccctcccatttcgactgttgtggggtcccacaggatatggagtgtgacaacaacccccatccaacgcaacttaatggcttccttcttccttcttcccctcggggctcggaaatcaccactcgcctggcaaagagggttatgtgggtgcccacacagccatgtcactgagagggtggaaacagggtctcaaagtccaaggatctcctggcactgcccacaccgccaaagctcaggacagccaaccatgtgccaggtttgctcagcccagatctaaaacgggggtctctccagtgagtcagaccaggtcatttcccagcccagggactctgtgactcctgggagccgcagcaggctttggctgcaccgtcctcatcattcttgtgaaaaggggccacctggggggcagcctggagggttggtgaagaggtgtctccctccctggcttggcctgggctctctggaaggcaggtgaagaatgaggaaggaagggccttattgggcaactcccagcaggtttctgtgggaacggctgtctgacctcgtgtgggtcacctgcggttagagcaaactgcactgcatgcggccagcgggcggccagggccggcccagctcaggacgctcacgtgcacagagaacctggatggaaagttaacaaggcccaggcaggagccctcgcagagacagcagaccttcccaccccactcccagcccagaactggccacccacttccccaccccattctcccctgacatctctgtttgtccacgtccttgagaagggcggagggacgaggacagactgaaaagagatgtttggaggatgagtccgccctcttggggaatgatttcactgtggaaccaagcttggttacaccagaagctcttgggcaccatctcagggactcccatggctcctgaagacttgtgggaaccctgtgtccccctagaatcttgacctcccaaccctgcaaaagctgtcatcttggggcacagccgatggcctgggtgcctcttgatgggcaaggccagccattcaggtgcttcactctaggtttttctttggatttttttttatttgttttttggggtttgttttagatggagtttcgctctgttgcccaggctggagtgcagtggtacaatgtcgactcactgtaacctccatctcctgggttcaagcgattctcctgcctcatcctcccgagtagctgggactacaggcacctaccaccacgcctggctagtttttgtatttttagtagagatggggtttcaccatgttgaccaggctggtctcgaacgcctgacct

SEQ ID NO: 62918 - DNA, 2408 bp, Homo sapiens
ggatggatggttagaaggagggagggatggatgggtgggtgggatgcatggatgggtgggtggatggatggatggatgaatggatggatagatggatggacaaataggacaaaatgttatctgggtgatgtatacataggtattccccgtatagttctttcaacttttctttatatttggacatttttacaataaaactttggaagaaagatttttaaaaaaaaaaaagaaaaaagaatgaaacagagagaaaaggacatccaaagtctgggcaaagaaaaaagattcatctttaaaataatctttttaggccaggtgcagtggctcatgcctgtaatcccatcaatttgggaggccgaggagggcggatcacttgaggtcaggagttcaagaccagcctggccaacatggtgaaaccccatctctactaaaaacacaaaaattagccagggcctctgcctcctaagctcaagagatcctaccctctcagccccccaagtagctgggagtacaggcgagagccaccatgcccggataatttttgtatgtttcgcagagacatagtttcactgtgttacccaggctggtcttgaactcctggctcaagcaatccacctgccttagcctcccaaagtgctgagattacacgtgtgagccaccgcacccggccaacaatgtgtcgatgtggataaccttgtttgttgactgtcctctcagtagaaagggaggtccactctgccagggctgggtccttattaggcattcacggctggatccgcagggctgagcactgcatccagcacatagtagctgctcagcacatgttcgtggagcgactgagtgtgtaagtcagtgaatgaacaaacgaatgaaggggttctcgctctgatacttgttctgcagcctgggaaactgaagctcagagatgaagtgacttcaccgaggtcacacggacagtgggcggcagaactggagctacctacgcaattgggattatgaaatatttcacaagtgccaagaagtgcacatgatgcagggctctagaaggcttcctctttgatttgtcacagtccctgcagcagagaggcagcccaaggctctgcaaatcactgccacttcatcacggctgcagccacccttgtgcaggccccagctcgaggtcttctcactcgatgctggtatgggggtgatgatcatccatctggcaggtcacaaggacaaccctcgggatgggaaatctgatcctaattgctgagtcacagctaaagggcagaatgacgtcgtctgtaaccatggcatgcattccaaactcagccccagcttggcttctcctcaagtttgagtgagcccctgtcagtctacaccacccctcctcatgttcggctgttttcaagccggcacactggcaaagatgctgccaggaaagaaggaagccaagcccagggagaggagagagctggtttgctgtgggtggccaggaacaaggtcccgtgtgtggaggagacagaacacagtcatgatatcaggccgggagcagtggctgactcctgtaatctcagaatttggggaggctgaggtgggaggacggctcgagcccaggagttcaagaccagcctgggaaacataaggaaacccatctctatttaaaaaaaaaaatcagccaagcatggtggtgcatacctgtagtatctgccacatgggaggctggggcaggagggttgcttgagcccaggaggtcgaggctcctgtgagccgtgattatgccattgcactccagcctgggcgacagagggagaccctgtctccaagaaagaaagaaaaagagaggggaggggaagaggggaagggtaaaggccacatactggcatgtacagcctcccctgcctgacccccattcccaggagcccctttcagagagtaaagagagctggaacaagggagcaatgctgacggaaggacagacagacagatggacagactgcactgggggcagaagggcccgcaggctccagacgagcacgatcagcaggagaaagcaggccatgcgcaggtgatgtgggtgccagaagcaacccagcagatagaggaattccaataaccgcacagcactcaagtaaaataaaaacaccgtgacttcgcagcaagccagtatggccccctagaggccaagggcagaattttatttttatctatctatctctctgtctatctctctatctgtctgtctatctatctattttcgagacagaatctccctttgtcgcccaggatggagtgcagtgatgtgatctcggctcactgcaacctccgcctccaggcttcaagtgattcccctgcctcagcctcccaggtagctggaattataggtgcgagccatcgcagccagttaatttttgtatttttagtag

SEQ ID NO: 62919 - DNA, 834 bp, Homo sapiens
ctgggaggccccgtccccagccggggaggagccgggccccgcccgccgcagcgcggggctcctgcgtcccgagtgcgcggcggccggaccgggcgggcggagccgggcccgcggggctgctgcggggcgatcgggccgggccgctgccgcgccatggtgagccgggcggggcaggccgcgcgctcgggccgggcgggggcgccggggcccgggggcgggaagggggaggccaggacgaggaggggcgcgcgcggcggcggggccgggccggggtctgcgggcgggggaggggcggcccggcgggcgcggctcgggggagggtccgttccaggggccgcgcccgcgggctggggttctttgtcagcggcgctgcggcgagatccggacaaaggaggcggcggggggcggaggccgctttgtggggatcgcggggcgctcgcccccgcccgtgcagcccccgcccgtcctcagctacgctcccgccttcccccggcatttcggggttcttcaaaattctgggagctccggggagggctccggggataggggtccaggtgacgtccggcgcccgtctcgcgggtagggaaactgaggccgggccgcagcgttcggcgcccggttccgtgggcagcggctgcgcggcgtgggcatgcctagctcccctggtccccgtcccacaccccgcctccgtcgggccgattcgagctacctccccagctgccgtcccctctccagctgtcgccccctgggccgagccccctcctccctggagcctcgctttgctcctccgtggagtgggggagacgccggcgccgccgggcagggtggaacggg

SEQ ID NO: 62920 - DNA, 1044 bp, Homo sapiens
tctgccccccagcttcaagcaattctcatgccttagcctcccaagtaactgggattacacgcatgtgccaccatgcccagctaattattgtattttagtagatacgaggtttcactatgttggccaggctggtctcaaactcctgggctcaagtgatctgccggcctcagccttccaaagtgctggaattacaggcatgagtcactgcacctggccatttatctgctttcaaacccccatctctggccattaggaggccccagttgccctcagtccctgagtggtcatgaacactgagttggggctgggcttcccgaaggcacaccttcagctgaagaaccagaaccatgtctggccctctggcatcctttgctgcagctgtcgctgtcgcagtgttcccggctctgccgccagcgagggtgactcacctgcctggtacagcagcactcggggtttcaaaggtcatgaacaggagctgggtgagcgtgggtgagcagacgccttcgaacgccggccagcatgctttttgtcagggtgagggtgggatgggcaggtctgagaacgattaaaaatagaccccgtggaagtgctaaccgcagctcgtcaacctgctttgtctttcaggactcccgtgtccagcctgagttccagcctcactgagtggccacccccaaagtgctgccagccgaggaagcccccagcactgaccatgtctattatggaccacagccccaccacgggcgtggtcacagtcatcgtcatcctcattgccatcgcggccctgggggccttgatcctgggctgctggtgctacctgcggctgcagcgcatcagccagtcagaggacgaggagagcatcgtgggggatggggagaccaaggaacccttcctgctggtgcagtattcggccaagggaccgtgcgtggagagaaaggccaagctgatgactcccaacggcccggaagtccacggctgagccaggatgcaaggctcctggtcctgtttgcagccggccaagaggcgctgggaggggcaaaaccatac

SEQ ID NO: 62921 - DNA, 1053 bp, Homo sapiens
actctgcaattttatccaagaagaaaaactttaaagtctgtaccaaaatctaagaatacaaataaagaatttctatacattaatttcaagagccctctaatgcatgggttcttaacctggagcctgggctctagggtggggctgtaagaactctccatccatatataaaatcatatgcgcttttctagagagtgtccatagattttaaccaattctcaaaggagtctgtgacctaaacaaggttaagaaccactgcgctaacataaacgtgatttcaaaatacttacaagtgatgtgttgaaatgtctatgtaaatacacacttccagagtgtactaaggataccagtttcgcaagatgtttatttgtgataaccccaaatcgtactgttcctaggtaatctgaaacagaaaattttcctttattaaagaaaaggcctgtgccttaaaacaaccacaaaacccagtgatcaagtcttgaagcacaaacccctgcagctaagctccttctggtaacctagcctagagagggaaggaagaggcgctgaggaacctctcctcctgaaaccgacctcggcccctcagatgtcaagcctgcttctgagaggatgtctctgactaacgtctctgacaatcacttgtgctgaggagtcccctgtgtccacctatgatggtctgacctgtccccattgatgacaggctgaggcacatgctgttctctttgtctggacacttcttgtggctggttccttgtcattactcatctcagctcctactttctgtgagaagccttccttgaccaccccacctaacagctaatatttaggggagagagtttacaaagggaaactgggctcctgacccattcaggtactccctttaccaattaccctattttttatagcacttattaacatttgcataatctcattcatttatttagatttcctttggcccaatgtcctcttttttttttttttttttttttttttgagatggagtctcgctctgtggcccaggttggagtgcagtggtgcgatatcggctcactacaa

SEQ ID NO: 62922 - DNA, 3013 bp, Homo sapiens
gatttgggagaccagaagtacacctgaaatatacagcaaattttgtatgtgtgtacattcctgaaaagacacacatgaactttcatgttcctaccccctacaccccagcctactgtcaggcctttttatcaattccagggaaacaccaagcttgcccagcctcagaaactctgcatttgctgttcgctctaccgtggacacgctcccccgggatcttcccagcgctggtcccttctcctttttgtataagcttcaaatgtcacttccttaggaagtctttccccaccgccatcgtttctatgccctgcatagcactgaagctttaaaaaattatatttacttgttcactgtcccatccactcaagggagcaaaaagttcacccggacgagcgtccggcacatagtaggtgcagataaataatcgttagatcaggccgggtgcggggctctcgcctgtaatcccagcactttgggaggccgagacgggtggatcacgtgaggtcaggagttcgagaccagcctggccaacgtggtgaaactctgtctctactaaaaatacaaaaattagccaggcgtggtggcgcgcgcctgtaatccgagctactcaggagctgaggcagaagaaccccttgaacccgggaggcggaggtttcagtgagccgagatcgcgccactgcactcctgcctgggacacaatgcgtgactccgtctcaaaataaaaataatcgttagatcaatgagtgcgggaattctaaaaggggtctggaactctcgcaaggttgtggatcactacacctgaagcttaaggggaatgaaatcggtgagaaatgagggtcctacagcccgggccgaagtgacaggtccacccctagtgactccaacaggtgaggagcacccccgacccgcctccctcggcactaaagcgggacgatagggcgcagggctccacccggaagcctcgccataatgtccgcgggcgggccggggcgaggagaaggtgggaagccgtggccgcaggttccgggaggggtcagccgtcctgggcaaggtcaggcccgacttccccggctgaggccgctgcgacccggccctgcaggctccaggcggcagagcaaggggagcgccctagcggggccccagggtccgggccgcctcacctgcaggtgaacttgagggcgaggagcagcgcgcagccgagcgccacggccccgcagagcagctccggccgctggcgcgccatgaggaaggcgccacgcagcccgcgacggagccggcccgccgaggacgctgtggccagggtcgggctcgagctgaggcagtctgagcccgcggggccgccgccgccccctccctcgtcctcggcgtcctcgctgctgctgctgccgccgccgcggcctccgcattccgacattacatgctcccagtcgccggctttataccgccgccgccgcctcgggcccgaaggcccggcccggcccgttgctccccaatcccgcagctcgccgcacccgctaacccggacgctccacgtcagccgcgccgccgccgcggggtccgccccacctcacaccccagagcacgcagctccgcccaccgctcacggagtccgggcgggcaccgacaccgcccaaatccccgcccccaacgggccacgccctgcaccctacgtaaatgcacggaagccttccccgcccgcagcccagtcttggccccaccggtcacgaccccgctcacggagtctgcgcaggcgccgtcgcggggcgtggagaagctgctcccttgggataaggcccgcggggaatacttggaaccttgacaccgctgtagtctgctctcgccgcgctgggttttaggagccgtaacgacaataatcgtgtccaccattctcactacaggccccgaagcacgtaggtgccgttttttatcccaacttaactgaagaaaaaaaaaacacggccgggcgcggtggctcaagcctgtaatcccagcacgttgggaggccaaggcgggcagattacatgagaccaggcgttcaagaccagcctggccaacatggtgaaacctcgtctctactaaaaatacaaatatattagccgggcgtggtggcgggcgcctgtaatcctagctgcttgggaggctgaggcagagaattgcttgaaccctggaggcggaggttgcagtgagtggagatggcgccactgcactcccgtctgggggagagagagagagagactcttgtctcaaaaaaaaaaaaaggacttgtcctccaatgtcaataacaacaaactagacaaataaaacttcgagggcattaaggcaatatggtgttatgccacaaacagaaggcacagctaacggccagtagctgagacgccacctctgccacaggtcagctatgtgacccacgtgcaaatctcatcacttcctgtctggttctgcttctgtggatgtagaatggggcaatcaatggctgtcttgctcaattggccagacatttaatgtgtcaaccacccaggcccaacatgttgtgagttcatgtacaccgaccattttgctatttcttttctatatgtcactttttttttttttttggttgttttttgatacagggtcttgtgtcacccaggctggagtgcaatggcgcaatcatagcacactgaagccttgacaaccccagctcaagcgatccacccccgtcagcctcccaagtagtaggcaacacagatgtgtgcgactacgcccagctaattttttttttttgtggagacaaggtctctccatgttgcctaggctggtcttgaactcctgggctcaagcgatcttcccccttcgacctcccaaagcgttaggattatgtaaaagcatgagtcactgcgcccacctgtcacatctttttgtttcttctatactgccttattttgtagaaagtagctattttctcgtataacattaattcctttatttttaacttgtccctcatctctgttttgtgttattattacccttattatct

SEQ ID NO: 62923 - DNA, 1051 bp, Homo sapiens
taaggcgtgtgggctttatttagggaatgaaaatattctagaattgattgtggtgacgatagcacaacattgtgaatatgctatgctaaacaccaccgaattgtatgcttacaaatggtgaagtttgtcaagtgaattgtatctcagtcattttttaaacattaaaaaagaaatcagataacatgcctgagctgacacactagttattactttcctctacgaataaaatgggattggagtttgcttgttcacttttttttctctttccttttatcccctccctgcgcaccatgctcttctccaaagctgctgcagtaaacccagcacttgcaggatgggggtgtgatctcaccagagtaattaacattgacttcctaatgctgagaccaaggctgtgtggcaggcagggttcttagctgcaaaccagagcatgaaactggctgagttagcagaaatggaatttaccaaaaagatggttcagagcttagagaattgctgagaaggtggaaagctgaagcacagaaaatgcagggagagtttggaaaaaaaatctcaacactcatatgatcgtcaaaggttgtttttagcctagattccaaaggttaaagcaactggctttttaatcattaaacaggctgggtgcagtagctcacacctgtaatcctagcactttgggaggctgaggtggggtaatcacttgagaccaggaattcaagacctacctggtgaagcccccatatctaccacaaatacaaaaattagccaggcatggtggtgtgtgcctgtaatcccggctactcgggagactgaggtgggaggatcgcttgagcccggtaggcaaaggttgcagtgagccaagatcatgacattgcactccagcctgggctacagagtgagacactgtctgatctcagtaacctccacctcccgggttcaagcgattctccttgcctcagcctcccaagtaactgggattacaggcacccgccaccacacccggcgaatttttgtatttttaatagacatggggtttcaccatgttgaccaggct

SEQ ID NO: 62924 - DNA, 1470 bp, Homo sapiens
gtgggattataggtgtgagccacagcgcctggccagttttcacattctttaaggctgaatggctatgcagactttgtatacccctcctgagcagtctccaggaaaaagtcatgtctccccttcctttcctcttccctcctttggcttcaggttttgtttttccctgtctacacgcacgcataagctgtccctagaacagttccagccttgttttgcttctggaagctctccagaaataaaaaggtttcacatccgcttgcctccgagggagtctgacttccttgtaagccaagtttaaaccttatacatattttgtcccacaaacttccaaaatgattattgttgatacaacagataaaataatgatataaagttacttccattggaattttctggatattaaaatgttatcctcaatataacacttgcaaatgtcaacacatatcattcttttgggccccacctccactaatcaacgttcaccgagcagttccccaagttcaaggagagccacagagaagagatctgagataaaacatcatctcccagtggcccaaactagagttcctcaggcttggcattctgggctagctaattccttgtcttgtgattgcaggacattggcagtatttctgcctctacccactatgcctgtagcccctcaccccaaccccactcacaaccaaaagtgtctccagatatcgttaaatgtcagggtggggaaagcacaatcagccccagttgagaacaactgagacctaaagttaagacaacatcttacacataaaccacgtatttggacccaggtgacaggaagggaaattccactcatgtttgaagtacattgctgaaattttttagtttcattattgcttggcatttacagttttatttttaaatctcatttttttcaaagtataagggtgagatgggggttggaatgtcccaaatgctgataactggtgctaaaccctttcttctttgaaacaccgtcagttctcaatatttttgtcctataaagttggtactttactgaagtgtttacatgggaaaggatatgacataggggacttgctttaaaatactccagtaacaacaaaaaaggggggggctgtgaggtggggaggaaacagcagaatgctgataaccaggggagggtgagaagtgcaggggattcttcagtactattctctggactttgtatgtgtttgaaacattacaaaataagaagtttaagaagtccatgacactagagtaaaatggcactatttctggaatgtgcttttaaaacagtttagccaaaaggggggtagctgggtggaaataaaacaagaatgccaaaaatatggataatggttccagctggatgaggggcatggaagctcattccacccttctagctacttggacatgttggcccatgtccttaatagaaatgcttttttaaaaaaatttatatatttttttaat

SEQ ID NO: 62925 - DNA, 2861 bp, Homo sapiens
taattttttgtattttttgtagagacaggggtctcactatgttgctgaggctggtcttgaactcctgcactcaaacgatcctcctgcctcagcctcccaaagttttgggatgacaggcatgagccactgcatcctgccaagattaattttaatgatctattttcgttaatccaatttgtcccaaacatgaccatctcaacatgcatttaagtataaaagattaccaatgacatcttttactttctttctcatccgaagtttttaaaatcagatgtacgtttcacagctgggaccgcaactgaaactggccccatttcgtgggctccatcgtcccaaacggcggggggtcagtggccaccgtactgggcatggcaaggtccttcgtggttcaataccgaacacgggcaactccttttcatccctagacaggtggggacaggaaaatacccaactcctggcaaatccacccagtcccgactcaggctcgacctcggaggccccggccgggcctcaggcggccccacccctttgctgcccaggcctgaccggaagccccgctaatgggaactgacaggtcccggtcccggtcctcccgggcggcgcccccgcctccgcggaccccaaggcctctccccgcccggcccagggctgcaccccgcgcgaaaaaataaaaaaatcagaaaggggggtaaaaaagacggatgagccccaaattaatgcgccaagctctccgccggcatccttcccgcccccaagcccaagacgctgaatcgggatccccgcgatcaccagagcagacagaaataaccaaaaaaaaaatttttttttagtgaaatcaccaaaaaggagacattttgccgagggaatggcaggcagaagtgggtcacgttattctcggtgggggaaggggacggcgcgcccacccgtccctccgcgcgcacaggccccggcccggctcctctcagggtcctctcgggtccgcgggccccggaccccgccgcccctcccccgccccgcccgccgtccgttaacggccgcgcgcgagcacgaggcggcggcgcgcgcggggggggcgggggcgcgggcgcgcgcgtttccttcatgcccggcggcgtccccctacccctacctgtggggacgacgcgccggccggcggcagaaggcaggcggaggcgggcggcggcaggcgggcagcggtggcggcggcggcggcggggcctgggtgctcgctcgcagctctccctcggttagcggcggcggcagcggctcggttgcgcccgcggcggcgccctctagcggcgggaggccgcgcttgccgcccgggagacgccgccattggctgcgccggagctacgggctgggggcggtggcgccacgtctgactgggggcagggacctgggcgcgccgttcaatccggagccccggcgtcgacgcgcggcccactgggtgagccaatgggaaggccacgttgcgcactggacgcgctcggactcaagactgattaaccagcaccggggttttctggggcctcgcctgggccgcggcctgagcagaagcgctaggaggtagaacagcgtccagcggggagaggagctagagtcggcatcgggaagcccaccctggagcctgcttagcttgacgagccctcaaccggggcgccctgctctgcgaagagtaaccctgcatcctcagaacaaccgtgattgtcttcattcctacatatgaggaacggaggcgcggagccccacggcagccggggatccaaagacagcctccctccagttccatctgccggctcttggaaggcctggatccctgtccttcagggcccagcccaaatgccgcctcgtccatctgcattttacggccaggtgccccgctgcgggcacggcttcttgtaaaatgctcagctcagcagtgggcgaggcagggtccctgccccatgggatggagggcggagatcaggacccacaagagcccaaagaagaccattttggtcggtgaagaccaaagaaattcaagcaggaggatgtgacaggagcttttgggaaagcctctgaggaggtgacagccatgcaaccgtgttcggggaagtgtgccgcaggcagaggggaaatgagtgcaaaagccctgaagctggagttcggtgtctggataacaggaaaggcctgcatagctgatgtgtgccagaggggagaaagatctgtgacacaggggggccgccatgtttaatttggagttttgtgtggaagggggtcattcattgagtctgaattgggagttccgaggtctcatttatattttagaaagttctctcctgctactatgcagagattgggctgtaggagagacaagaggggaagtggggactctagctacagtagctcttccaggggtctgggtgacgtagatttacaaaccagagtattagctcaggctgccatgacaaaataccccagaccaggcagcttagacaacaggaatttattttctcacagttttagaggctgcaaatctaaggtctgggtgccggcagggctggtttctggtgaggcctctctccctggcttgcaaacagctgccttctcactgtgtcctcctatgaccttttctctgtgagcaggaatccctggtgtgtcttcctttttcttacaagaacaacaattttactagattagggccccaccctatgacttcatttaaccccagtgactacctaaaaggccgtattcaaatagtcgtattaggccaggcgcagtggctcacgcctgtaattctagcactttgggaagccgaggcagatggattgcctgagctcaggagttggagaccagcctgggcaacacaatgagaccccgtc

SEQ ID NO: 62926 - DNA, 1411 bp, Homo sapiens
acccagtgccaacaatgaaatatcaccctcatacttggcccacgagaacatcatataccatagtagagatttcgccctcctcttggcccccgggggagactactgttggctcctagcactatcagctggctaggaatgtgtatgcaacacttctgaagccttggaaacatagtacagaatgtacccattttaggatgattcaactttatgatttttcaactttttgatggtataaaagcgatacataatcagtacaaaccatatacataccaccatttttcagtacagtactcattacatgtgtcaacactttattataagataggttttatgttagatgataacaccagcatcttgctcaataaattgaagccagctttttcaacagagaacattattagaatgaaactagatgcaagaacaggaaagtaaacacctgtgtcatgttcaacaagactgaactacggagcaaagaatcacacagtgttgcaagatcttgaactgactagatgataggattacaaaaaccacacagctattgctggaaaattatgtcatgcagagaacagactggcacgattacatatgtgggtttgtcctacacaaaccagacctttaagtgaaacaagtctatccaaccatcttcccataaaacctagtttctatggaaaacaatcaattaagctaaacccccacattttagatgtatattcatttatagaagcccaaaaggacagtggggttacaaataattttatattttagatgctttcataatttaaaaagttaacattacaatttgtgttactaaaatgcaaaaacaggattggcatgctgcctcatgcctgtaatctgaacattttgggaggctgaggcaggaggacttgagcccaggagttcgagcccagcctagggaacacagggaaaacccatctctacgcaagacgtaaaaactggccagctgtgatggcatgcccctgtagtctgagctacttgggaggctgaggtgggaagatcgccttgagcccaggaaattgaggctggagctgtgatgacactagtgcactccagcctggggaacagagtaagaccatctcccccactgcccgctactctcgctaccaaaaaaacagcaaaagcaggctagactcctctaatttcagggagagctagatgtttttttttttctctttttttcagttttgctctgccgcccaggctggagtgcagtggtgtgatctcagctcactgcaacctccacctcccgggttaaagtgattctcctgcttcagcctcccaagtagctgggattacaggtgcctcccaccatgcctggctagtttttgtatttttagtagagatggggtttcaccatgtaagccaggctggtctcagaactcctggcctcaag

SEQ ID NO: 62927 - DNA, 2263 bp, Homo sapiens
ttaaaaataaactttcattctcattcaaaagcaacccataattgtttttcctggacttgcaatgcgtcaagagagcgtccactgcctttctaacctgcaaagtggaaattagacaaataagtgaaatgttttcacaataacttacacaaataaatgaaatgttctcaatctaatttagcatttgccccctcccacaccttctattttttcccttccaacttctatttcaaggggtaacctccataaccgtatctattaggatcctgcagtttatattcacagaaatctaagaatccatcaaacatgcctaagtacccacttccagtactgtgtgcagaagggcacctcttctacttaaagagattgggctagagggaaacgtgcccctcctgccctcaatgatgaaagcagtaatcccaggaaaaacgcaaagcaaaatgcatttagcatttactgagaactcctggcaattctcctgcctcagcttcccgagtagctgagattacaggcgcccgccaccacgcccacctaatttttgtatttttagtagagacggggtttcaccatgttggccaggctggtatcgaactcctgacctcaggtgatccacccgcctcggcctccaaaagtgctgggattacaggcgtgagccaccgcgcccggcctactgagcaccttcttaccatgtaccaggccaaagcgctttacactcattacctctcccgatcctggataacggggagccgaagggcccactttaaataacgggtaacagacctgcaaaactaagcgattcggtcaagcgctaatgatagggaagctaagccaggtcgccaggtctatctcatctagctccacagcacacttgcaacccaattcactagcgccaggccgcaggaccagggaaagcaggcgcccacccacgtgtgtaaaggggagagacagctgaggcacacggcccgccagcgaccgtcccacagccccggggaagtccgccgagcacgcactcgggttccggcaccctgcgcctcacgaggtaaccgccacactgcttccaagccaccctccccaggaaccactcacctgttctttatccagctgcttccgtgctgtcggggccgctggagtcgaggtggaggttccagtagcggctgcagaagacagcgaggccgaggccgaatcctccatcttgtttccacctcgtgaagaggcgcgtgtgcaaccccactgctggcttctggtgcgcacgcgcgagcaagcccggccccggaagcgagggggcgggaaccgagcctctgtgcgtcatttccgggagagcgtggggtttcgctctccggggcagtggctgctgtcagaatcccttctttgaggaggcacctgctcttccgcttttctccagctttccatgagctgtggggagtagcttgggtgtcctctcactcttactagatagaaatcaagaaagcgccttgaggcgagagaagagtcccgtcaggaggcccagtggggtcctccacactccacggtccccgcctccgggaaggccgcgcgtggcatgggcagagcgcggaatcctggctccactgcccacctgcccgttgactttaggcgacgccaaccccaggctggtgaggagtccctgaaatataaggcacgggagccacccggagccacccgacctgccacgttaagcagcatgagggaccgaaagatgagtctgggccagtctcttaggagcttctggtctcgcagagaggcgggaggtaagatcctgtacaaataagcgtggctggtcgtgcgcgtggctggcgtctggaatcccagcgctctgggaggccgaggcggagggattccaggagttggagaccagtccgtgcatatacgagactccgtctctccaaaaattataaacattagccggcgtggtggtgcgcgcctgtagtcccggctacttgggaggcggaggatggaggatcttgaggaattcgaggctcggtgagttctgatccgcgccactgcactccagcgtaggcagtagagtgagaccttgtcgctaaacaaacaggttaggagtggaggctggataactgacaaatggaataccttagaacaggggagtccaatcttttggcttccgtgggccacactggaagaagaattgcctgggcccatatataaaactaatactaatgatagccgacgagctttaaaaaaaaaatctaaaaaaaatctcgtaatgctttaaggaagtttacgaattcgt

SEQ ID NO: 62928 - DNA, 534 bp, Homo sapiens
ggcctcccaaaaagtgctggcattacaggcacacgcctccacgcccagctaatttttgtgttttttagcagagactgggtttcaccacgttggccaggctggtctggaactcctgacctcaagtgatctgcccgcctcagcctcccaaagtgctgggattacaggcatgagtcaccgtgcctggcctgaacccctactttaatagcaagcttggtcccaagttttaagctatgattggtttaatgccaaatacctagaggctgactgccaaaacctcaaagcgattcacctaaagacagttcaaacaggaacttagtacacaggaatgaactgctgtcattcaagtagccactgtgtatgttacctttatcattaacttcttcttgcccttgcacattgaatgaaaagggcaagcactatttggtctcttgatctttattaaaaatcctgaatgtagaggttcatagttctaataataattgacgtttcccccaactctactgttcacataaaaccacataactgtgatctagt

SEQ ID NO: 62929 - DNA, 943 bp, Homo sapiens
taacatttaaccatcctaaaatcagagctatagtgctataaccacatttttcacaaagggttttaaagttgaaagttgcctgatgttaagacctgtaataaaactgcgtattttccccttgactaccttaaatccctacccaaagcaatgaagctatcatccatgaagtagcagtccatgaggaagtccatgccagtaagaaaaggtgctagagtgctgttatgtgtaatagtcatcaaagatcacggagtaattccagtcattactagtgttcctgcagatcgccaagggagcttagctgatttttttccaggttcatcttgggagcagtttttgatcataggttcaacttttttcttgggttgcaaaactgcatctggctgcaagtctaacccaaaatattcgcagcgtatcagctgagaggatgccggcaactgttgaactacatcacagttcaaagtcccatattgtgagagcagtacttgtagtttatgtaaccagcaaatatgagttacctcgttacagtgaacaacctgcactgttagagtttaggaacttttgacattcggttatcacatatttcaaagattttcaactcacaaaaaaaaaatacatgggcttaattactcagtaacactttactatttgtcacttaatctcaagacaatacacactcagtccaactcttttggtttgattttacatagattttcacttacttctgcaaattaaaaacaagaaatgagtgctgtatttccccctctcccacagtaagaaacaagggtttaaaatggcaattacttagatgtttatttcaatatttcttaaattcactttattaatttaaaaaactaaataatcgcatgaaagttatataaagaacatcattaatgtgaaaagatgcaagaaaaaaatcattctagtagagcaacgttagagaaca

SEQ ID NO: 62930 - DNA, 2727 bp, Homo sapiens
ccctaagtacgggaagatgtttaaaaaccaaagttaactcgaaattttatggattagaaaatgtatgtctactagctacggtcagaaagacacgtgagaactattaaattataacaaatgctcaagtgtctgaagaaatagactgaactactgatgcacgaacacagtgagttattccaagcaatctgaataaggtcaacgattttacagcaatgaaaattctctaaacgtgtcgctgacaaaggataaaagtgtaagcttcactttaaaaagacacaaatcaatatagtctcctatcacacattaagtgaggaatcctaactttgtggcactttgtaaactttagaagcgtacacaatgctaagggtaaaacagatcttggtattgatagccaagtttctgcccgatcacaaggctgcaatgcatcttgggattccttcaggacggttgggggccacggacagtttaaaccgtaattacagtttcaatagtagaaaacgcagcagaagacgctctctcggctgggcctaaggtgaaaggaaaactcggccattcgtcctccccaactcctgggatctctaaacgcccacccaaatgactcctggctccatctgtcctcattctgcgcctcgtggcagggatccgccgcggcccccactccgttccatacggttcccatctcaagtgggtaactgcggactccagagcagggcaggggcgcggaggggcggcactcgggtccgggtctttgggcgcgctgcccgctgtccgctccccgcccggccaccgccgcgggccgccccgcgaaggccggctcccgggctcggggcgccccacccaggcagacggcgccactgtcagcgccccacgtgccgaccgggccccagggccgcgcgcccccggaccgcacccctacgccatgtgggctccggcgcccggccggacttcctcccgcgtcccgggcctttacccgcacggcctcccgcgccgctgccggctccgtggttattggcggcgccgccaactgggggtggcggcgctgccgggccccgcaggaaggacggcacgaactcggcggcgtggacgttgggcacgaagggcttggcgttgacgttgagttgccggctgaaggccgcgctgaggttctcccgctgggcctcggccgccgccgccagggagccgccgccgccgcaagggcccggcccgggggcttccatgtccgcctggtcccagcagtcaggcgccgagtcgctgctgctgctgccgctgctgctcccgccgccgccgccgccgccgccgccgccgccactgcccggatccatgatcgggggggccgtgtgtgtggtggacagagagcgggaaatggaggcaggggcgcccggccggagaggagtgggcaacgctgactgagggaaggcggcggggcagaagggccgggagctagcgacaaagatccccggcgtcgccgcggcagcagctccagtcccgactccacactcgcgacgacgacagaggcggcggcggcggcagctcaaccctcctcctcgtgtgtgtgagcggatctcctcccacccaaccacctccgacggcctcacagccaaccccacccccggcgcggattgacccctcgccgccacccgtaccttcgcctcggtagttctctgttctggccgcccccgtttccggctatttagcgcggcgggaggtggaactacaagttccggcagcgcccgcgctaccccgctgcggttttcccgggggccgacgggagtcgaagttcagggacagggcgcaaccggaagcggctccggctcccggcaggcaacgcgaggaggcggaggtctggtggccgctcggcggccccacctgtcacctggtgggggggcagcggcaggccctggttggtgcagctctgtgctgggccgaagaccgagagtattttagcccataggaggggtccactctggcctgctggacacaggctgggggaaaacggacagcatctataacatggggaagaaaaatacactcagctcccgaaaattcttgtactctcttttcaccacctttcctgcgttctctgcctcacagtctccgtaccttattctctctccaccttctttctcctcacccccagccagattttgcccttcatttcaaagccggtgcagattgcaaagctgatttcattttatgtaatcatttcgtggaagaaacaataaaaccgtgagatattccggcttaaaactgcagtgtggctcataaagcgctggggcccaggctctgcccaggcagaagggattgttaactggaaaatttcaatgactcaccgtttgtttgactagtcatataaagccttcacccaaatttttccatcctttcctcctccccgccaaagggtttgcaaattaaacagaggattgccgtattccatggtgtatccggcttacctaacagggttattttggtgagtctagcttccttatgcaccattacgtgaagtggtttccttttgaatggtctgatttgctcaagaattcccatagtacttttcatcgactgcatcttacacttacagattaggtaaacctgggaaaagaacaaaagcaaacgagaaatacttaagagttcgcatttaggcccttcatgaagtaggaaaaaatgttgctctgagtacctgttaagctttcctgtaattcacccatgtggagcccaagacagagaaaa

SEQ ID NO: 62931 - DNA, 2353 bp, Homo sapiens
gctggagtgcagtggtgggatctcggctcactgaaacctctgcctcccgggttcaagcaattctcctgtttcagcctccccagtagctgggactacaggcgcacgccaccatgcctggctaatttttgtatttttagtagagatggggtttcactatgttggccaggctggaatcgaacttctgacctcaggtgattcacccaccttggcctcccaatcatgccttgggattacaggcatgagtcaccgcgtccggcctaggagccatatcttaaaacctaattcagatcgtatcactcctctgcttgagtcctttttttctttggtagagaacggcgtctcgctacgttgcccaggctgctcttgaactgctggcctcaagcgatccgcctgcctccgccctcccaagtgctgggaccttcctagaattaggcagaaaagcccaaactccttcctctggcctgcaaggccctccctccacctcctcaatctccttttctcactcaccctctcgaactcctgacctcaggtgatccgctcgcctcggcctcccaaagtgttgggattacaggcgtgagccaccgcaccaggcctattttctcactcatcccctcgctcctgtcaacccctccaggcaggggccttgcaattgcccctccttatggaacactttccctggggatcttcccggactgggttcctctcatcatccaggtctgggctcagaagtcgcctccttagagaggccctccgggattgcccatccgcctgtgcccacgctttgtcccgttcctctatttttatttcctttcccgctcgcatccctctctgggacgaagtcgccccatcactcgtgggaacctcaggaaggcaggggaggcgtcttgggcacttggggacagcgacgcctcctcgcggggtctcgggtttaccctgagtctccagcccgcgtagcctcagcaccgctctccacaccgggtccggcgacttggatctgcgccgcggtttacgttccgggtcggcgggcggggcctcgtcggcggccaggctctacttccggggcggggcggccggggcggggctcctgtctcccggcctgtctggagctcggcagccgcagaagcggcagcggcggcggcgcggcgcaggcaccggcccggggagaggcaccatgagcggtgagtggcggccccgccgctgtcacctgccccggccgccccggctcccgccgctccagctgcacactccggcccctgcgtcctcgcgccccgctccctcgcagaccccctcccagtcgctcccttttccagacccctggcccccaggactcccggctcgtggcccctgctcacctgcgggtctctgatctcccgtggcggggcactcctggtctcctgactcctgtccatccataaaaaccagctcctaaacccctgtccccagttgttccagtcctgcgatccccttgcctagtgtccagacccccagttctgagacctcccaggtctcagtctctcctaactcctagacccgctgcgtcccagctccagttccaggtcccccatccccagtcatccccgctacccaggcccctggtctccagtccctgcagtttccacacaggcatagtctttctggacagttagtttgctgaccccagtacccccgtgtcccaggagcttctggtccccagaggagctcaattctgcaacccgtttgtcttccccatccctctcatccctcccacccctgttcccagtgctttgctcttcccatcaccagttcttcccagttacccactcggcttccctctccggtcctggcttttacatttcgatgatccttgcatattccatccttgtccatgtcttatcctggctcatcattatcatttaagatctctcttgccttgtcctgcagcccttcccttcttgtcccgtgcccagcccatctggggaccgtcacttcgtccttcttcttcccagtccaaacttcttcctctcaccatcgagggggtggtgttgatggggatgctggaagtgagagggaggtgggtgtgggcagctcgtcctcaatgttttctgaagtttagtcccttgactctaccctcctttcctctgaggagtcttattggtgttttggtgctaagtcattcctgggtgttgtatgtggagatgggagtgactcagggaagcctctcagctctcccctgactgtccagccactctgggatctggatttatttaggaagccccgcctatcctcctagtgcctgttttcccctcactgtggaattgtttctgaggatccctgcatccagccgtcctggccgttgtcttccactcaggcattt

SEQ ID NO: 62932 - DNA, 561 bp, Homo sapiens
gccaccgcacccagtcgagatctgccttgaatgaccagtagatacgtgctcagatccaaactggaggtggaaagggcatatggggagggtgttaagtagaacggcctttggcgaggaaggcatcatagtgatctaattaaaagactagcatccacctgggtattcgtgcagtgttaggttagttgtgacctgtgtgcctctgtgacacagtactgatgatgtaacccaaaccttggggactggatttgtgcagttcgcctgcattccattcctcttagggccctggttttatctagagctggctgggcagttattgacttgtgcattggaaccaagcaaactaatagcaattgttgagttgattgctgtatttgcagaagattcttttaaagatagaggctttggttaattacagagaactctcaacataccccagagtttttttgtttttgtttttgtttttttctctctgagacagacccctgatctaggtcattgttgctatgtgccatggttttggtttctgtggtatttagagagttttggtggacgtcccagctt

SEQ ID NO: 62933 - DNA, 616 bp, Homo sapiens
cccaaccttcttaggcgcctcctcgttttcttaggaagtgaatgtgccttctctgggcccagatttaggaaattatgactggagcccactaatcactcaggaagctgttgaaattctgaactggggtgtagattcttcctgtcacttggcagggagcataaacctactcaaactagctgaagcacagaggcagggcggggacagtcactggcagcaggacggggccagtcagatgcagtactagctctagaaagttgagtaagcctgagtgcattactgctctgagcgtcagcattcctggctgttaaatgaggctgagtgcttcctgtctgtcagttgctgtgtcctcatctggaaaatggggatgacagtgacaatgagagccagcatttgcaaagccaaaggagccctgcactgcagtgtggctgaccctgatgaactcatctgctcttgagcacagtcctgtgagagtggggggtgtgattatatcagctacctttgagatccacagtgaaggcgccttgagttaatctggggaaggtgccaggcacatgccaaggcccctggtgagagcttcagggacatcttgtccatggcccaggagctggggcgttgg

SEQ ID NO: 62934 - DNA, 717 bp, Homo sapiens
acctggagaccctgcaccaagccagagggcattttgaaggggctgtatttcaggccgacttcccgcatctggctggttgttccctgcctcaccaggctctcacttgtctgtggttaatgatccaggctgcagtgagtacacaaggtctcagtatcatttctgtgctcttggtttgggccacacatgatttttttttttggtcttttttagcatttgttcattttatttgaggtctgctgcattcctcctgacctccctaacagctcagactcttaatttgtttacagactttcaggaagggctgtccctgaactctaagctaggatcaacttttggtctggaggtttctagccggctatctcagctgggccaggcagcagcttatgtaaccgtttgatgcaattcagagccaatccaaaatgggcctctcgctcaggggatgagacgcggtcagacttgtttgaaatgtcagctttgtttgagctgggacagctcagtttgtaaagttggaaggcgggggtggtggggaggcagctgggtgtgagtttattgggaaggagtagcctgactgggctgcttcattaaagttgggggagctgcaccgccctggaggagagcaccccaggctcctgcagtcccacatgaagggctcacgtcctggctttgccatttactttgtccgtttccttatttccaaaaggaggtgaatagcacttg

SEQ ID NO: 62935 - DNA, 1362 bp, Homo sapiens
atgcattctaattagcacataatgagcagtgaggacgaccagaggtcacttttatcaccatcttggttttgctgggttttggctggcttccttacagcatcctgttttatcgtcatggtctttgtgacctgtatctaatgacaccagtcctcctgacctcccatctcatcctgtgactaggaatgcttcacttcctgggaatgcagctcagtgggtctcagcctcattttaaccagctcctattccagatggagctgttatggttcaaacacctccaacaatagcactcatcatcctcgtgatgacccagactgtccccacggcccccagtgagaatctctgctttagctctttcccaagtgttctctttttcaagaccatttacaaatgtattggaattttgtgtgcaaggtccctttcagttgccccgatctttttgagtccttgtctagagactggatccagtccacactgaacccactgttgagcacctgctgcatatgtgacccactctggctctcccacctctcgcctctccttgggcatgaagcttgcttccccaaggtcgctggctttttcccttggctgagtctcctgagctgagtgagttgtgcccttcgccattgttaagcacatgcttgtcagcagctggctggtctcatgatgtaccccagagcagccaaggagcgttgagtgcatggggtgggtggggctggtgttgggggctgggggtgagtacaagatacacatgtcagtcaagagggaatatggcttaggaggagctgttttcctgcagtttgatgctactgatgaaattcagtcaagatgaacgattgatattgtttgtttgtttgtttgtttttgagacggagttttgttcttgttgcccaggctggagtgcagtggggcgatctcagatcactgcaacctctgcctcccgggttcaagcgattctcctgctcagcctcccaagtagctgggattacaggcgcctgccaccacgcctggctaatttttttgtatttttagtagagacggggtttcatgttgaccaggctgatctcaaactcctgacctcaggtgaccactgcctcggcctcccaaagtgctgggattacagacctgagccaccgcttctggccgatattgtttatttgttgattcactcttcaaacatttactgttccgtgtgaagcttagtcaatcagagagaaacacaatacagctgattctgtcctgtgggtgctagaaattgaagggaaggatatgcaagcaaagaaaattttttttttttttgaggcagagtttcgctcttgttgcccaggctggagtccagtggtgcgatctcagctcattgcaacc

SEQ ID NO: 62936 - DNA, 3063 bp, Homo sapiens
actagttaatattttgctctattggagacagatttatctgtatctatatctctgtgtatccatacaaacttttttcctgatctatttaagaattagttgcaaacatcatgaccatttgcccctaaatactcaagcagataattttctaagaacaaggatacttccttacacgaccgcagtgtgatgataaaatgcaggaaatgtaacactggtgcagtattatgacgtgatatttaggctatattcatatttcaccaatggggccaatttaacctttcatggctaatctctctgactgagttgggatccagtccaggatcaggcattgcactgaagggtcctgtctctttaatctggggaacacctccacagcttctttgtctttcatgaccttgacttttttttctgggtccctcttctggccagttgcttgatagaacatccctcaatttgggtttgtcagctgtttcctcatgattaggttcaggttatgtgtttttgacaggaactcaaggcttttaatccatctccttttggcctaataaagagacactatagcaagtagacttctggtctcacagatggcaaaactcaatgccaagaggtcaaagtcaagagagatgtagcactcagtggccggggctgactgtggctcacagctgtgttttgtttggcacttgagatgtttgaaaaatgagtcaatcactggttaaagacctgatgggtcccggaggaatccggacttccacctgctcttgaagagttggaagatctggccacacagggccatattcctgtctgcctggttttgagtcctggacaatgggcacacattctctactttgctgtggcctccaccattcacaagatgcccctgtgcatgtcccctgggcatgcttcattcttctgttacctgcactgcccctctatgcctgggactctgaaagatatgttatagagctgggcgcggtggcccactcctggaatcccagcactttgggaggccaaggcgggtagatcgtgtgaggccaggagtttcagtctggccagcggggcaaaaccctgtctctactaaaagtacaaaattagccgggtgtgcacgcctgtaatcccagctacttgggaggctgaggcaggagaattgcttgaacccaggaggcggaggttgctgtgagccgagatcatgccactgcactccagcctgggtgacagagtgagactctgtttaaaaaaaaaaaaaaaatccaggataggctcccagttgtgttctctccatctgctgctctgtagtcttcttggggcctgtcgggaaacaattttctatttcatagtagtttctcttgcctgttctccccccaaccccctttttttgaaggtgtttatttgggttgccagacttgtgtttatgtacctcttcatgcagtggtactgttggcattcactcctccaaaaggtgagttgtcacattggtacattagggtattccacactggcttccatggaagcccagttgagtccatgagaggctccctcaccttcccattatttagggaaatcctgcatccctcgagggacctgatgcagctgagggaaatcggataatcattttctgaagtggtgaggttgaatccaccatgccctaggagttagctaggggatgagctggggaagaggactcagtcgtttgatgcctgaccttgaaatatgtccaggtgataatttgagcattattccaagtgtttccctagtcctcactccctaggagaaaatagtcctccttgatttggaatatgatgacactggagccctggtttgcaatttatgagtaataatgatgatgacaatgaattactaaccgctaacatttatttaataattaccatatgccagacactttatttatacacacacatacttattttaattctgtctgtagtttctgaaggtagatactttcatcatcccattttataaatgctaaactggggctcagagaggttaagcaacttgcccaaggtcatacagaggtagagcaagcattcccgtcagggctgtctgacctgaaagcaaacactttttaatggcacaaagtgctgaaatgagctgccttcttggtgccagaggagtagcttatgtaagttttgagtgagggactgacaagtatgattccggctgttaagtttggaaccctgtgattttcccattgcacccaggatattttgggtgtgtgtcatctgtaattaattaccttcttgagtgacgagttgtttgggctgtttctctggctctggatatgcaatacaggggccagtgtgccattctgagtgggatttaccaggtggctaatgagatgggctttataaaataaatagtgcaaggatggttacgggggagagagcactaaaaatcaaacaagctttttacagctccattttccaccccctccagctggcagaaatgagatgccacacagcttaatccagagaacagccaaggaggaatgcagacatcctggaatttgagtcccctggcagcagcccttgccctgtcttattagagaaaactggaaggaaaggaaaagttacccagacttcttgtacgtgggaggtaccactgttttctgaacagggttatgagcaataatcgttatgattgtgatatggcaggagggcacatggcagggagtggctcccaggtgccagagtggcccagaagtgtcctggaggcttgccaaaatacagattccaggcttcaccccaagagggtgattacagagagggcctgggaatctgctttttactttttaatttttcacccctgagtctgttaatgtgtttcctacaagcaaaacattctcctttgtaataacaatataacaatcagaattagaaaattaacattgacacatttctgctgtctaatcttcacattatgctcaactttaaccagtagtcccagcaatgtcttttcttgcaaaatggttgagtccggaatgacacatggcatgtgattttcatgtctgttcgggctagaacagttgtctcttttcttgactttcatgac

SEQ ID NO: 62937 - DNA, 2129 bp, Homo sapiens
cctctctcccttctctcttgtttcactctgctccggtctattttgtatttgtttgatgggctgaatctcaagtggcctttaccttttcagatactaagtttgtaaacaggagacctcatcgttgctctccccactgcttgaaataactgccttctgggcactgttttcacctgcaaccctgttttgaggagtaattgagagaattagatgtaaagttcccagcacagcctttagtgcagagtgaggcttcataagctgtttttcccaccacctccctcactttttacacagactccaaaacccctgggtggtttgggaagttaggttatttgatttgtgcagagtacaaggtcagggcaccgtttcattcattcagccaacattgattgaatactccttgagtaccaggcacagttctgggtatacttcaggcccaaggagactcctcaggtttagtgggagagatggacactaaacatataagcaagcaggtaatttcgaatacatattctgatacagcccaaccttttcccacaaggccttgtaaccatctagagaaatccctggctgacagataacagaagctctgttcattgggtacctgtaacgtgctgggccccggggtagctttccctgcagcttttttccttctaacagctctgtgaggatgggactgttgcctccattttacagatgtgagaaaccaaggctctgagaggtggatgtgctgaagctcactgtattagtcagggttctccacaaaagtggaccaataggggtgtgtgtgtgtgtgtctgtgtgtgtagacagattgagattgatcgatattttaaggaattgacccatgttatggtggcatctgtcaactccagaatctgcagggtgggcctctaggctggagtccagagagaaactgatgttgcaactcaagtccaaaggccgtctgggggcagaattcgtacttccttatgaaacctccgttttttgtttgtttgtttgttttttcttcttaaagccttcagctgattggatgaggcccactctcattatggaagataatgtgctttactgattaaactgttaatctcatttaaaaaatacctttacaatgacatttagactggtgttgggtgaaatatctgggtactgtgacctagccacattgacacatgaagttaatcattacagtcatccacctagaaagtagtagagccgagattcctacccagatctgtctgttaaacccatgctttccccagtgcttctgaagtttattctctcagacgtgttctagggatagtgtatgttgcctctcctgggcctcggtggtggtgtgtgacgagctagcccagagacgcctgcctatgtggggcagcctctgtgtgactggctagcatttaccatgtactttgtcctgagaaaaaatgcgccatgttcgcctttccccccggagactgaaaactgattgtgtgccatgagtcacatggggagccaggttagagtgggagggactcggaagtggacatcagggttggcggaaagcagaaccattgactttccgcttctcaggagcagggctgtgtgtagactggacctgctctttgtccttgaaggctacttcgtccatggtagacagaagccattgcctggaagaggagcctggggaagtgttaatagaactggagcgggaaaggcaggcacagagcttctggttggaggaacctgtccaatcccagccctgtcatttactagctctgagctcacggaataagttgccatctctgagcttcagtatttccatttgaggagtaaagataatatatattttatatatgtttgtaggccgtttgtatatcttcttttgaaaaatgtctgttcttgtttgcttactttttaatgagattattcatttttttcatgactgatgtgtttgagttccttgtagattctgggtattaaccccttatcggatgtgtactttgcaaatactttcttgagtggagaaagaaaacgtggtatgtatacatcatacaatactactcagtcataaagggctgggcgctgtggctcatgccggtaatcccagcactttgggaggccgaggtggttgaatcacctgcggtcaggaa

SEQ ID NO: 62938 - DNA, 742 bp, Homo sapiens
gtctctgatttacaatctatagccagtcctgccagttccaaaatataccctggagatgaatggccatttgtgactgtcctcactgctatcgcctgggtcaggcccccagagtctctttgcctgggatgctattgtagctctgagctggtcacctgctttccatcctggctcctgtgcagtctgctcttcacacagcagccagagtggtttagcaatcagcaaacaggtcacagctcccagctcccctgatgaaaggcctccaacagctttgcctcatcctgagaataagatatgaagtttcccctgcagcctccagccccgtgtcatctgccgccacctgccgtcctgctctgacctgtcacctcgtctctgtgtgtaccttctttcagtcacagtggcctttctgttcccggaagaagtcccgcgttcccatgtcatcgcacttgccattccctttgccagaacattccccccgtgatagccccatgatggagcttcgagtcagtcagttctctgtgtggttgaggtctccccacagaggcccagcctccatgtctgcaggagctctcctgaggcaccctctccagtgtatgttttgcatagaaattgttactcccggaaattctccttacttatctgctcatttgctgcaagccagatgtaagtgctcagcagaactgtctctcatgttccactccccacaggtcccagggccctgacccatggcagtcgctcacaatgt

SEQ ID NO: 62939 - DNA, 1168 bp, Homo sapiens
tttctgcacatatcttaattatgacttcatgggcttgtaccttttaatctctggtttcatcctctggaatcatgggaggcctcactgtctccttttgtctcaggggaatgatagaacccctggtgactgtgaagcagaagaagagtggccaggtgcattggaccgggcttcagtggggcctcccagttgagagtgatgcagaaaattattgttgttgtgatatgtcaaacagtaggggccttgctccggaccagggatgagtatttttcttccataaagggtggccagagagtaaattctttacaccttgtggatctaacgcctctgcttccagccctcaacttggctgtcattccaggaaagcagccagagatgctatgtaaacagaacacagcaatgctcatttgttatgtggatggaattgtgttgcccccatcatttacatattgaatccctaacccccagtgtgaatgtatatggagatagggccattaaggaggtaattaagataaaacgtcattagggtggggcctgtgtgcgtgcagagatgagacagtgtaaagacaccacaaaaaagatggtcatctgcaagccgtggagtggcctcaggagaaaccaaccctgctggcaccttgatcttggactttgcccctctacaactgtgggaagtagatttctgttgtttgaacaaccgtctgtggtattttgttaccacagccctaacagactaatacagttccaataaaacttatttacaaaaatggatgatgggctggatttgactcatggtagagagtttgtcacccctgctctataggactgtcaatattgttattaaatcaggaggcatctcttctgggtcaggggctggagatgtaatggggtgaactgcatcaggcctctgctcccatggaagatcctttctagtgagtgagatagacactcaacagatacacaactgcgtagccaggctgttctcagatacagctgagtgctccgaagaaggcacggggtgatgtgattgggtgaatgctggctggggaagggagatgttgcttgaagtacaaagatctaggaggggagcatcccaggcagagagacagcaaaggtgaaggccagaagcaggagagcttggcagattggagggactggctgtagccagtggggc

SEQ ID NO: 62940 - DNA, 1025 bp, Homo sapiens
agctgagatcgcgccactacactcaagcctgggcgacagagcgagactctgtctcaaaaagaaagaaagaaaatgaaagattcggctcctcagttgcaccacatttcacatgctgagcagccagacgtggctgatggctcctgttctggacagcacagatctggaacatttaccccacacacagaggtctgcagggcggctgccttggaacaagctctcctagcgtgtgggatggcaagatggtggtgtatgtgccaagtcaggatttagaaggaccacactggccatgaaaggccacatcctgcggggagaagggcccccgctttttcagcccttcatggcttccagctccttggaagaggaagtctctgtgtcactctcttacctctcatgtccctctgatctttcttaggaaaaacagcaaggctggggtcattgcctttggcaggtgacaagcttaaggttaattagattgttttttttttttctgtattcatttttacatttgcctcctagttatgtcacagaattctatttttccatttaccatggtgatgtacagtccccctttaaaatatattttaggtaaaaaggaaatgagtcagcttaaagaaagctactaaataaacaatcgtgaaaacagtccaaagtttagcatgatgctctatgaatgattgatatttgggtagcactataaaggaacagatagactgtgattaacaaataccagtataataattagtagccacctctcactggtttgtgtgttgtgtaatagctcattcaatccttgtagccatcctgtggggtaagaaactcttaccccattttataggtgaagaatcaaaggcacagagaagcatctcatttactgacatgtttttcagcccccaaagcagtctctgacaaggtcctggtctttagagattctgtgttactgaaggagggctgaatcaagctctttaaaaatcctaaaagcagctgtgcatgatggcatgtgcctgtagtcccagcagctccagagg

SEQ ID NO: 62941 - DNA, 1444 bp, Homo sapiens
ctttccgaagagcacgccaggactgggtatagtggatggattgggcgatgggctagggtgccctcaaaatgttgcagacagaaggcagggagggcctgacccagatggccaagaggaaagggggacatgggtttggaaggccctaccaagaggggacgtggggccccactgtctcaggtgtgcagcaccatctgccccgtggtcctcatggcaagggggcagcagcggcattgccattctctgggatgaggacggtgagagttgagtaggtgactaggctgcctgctggggcaatggaaggggagcagcagaagatgccgagttttgaggctgaatatctgggtgcagagaggtcaaggggacaaggaggggaagcccgcttgggagcagatgagatgaaaaggaagcattggggtcagaaactggtctacgtgcatcctgaaggcaggcccagagccaggcgagggcagagtgaacgtcttctaggatggccgcctgtgagctgccttcaggtagcagtttctcccaggcatgcctcaggaaatgtatgtcttctcccctctcacgtcacaagaaaaaccagtcaagaggtcggagagtgtgttataaccgtcctgctgaaaattaagatgtagcaatcacagtttggaggaatccacagcgacagaggagaggcaggagcaggaggtgtcaccacatggagctgcaggtctgggtcgccgtttacaggaaccaggacaggaacatgtgggagagacgtggtcacgatctcattagtcaggattgccttgcactgatgccatgctgtaactgtgtgttcctggctctgtctactgcaaacaatgaatcattcttgcaaataaatactaatatgtttatgtaaattgtgtactttctgtgagtggcattccaagaagtaaaaagttttggaagcacaataagtccttaaattggcattctggacaccagactctgtagcgtcatgagccttgctagcaggtgcctgtgttgtgtggttctttcagcagctcccagcagcgttcacttgtgtttcccagcgtttgtatattcattctaggctgtcgtgttttgtaaatcctactaagctcaatattattaagcaaacagttttagatgtctatgataatggataagtagtgggaaggatgttagtaatagtttaagaataacttatgatttggagaattcctaagaacttgcaggaattctgacttcaccatctgaaatcccagtctgtctgaggtatttggaaacactctttgggatgcgatttcctgatataaaacgtggaattggctgacatatgggggatcacagaggttacgaagtcagggtcaggtgcccagggaaagagagggcaggaagaggtgttggccttggatggaagctggggacagggcaggagcctggagtccatggggca

SEQ ID NO: 62942 - DNA, 614 bp, Homo sapiens
ccccagagaaaccgagtcagcctacatgacttccaaggggacctggggccagataagccctgccccggtgagaccaaatgagctggagcatgtatggaggtgcggaccctgcagtcagtttgcgagtgtggaggacccgagacatcctgtaaaggcaacttggtctccctcccactcacctgccaacattgctgcaatacacatggtttatctgaaattccaaggccagagtgcacatcagctcacatgactggcaactctaaatagagagccctaatggactgaggcaggaaacgtctaaaagctcaatctgctgtatgtcatgaccccttaggttgggtttatgccacatcggtcattttgaagtaggtgtttgatgccagctcagagactgtctcaggagtgcctccctggcctgggtagctaccctggaggtcatctccctgttctctgttggataaaggaacctcccccatctgtgacattcccttgggcccaggcttatgacctgcaccttttctgacacctgcccccaaagcacaggatgtgaattggtctctctccagataccccacgaggaagcaccttggacattctgcacatgataataatgc

SEQ ID NO: 62943 - DNA, 6966 bp, Homo sapiens
tttatcgcagcactattcacaatagcaaagacttggaactaacccaaacgtccaacaatgatagactggattaagaaaacgtggcacatatacaccatggaatactatgcagccataaaaaatgatgagttcatgtcctttgtagggatgtggatgaagctggaaacaatcattctcagcaaactatggcaaggacaaaaaaccaaacacagcatattctcacttataggtgggagttgaacaatgagaacacatggacacaggaaggggaacatcacacactggggcctgttgtggggtggagggagggggaggcataacattaggagatacacctaatgttaagcaagttaatgggtacagcacagcaacatggcacatgtgtatttatgtaacaaacctgcatgttatgcacatgtaccgtaaaacttaaaattattgccatttaatggatgggggaactgaggcccagatagattaaaaggttgaagctaatccgtatacaagtttgggttaaagttctggcctgtggctcacatggcttttttatattttgtttgtatttttgagacaggttcttgctctgttacacaggctgcagtgcaacggcacaatcatagtacactccagcccctacctcctgggctcaagccatcctccctcagcctcccaagtagttgggattacaggcacatattgccacaccccattaatttttgtgtttttagtggagacagggttttgccttgtttcccaggatggtatcaaactcctgagctgaagccatcctcttgcctcggcctcccaaagtgcaggtgttgtgtgagctactgtgcccagctatgcgtgccttgtttatccacagaagtggtcagaaagcttcctgggagcagggctgtgggttaaggctctgaccaacccacgcacattccccatctccaaacacaatgagcccgtagcaatgaacccttgttagccgatttcatcaactgaatgcactttcctcagatctgattagacaaacaggctagcctgaatcccagctggggtgggaaagagacacagggaaacaaaacacaaccggctataagccaggggatggccaagtatttctgtaaagggccaaatatttttaggtgcagatcatgagattcccattgccaactattcaactgatgcgtggacaaggctgtgttccaactcacctttatttactaaacaggtgggccaaagtttgctgacctctgcacactatgatcaatctattgaaagccagtcatggggatgggggtacctgttagatctgaaaaaatgagatctgtctctgttctttataaagtgggggaggaagggcggtatggtaagaaaatgaacaaattctgtgctgaagactgaataatggtatttacctttgatttcttgtttactgcatgtcaggtgccgtacattattcgctgtaagcctcaaaaactcaggaagatttagccccattctccagataaatgaagtggctcagagatgttaagttgctggagatcacataggcaggattctaacacgaaagcttattctcatttcgctatgttccactgggcctgatccagtctcagcctcaattctcctgtttgggtggtgctatgttatccagcaagatgaccctgcaaagtcaatgctgtgtattcaaggcacaatagacagtcttctagaggcagtagcctccacctagcacaatatggtgacaaggtagcccaagctgtctgaccacttcagcccaaataatttcacacaagcatgaaaattagagaagatgtcataatggtgtcagagggatttgaaccagagcaactccatcttgggtaggagctggataaaatgaggctgaaactattgggctgcattcccagacgcttaagacacttagtcacaggatgagatagctgtatcttgtgccgacctgtttgctgataaaacaggttgcagtaaagaagccggccaaaacccaccaaaaccaagatggtgcttaaagtggcctctgaccgtcctcactgctacactcccaccactgccatgacagcttacaaatgccatggcaacatctggaagttaccctatatggtctaaagaggggaggtatgaataatccaccccttgtttagcatgtcaagaaatagccataaaaaaaggcaaccagcagccctcagggctgctctgtctattgagtagccattctttattccttgattttcttaatcaccttgctttcactttacagacttgtgctttctttctttcttgcaggagatccaagaaccatctctctcgggactgcatcaggaaccctttcatgtaacaataatggtagaagcacctgggatttgggaaaatcttggagagtactttgaatttctaaaaacccatgaaaagggagattttaaaaattcaccaagtgttacctagatctttaggggtccagagatgccaactagttttggggctccacaccacaatgcaataaaaaaaatgaggctgctttggtcgaaaagggaggtaacaatgttacaggcaaggggtcctgatccagacccccaagagaggcttcttggatctcgtgcacaaaagaattcaggggcaagtccacagtgcaaagcaaaagtatgtttattaaggaagtagcctaagtactgttagccatagagtagggcattcccaaaagaaaggggaatgcatccactctaggtacaatgcttgtttatagagaataaaaaagatcatgaggggccgggcatggtgattcacgcctgtaatcccagcactttgtgaggctgaggtgggggggatcacttgaggtcatgcgtttgagactagcctacacaacatggtcaaacagtctgtactaaaaaatacaaaaattagccaggggtggtggcacgtgcctgtgcgcccagctacttgggaggctaaggcaggagaattgcttgaacccgggaggtagaggttgcaatgagctgagactgcaccattgtactccaatctggacaacagagcaagactgcatcaaaaaacaaaacatcttgatgagagacatgctctgctacaaggatttgtaataattcttaattactacattttacaagaatcagtattatcttcgaagcgaaattacgaatccttctgttcaaggtatcaggataacatgacactcccacatctgggtctctttagtaagcattgaaggatgtaatacctcttccaagattttagcctgtcaattgttaagtacaatgagttctgacatcccatccaaagagccaatctatcagtacacgttcggctcccgttttgtccattttaaagtttaacttcctcgttctcatctccttgcccctagtttcagtaaacaagcttttccaccagttctaatcagtaggtcacatgtgttgccctggtcacctactccatcctgagtcaacgctggttacctgctctgacttcaatcatcgtgagtcaccggttctgtagcagtcattcctgcttctcagacttgtacccactgctctttaaaatagccattcggaattagcttacactgtggtccaaccctagccaataggggaatgacagcagtagaggctacctgtctcagaaataagaaccccttcctctcccttggttcagctgtgctctcgccattgctccatctgtaagtcacccttctatagaagtaaaattgccttgaggaaattttcaagtgctatttcttttgtggcatcaataatttttaagtgttattaatctgttcccttaaccagaaacatctagaggccaagaatagctaccagtccagaatgccgcctcccaagttccagcctcattttcctagccctcattcaggacggagttgctctggttcgaatgcctctgataacagacccaagaagtttcttactcattcccccgtctccccaaagcccacccccgctgcttaaaaaaaaaaaaaattcactgggctactacatggtgcttgaggttgaagtctttgagccttgagattgtcatttcaatgcaaatgtttgtaaattagatgaaagtcacagatcaagccagatagagggggaagaataggggatgtagaccttggccatgctcccaaggagaacggcggcagaccagcagatgttaatcattaatccgacaaacatttcgatgcctctgccctttgaactcaagggctgaaggacagggaccaagacaggatgcttgttccttttctttccacgccttccaccacctctttgttaaatatagtgaactccaagtttctcttcaaagaatcattatgtcagtatgttcagctctctcattctttgttctccattttaacgttttttgtggttttccttcacccccttgcctctagattcagtgagcaactttcccaccagttctaatcagtagttcacatctgttccactggtcacctgctttgacctgagtcaccctggtcacctgctgtgtcctgactcatccttagtcacctgttctgtaaccgtctttcctgccaagctactcacccccaccactccgactcatacccctggctttctttaaaataggcaatcggaattagcttagactgtgtggtccgaccttagccaataggggaatgacacagcagtaggggctacctacatcaggaataaaaaccccttcccatcccttgttcaggtatgccctcagtattgctccactcacgagttgcacccttctatagaagtaaaagctgcagaaagttaaatttacatttcagtgctatttcttttatggcaccgattatttataacatcttggtccatgagaagccttgtgacagccactgtgtttggaatccactctccaaaaagaaaagcatcgtgctcagggccaaagctgcaatcatgcacgtgtgctctccttgggcacatcgtctcttttcagacaaggttatgcattatcagtttataacttgaaatcacagaaagagaacgttgattctgcagtaacagtaagtgtttaaccgtgtatactaaaatcttcatgtgagagtcgcagttctctcatgaatataccttgcatttcacagtcagccaagttggctcaagactcagggtaataaactctaaattacggtaagtctttaagttacattgaaaaaaccaccaaaaaaaagaacttaaagtcagaagaatggaaccatttgtctcttatctacctaggacctggaagcccaccccgcccctcccccaccgcgccgtcgagtcctcccagctttgcttcaagttgtcttgcctttctagacctgccccgtctttccagaccgaaccaatgttcatccagcacgtattgatggatgtgttatgtctccctaggaagtgtaaaagccagttgtgttctgaccacctcgggcacaggtcgtcaggaactcctgagagtgtcacagacaggtgtgttcaactttggcaaaataaactttctggattaactgcaacctgtctcagattttcagcatttacagatgtacacatgctcactctagagcctttgctcttgacccctgggtgcccctgcctttcacagacacctgtgtgctttctgtaggcagatctagggaattctctggcaagaaagcatttaggaacctgcccaggcaattcagtggtcagccaatatggggactgggagttaaatactagctctctgcttttacctactagttacaacattaagtcgctacagaacaccctcagttcacctcttagtgtatcctttgaaaaaggatacactaatctctttaaatgcatgactggtaatcaaatcagataatgcgtgtcaaagcctttgagttatgatatgcacatataatccattatcatagttctaacaagtacttatcactggaaaatagtaagaaatcttatttttgcctaaatggggccatcccccaaagtataagagaaccttgttacagaagatttaactacattgaacgagtcagaccaggcctggtggctcatgcctataatcccagcaatttcggaggccaaggcacgaggattgctccagttgaggagtttgagaccatccccgacaagatagcaagaccttgtctctacgaaagtttaaaaattagccaggagtggtggcatgcactagtagtccccagatacttgtggaggatcactcgagcccaggagatcgaggctatgatcttaccactacactccagcctaaagcatagggtgagaccgtgtgtttaaaaaaaaaaaaaaagttggggggtgggggggtaactcagcattggagataccaaatgacttcagaaaatccttttctcccataaagcagaagggccaaagaccagaaaaacattaaaggagaagaaccagaaaactaataatacggaggacaaaaaagaatgacgaaaccaatcctttccctagtaattgaaacaattaacaaggatatagctgaagtaacttggagctgaaaatactcatttcatggatcagaaagcatcaacagaacaggtgaaaggagatctctagcttggcaaagttcttatataatcctgcatatatccaggataataaaatgttaaccacaataggccgcagttttttttaaaaaaatccagaatagaacaaagtttaaaggattgagccatgacctaacaattttatgccacacgaagctactggtctcatgtttaaacaagacatcatacaagaaagaagaaaaagtgacactaactcagccctctatattaaaatgtgacataaagcttgaatagatatactaatatcaccctgctctaagaattaacctccggtcaatagcaactgtattaatagccttaagatgtccccaagtataaagaacaagagactcatgctatcgtttttgggtggtggggataggggaaagacaggg

SEQ ID NO: 62944 - DNA, 5375 bp, Homo sapiens
taatatatgaatttgggctggggggaacaaacagttcatcgcaagtagtcaggacgagtaatggcagctgcagtaataaaacatcccaccatatcaatggcacacattacagttccatgcaagtgtgtggcagtcagccttccacacggtgcttcgagggttcaagctctttccatctgtggctctgacttcctcattcccatgggtccactctactcagctggcagacagggaaagcgagtgaagcactgtatggggtgtgtgtacgaggcaggcctggaagaggtgcctgtcacttcatctcctgtcccacttgctagaactctatcgtgtggctgcattgaactgcaagggagactgtctatcggggtgtctggaataaggaagtggattgaatgaactgctagccaatctgtgccaccatggtggaaaagagtttgtgatgaaatcgacttaggaaaagttgtttttaaaacagttagatgggggctgggtgtggtggcttacacctgtaatcccagccctttagaaggctgagacggcaggattgcttgagcccaggagtttgagaccagcctgggcaacatggtgaaaccccgtgtctacaagaaatacaaaaaaatagccaggcaggtggcggcgcacacctgtagtcccagctacttgggaggctgaggcaggaggacccctgagcccaggatgttgaggctttggtgagctgtgatcacgccactgcactctagcctgggcaacagagtaagactgtctcaaaaaacaaaaacaaaaagacaaaacaaaacaaaacaacccagtcagatgaattaccttactgtggaacatcttaggtcctttagtgaactactgtgcattgtgaattgctaagacggcagggagtgaatggtgtttctcatcctgacttaaagactagccctgttttgctcaaagagcttcttgtggcaaaaatatcagtgtagagcaataggtccaaaaccaagtgaagagggatgagtgtggagggggggaatatgaccgggtgttgcaatgtggatttcgtgggatgagcaaataaagctcaggaagtcaacatcaacacagaagaggcagcctcacagtgcagccccggtgccctgccctgactgtggaagtcaccatcctggcccccaatgagctcatcgaaagagggacgttgttcacgggcactgagaggtcagataagttcattgcagttgaaggcaataaagcaatttgaaaacttcagtacgtcatctcctgtgggtcagaagctgtgcttttcttggcatcatcgtcagcctcaagatgggggacaaacactggcattgctgagaaatttcttgagagctccagggaggctctctgcatcagcctggtctgatgcactggctggatggaagtgcagaaaaccggttcaaatgcagaaaacctcttttctgaccacctgggtccttcggagctgatgtggggtatacagtggagtccagattatgcaagcttaggcagggctgcctcaagtgcggtgggaaggtagatgctggaaacactcagaactctgctcaaagcctggctctggctttgtttccttacctgtaaagtggggacaatagaccctgctccaaatgaaaatatgaatacagataacaacaacaacagtgatgattaattgaacacttactatgtacaaggcaccgtgaactattttacttacatcatctctcatcctttcagcagtggttctcaaccaggggtgaatttgcccctcagtggacactgggcaatgtttggaaacatttttggttgtcacaaccaggggaggggtagtgctactggcatccagtgaatagaggccagggtaagatcctacagctcatgggacagcccctagagcaaggaatgatacagcccaaagtgttgacattgctgaggttgagaaatctgacttccagggatccttcaagattgttccacccttccccattttacagatgaaggaactgaggctcagacattatctaatttggagaagtctagacctgaaccgacccgatagccattgtttgcaatgcctctgcgagcatgtgtgtgtgtgtatgtgtgtttgtgtgtgtgtacatgccatcccccttcctctcaccattcttgtttattgaccttgagcaaactcctcttcctctcatggttgttccaatccgtgctaatcatgagagtgtgcaactcatggtactttaaaatcaataagaaaggcttagctgggggtggtggctcatgcctgtaatcccagcactttgggaggccgaggtgggtggatcattgaggtcaggactttgagaccaacctgggcaacatgatgaaaccccatctctactaaaaatacaaaaattagccaggtgtggtggcacacacctgtaatcccagcttcttagaaagctgaggcatgagaattacttgaacccaggaggcagatgttgtagtgagccaagatcgtgtcactgcactccagcctgggtgatagagtgagattcggtctcaaaaaaaaaacaacaacaaaaaagtaaactagctttccatttcctttgataattttaaacatttacttattagataatttttttgtaaaaaagagtcaatgtgtggccgggtgcggtggctcacacctgtaatcccagcattttgggaggccaaggcaggcggatcacttgaggtcaggaatctgagaccatcctggccaacatggtgaaagcccgtctctactaaaaatacaaaaattagctgggtgtggtggcgcgtgcctgtaatcccagctactcgggagggtggggcacgagaatctcttgagcctgagaggtggaggttgtagtgacctgagattgcaccactgcactccagcctggcaacagagcgagactctgtctcaaaaataaaaataaataaataaataaataaataaataaataaataaaacaagtcaatgtggcaaaaagtgtgaagatgatatattaaacatgactgccatttgggaaatatggttctagggctgtccagctggactttctgcaatgattgaaatgttctattctgtgctatccaatagccacatgtggctattgagtacttgaaaggtggctagtgtaactgaggcactgaattttaaaattttattttactatataaagacaatgcagatcttgggtgataaccgtgattgataatgcatgcctggaatactgtctttaggaggactcagcggtcagtagttctgtgacagattattaatgcctggtgtgggtatgagggggaatgtgatggtgagagtgtcatttattggccatccctagactacgttttcttagagggtccttctagctctaacatttcagaatgatatattcttccctaagccttcggtagaatttagtacccaattaatgatctgtctaacccaggatgtcatggaactatttgtttctgatttctgtgttttttagaaaacctcacaccatctgcttgtttcctgataaacgtagagactactgattagaaggcttcactttaaagtatttacccatatctacatgcatttgcctgaagctaattatttcaggctggtgagatgtgagtcaccatttccttttctcaagaaagacactaaaaagtcacctctttagaggcaggggatcattaccaacggaaaaggaaggaccccatctgtttaatgtgtggctaaaagtggggtgctggaaataacctttctccacgtgactacagagttgggacaggctgtcaacaggcttcggctatcttggagagaaagtcccagattctgccatggagaacagaggcaaggcatggcatggaacgctccctccacccaccgccatagaagctgaatgtcaagcaggttggcagctttccccagccctcccccagtgtccctgccaggcacggaaggacgggtcacagggctgaccctggctggcatttcagacagctttataattacaccatctatttttcaacttgccactgaccttttggtcttctcatttgtgagcatgcgagcatgtgtgtatgtgtgtgcgttggatgtgtcttcttttatctttgcttgatgctctcatcctcatttccttttctcttctcctctggtcttgtttatcatttaaaccacaggttgttagggccaagttggtttctctttccttctgctttatcctattatggaattatctagaatgagccctgtcatctctctgacctcactttcccatctgtcaaatcaaaggttttgattggatcataagaattggtaacattgaattttttttttttttttttttttttttgagacagagtctcactctgtcccccaggctggagtgcagtggcatgatcttggctcactgcaacctccgcctcccaggttcaactaattcttctgccttagcctccccaatagctggggactacaggtgcgtgccaccactcctggctaatttttgtatttttagtagagacggggtttcaccacgttggccaggctggttcgaactcctgaccttgtgatctgtccgccgcagcctcccaaagtgctgggattacaggcataaaccactgcacccagccaacatagaactcttgactctgcccaccatattgctgtcacctgctgtcactgccttagtccaagtcctcatcacctgtcaccattgggaccaaggttctatcactccagaatggtacccccacccttgggctcccctccaatctgttcatgaacctgagctagaggcatcttttggaaatgcccattggatcatgtcactcccccatcgtccttgtaccctccaagcccagcctccctaacatgtcctctgaggcgaatcatcaggtccaccatctgcccacctctcgtccccactctacgtcactctcctgcactctctaccctccagccctcctggccctcagttcctcaagcatgttagtctccctctggtaacagacatttctgccggtggtcccctatcctagaacagctgttttctaacatggttgcatattggaatcgccttgggagcttaaaaaaatcctaatgcccaggctttaccccagaccatttggatcagagtctttggaggggcagtgtgggcaacagtattttttttttttttgaaatggagtttcgctcttgttgcccaggctggagtgcaatggtgcaatctcgactcaccgcaacctccgcctcccgggttcaagtgattctcctgcctcagcctcccaagtagctgggattacaggcatgtgccaccatacccagctagtttttgtatttttagtagagacggggtttcagcatcttg

SEQ ID NO: 62945 - DNA, 5740 bp, Homo sapiens
gtactctttaaatttccccagatgactccaatgagcaaccaaggttgtgaaccaatggcctaggatgccctttttcctttcctccgctctcatcaactcatcccttagaggcgatgtcaaaatttcatctctggtttccacctacgtctaagttggaccccttgttttatgctctcacaggaccatgggctgtattttgagagcacatagctcagtttgcaatgacatatgtgttagtgtgatgtttgattactgtctttctccctgactgtgggaccagcctctaagatggcacccaatgttctccacctcctgctgttacaccctgtaaggtgtgatcccttcccacattgtaccagccttggtttctgtgaccagttgcatatggcagaggtgatggtatgtcactctcaagattaagttttaaaacacgacgacttccatcttgaggattctctctcccctggatcactaactttgggggaagccaatccccatgtcatggggtcatgaggacattcaaggcagcctatgaagagatgcaggtaagaaacaaagacctctggccagtaaggaattgcagccagccaagagccaagggggatcacctgagatcgggggttcgagaccagcccgaccaatatgatgaacccctgtctctactaaatatacaaaaattagctgggtgtggtggcacatgcctgtaatcccagctacttgggaggctgagacacgagaatcacttgaacctgggaggcggatgctgtagtcagacgagattgtaccactgcactccagtctgggcgacagagtaagactctgtctcaaaaaaaaaaaacaaacaaaaaacatactcccttgtcaagcctaaaaccccctccccagcctctagctctggcttatgggagtcagttgcagaggtagaatggacaagaaatgggacttgagatcaacattgtggaatgttgtagcaatcaggcctcttttggtttgcaaacaacagaaaactgactgaagcaaagaaagaaagttattggcagccaggcactgactagcttcaggtatggctagacccaggggttcattctggtcccttgcttctttcttcttattctctcttctccctgtttctcttccctagtttcttctatgatggctacattccttggtaagctctcttctaggtgggatcccccaccagttccaaacatgcaccaccccttccagcgaactccagtggaaagagatcttctgctaatacatccaacgagaagcctgggatacacatccttggtttgacttgggttctgtggccctctgtgacacccctggcatgtggccagaactgtggcacctgatacctcacaggtacttctgcttccaccatggcaaagcccaggataacgccagtgccatctaaacaacagaaactaatgtcggggatagtaggacctccaaagtacagtgagaaggcataatgggccaggcatggtggctcatatctgtaatcccagcactttgggaggcaagcagatcacttgatgtcaggagttcaaaaccagcctgaccaacatgatgaaaccccctctctactaaaaatacaaaactagctgggcgtggtagtaatcccagctacccggaaggctgaggcaggagaatcacttcaacctggcaggcaggggttgcagtgagccaaagttgcaccactgcactccagcctgggtgacagagcaagactctgtctcaaaaaaaaaaaaaaaaaaaaaaaaaggcataatggatgctgcacaggtgtccatcataggtgggtggttcccatggacagtaagtcaccctggatggaggttacatttcggtggtcagaaagactgttaatcaaatccaagaaccttctataaaagagagatgagtcaccaggaaatcactgggtgatttccatgagaaggagccatcagatatatccctggcacagagtaggtactcgataatttgctgaattaatgtagaaatgagtgtaaagtctgggcacagtgggtcacacctgaaatcccagcactttggaaggctgaggcaggaggatagcttgagcccaagagttcaagaccagcctgggcaacatagctccctaccccatctctacatttttttaaaaaaattagccaggtgtggtggtgcacgcccgtaatcacaactacttaggagactgaggcaggaggatggatcacttgagcccggaagtcaaggctgtggtgagctatgatcagagcacagcactccagcctgggccacagagcaagaccctgtctctaaaaagaaaaaaggaaatgagtgaaaggcagtggagggcacactggggaactggaagacccctagctggtttatgggcatcgtggaaagtggcacatggaggagggaacagcttctactcagagggagttgcagacaaagtaaaacgaggagtaagaggggctcaggactcagaggagaggctgagaatgcagggggatttgcttcacagaaacaagagctctgggggcttcagtggaaaattgagagaaggaggggcaggaagggggaaaggaagcgtgctgtgtgtgtgcacaagaacacaagtctgggcccagcgtggcagtgcacacctgtaatcccagcactctgggaggcagaggtgggtgaatcacttgaggccaggagttcgagaccagcctgaccaacacatgaaaccccatctctactgaaaatacaaaaaaaaaaaaaaagaaaaaagaaaaattagctgggtgtggtggcacacacctgtagttccagctactcgggaggctgaagcacgagaatcacttgagctgggaggcagaggttgcagtgagctgagacggcagcactgcactgcactccagcctgggcgacagagtgaggctctgccttaaaaaaaaaaaaagagagagagaaaaaaaacccaaaaaccagaagactggattgacagattgagctagagtctgcatggagaggaaggatgatatgggtgggggacatggtggaatgagctgtcctcagggtgccatataaagtcctggaagcaaactggagtctggcgattggtcctgtgtttggatggaaaagcagaggtcactggggttgagaagtgtctgtgtgagagagaaagagaacctggaggtcacctcctttctcccccagtggcgcatggcttttatcttactgattttctggaactgaatgatgtaaaccaagaagaaagtgttgttgtcaaattgacattctcagtctgtaattaactactcctttctgtttttaaacaaagcatactgtaaaatttattagtatcaatgaatatttgtatccacgctaaatcttttaggtattgaactgtttcctttatgttaggtctgatttcatcacaataaatggtacccaggggcatgatgattgcattggttgtttaatctgaattttggatgcctggcaaaatccatgccaatacaattagctttagagcacctgacggatccgactggagccaagatcagcaaggtgtccacgacaaagaggagcagacatgagttcccaatttctggttccccaggatctgatgtgatcacctgtggaaaaagcccatcatgtactgaaagggtgttaaaattatcagccctgctggggagatgttgctgaactgtctacacaacatcaaaacgcttgttttcttaaatgataattagagcagctccatgggagagctagttcataaagacgctccccgtgaaactgctccatccacacaaacaagccagacgcggtgctgtgaccagaagggcagaggccaccgctaattagacatgacatcagcatttatactctgctgaccaattacgtcggaagaagtaaataaagctaatgaaactttcctttcatccaagctaggagctgcagactctccgtaggtgagtaacgttggcccagaaacgcctctgctggagatctttcgggtaatgtgtgactttattcctagaattccttggagagaaaaaaaaatacttaactaaattgaataatgaaataaataaacttggttccatttgtcagtggagacataatttgaggatgaaaataatttacttacttttttttttttttgaggagacagagtctcactctgttgcctaggctggagtgcaacggcaattctcctgcttcagccccccgagtagctgggattataggcgcacaccaccatgcctggctgatttttgtatttttagtggcgatgaggtttcaccatgttggccaggctggtctcgaactccagacctcaagtgatctgcccaccttgacctcccaaagtgctgggattataggcgtgagccactgctcccggccaaaaataatttacattccagtgtctgattccaagaggagcagacctgcttcttcatctaaaagaagaaagcctggggtcctatttgtgaacatgctttatcctttttgggtaagggagtacatatgtcattccaactccccctgccacagaaggctagaggcttggtacagtggaggggtaattggtgctgggaccacaatgcttgggtttgaatcccaactctgacactcacaagctacgtgaccttgagcaagttcctcagtgtctgaggtctcagttttctcatctgaaaaatgggaataatcaaaatacttaccttggtggggttgtttttagcgctcagtgagttcatacatgggaagtaatcacaatagtctcaggccacgtagctgacgtctcagctgcctgctcctttatagacaagagggaaagtttgttttgttcctttgaagctgcattataaaaaaatttgactgctgctgtgctatcaaatgtagtttttttttgtttgtttgtttgtttttgagactaagcttcactcactctgttgcctgggctgaagtgcagtggtgcaatctcggctcactgcaacctccacctcctgggatcagtgattctcctgcctcagcctcccgagtttctgggactacaggcatgtgccaccacactcgactaatttttgtatttttagtagagatggggttcaccatgttggctagttggtctcgaactcctgacctcaggtgatatccccccacctctgcctcccaaagtgctgaaattacaggcataagtcactgcacccagcccaaatctagctttaagaacccagtctgggaggctaagcacattttaagggggaccatgggcccctcatggatgcacggctgggctctgtgctgggggatgagggtggaggaacaaacacgtgatgtttgaagatgatcaatgtcatgattatctattatgcaaatactctgcacagacacaatggacagtgcagaagcatttggttatattctgccaagatttgctcatgtatcagtgctaaggtgtcaagaaggctcatgttaaccttaagggaaaggtactatattgtccccattttatagataaagaaactgagtctcagaaacaggacatgacctacccaaggccgcagaatcattgagtggcagagctagcaatggaacccaggtggcccaactccatccctttaacacttctcccttccttttctttctttccttcctttttctttctttttcattctttctttctttttctttctttctttctttttctttctcttttttcttttttccttttctctttccttctttttct

SEQ ID NO: 62946 - DNA, 2462 bp, Homo sapiens
acatatatctatttccgcctctctagccataaactccaaactctcttgcctttcagattcataaactgaagaccgatagcaaaatgatgttcagttaagcaaattcaacatgtctgaaccttcataaattcggtatagtgtgaatttatgatctaaatttttttttactatcctattattctattcactgtgaaaaatatttctttgaaaagttactggatttctttacacactgctatggactgaatgtttgtgtcactcccaaattcgcatgttgaaatcctagcccccagtgatgctgtcctgcagtgtgatcctggcctcgggagacgtctgtccccagcagagctaatcacctttactctttgggtgaaattgaaactgataatattttgatgtcaacgcatctcattcaagagctgagctgtgaaatcctacgaagccatggcaggggtaggtcccgtgcgtgccccaaaaccaagaaagccaggctttggcaaaggaacaaacaaaagcagcagcagcagcagagaacagaaggccatgcggtcccagtgatggcaaaagtcactgatcgccacccttcctggtcagatggccacctttcctggtcactgatctccatgcctagaccctcccctcctcctccaggtctgactactcttcctgtccctggattctcaatcttcccaagtctcaacaaccccagccacctcatacattcataaattcccccttcctcagaatccatgtgtctacccgccctcctgcccctaatgtgaacacacttcccgttttccacagggagcctgtggttctttatttggttcttctccctacaggagccccctctcatttatttttttaacgtctccctttcataaagtgtagctttctgaggttatccaatcctatctggtgaccgatccaggaaaagaggaaatgaagctggccctcctgtgtggcttggggagaacctaggtaagaatgacaggctgggtaatgaatggcagctctggttgcttgcaagggtgatcctggtcattgcatcacgagaaagtcagtctcacgggggtcttggtagccctcctttccagctgacagccctctgaggctctgcacgcagagtttttcatttctttgtacaccattgctttttcaggtagaagaaaacagagacgcttagtccctaaactgcatctcagtgatggaggggcacactcgggttcactgtggcttttgaacccacccatttgagggtttagaggctctgtttgatgacagatgaaataatattgattttaaaaccagctccacctctagaacatttcgacagagtgttttcaagccaaaccaaacaccagatgaagccctcttagttcaaggcaactttatttcaccagcagctgcttgttagctgtggatctgctgtggtgaacacacacaggggcgcctgtctttccccatcatgagacgggccccccatgctaaaagcagtcacatttaatacactcagggaaggggggcccaatttctaaacctgatgtctacaaatctgattaaacaaattaaaggggcatgtgcacattataagcaggttcttcatcttacaaaagcatccagtgcagagtccctctaaggtcctcctgcatagtctatttataaaaatccaatttcacaggaccttctccacagctgacaggcagaggccaaaagggagaataccagcttttctttggccccacaatggacccaactgaaaaaaatgttaaagtgtagcataggcaggtgctgtggctcacacctgtaatcccagcactttgggaggccaaggcgggaggatcacctgaaaccaggagttcgagaccagcctgggcgacacagtgagacctctgtctctattaaaattaaaaaaaaaattctttaaattaggccggcatggtggtgtgtacttgtagtcccagctattcaggagctgaggtgggaggatggcttgagcacaggagttagaagctgtagtgagccgtgactacagcactgcactctagcctgggcaacagagagatctgttgtacaaaaaatgtgtagctagcagaaaaaggtaagtcagattcactggaaaacatctgctcccaggaagctgcaggcaaatgtggcttattcaagactaaggtgaacagtttcctcctggacataaagtggcaaaaatggggtcaaatcatctctgatgggtcccttctggcattggaattgcatcatttttatgacgagcataccagtgatgctcatgtattaatcactgacattctctcagggtaaccttctcacaagcatacagtatgcattcttttttttttttttttttgagacaaggtctccctctgttgcccaggctgcagttcagtggcacgatcatagctcactgcagccttgacctcccaggctcaagcaatcctcctacc

SEQ ID NO: 62947 - DNA, 1303 bp, Homo sapiens
gaccaactaagttacagcaccttgagggtgaccaactaagttacagcacctcgagggtgaccaattaagttatagcacctcgagggtgaccaactaagttatagcacctcgagggtgaccaacaaagttatagcccagggctgaggggtttcccaggatgtgggacttttcagtgctaaaaccagaacagtcctgggcaaaccaggctggttggtcaccctaatttggaagaagacagattccaaagcataactacaagcattactacaaatttgaagggcccaatataatgcagtcggcctacagggtttgcctaccagaactgcacagggggatcttacttacatggggaaaataaaacccacaaaattgaatgtctctactggcttccctttgaatgttttgtattttacagatagagcctcagatcctgggcatcgatattccacatggatcctgtttgtacctcttgtattcacaccggggaaactgcaaagggaagactgctaagtaatgtaagggggcccgtgcctgcacaaattcttcctagcaggcacactgggggccttagcagcgtatgtgttgtgagcgagtaacactttgcatccgcaacggacttcatgcctttcagacaatctgccagaccagtcctaatggcaaccttttaaaaaaggatgacaagtccttctagcaggctgtcacatgttgccagattaaaacattgtgtaattatttacaggagacggtggggtgtcagatcatttggctggaaagaccatgtttccaaataaatttgagagatagctacagctgctctaaaacagagcaaaatatatggcaacaaaaggaagaagaacacattattgaggcaaatcatgcaattaagtatccactctttgtcatagggcattttggctgtccctgcttctccaggcaagcttttggaatattctgaataagagctggagagtcaaagaaagagaaaacaaagcccctttctatctcccatacttttccttcctgcaggaaaagggacacagtaccatgcagttgaacaccatgtcaagtgaggataaaggaaaacagccatgacatcactccattactgccacccccagtgtgcctcacaggccctgcaatttataatcttgtttaatcctccaagcaaccgaggaatacagatatcatcgcccctgctgtacagataaggaagcagaggctcattggggtccaggagcatgcctgtggacaaatagctcctaaatgacattgagttttaaacccaatctccaaaaagcctgta

SEQ ID NO: 62948 - DNA, 1306 bp, Homo sapiens
gcgccattgcactccagcctgggtgacagagtgaggctatatcaaggaaaggaaagggagggcagaaggaaaggaaagggagagaaggaaaggaaaggaaaggaaaggaagggggaggggcggggcggggctgggaaagggtgagcatgctgacattgatgcacacttttgaccacagtgaccccgagggaagcacttagggggtggtcaaagtttattttaaatatagattttaaatttacaaggagaatgtctctacatattacttgtagaatttaaaaatctaataaagtaacaataaaaagatccgtatctaccctcatttaaatcctacaggagactaggatgacaacaacaaaaaacacggagaacttcatgtttcaatatatctacatgtatctatattccttatttctaagtgaagcacagatttctgtctgtttcattcactaacacagcacaaacatctagaatagtgcctggtgcaaagtagactctcaatacagatttgttaaataaatgaattgactatttattcatgtgttccagaaaactgtactgggtgcctaccatgtgctggcttcttgctaaagatcacgggaaacaaactgtgaatcatttaaccagcattcactgaataccttccacgtgccttgcactgggcactaaatgaaagtacacaccaatacggacacacagacacacacacccccactgccctttaggaacttggaactaagcttgggagaaggcgaactagcagaggttggagcaatgagataaggccttttcctggccagagcctcaatcctggctttggttttcaaaattatgcctccgaggctttgcttattatggcctgtcttgtaccagaattatgttcatgggtttgtgtctgcccagctggaggaaaatgagtatcaaccttcctggattgtggaaccacagaaaaacaaagggctttattctttgcctgaagcccagcaaaccaaagcattctttgttcaatggctttatttcccaattctatacattcattacagaattagaaacctcccagtgggggtcaggcatggtggctcatgtatgtaatcccagaactttgggaggccaaggcaggtgcatcacctgaggtcaggagtttgagaccagcctggccaacatgcagaaaccttgtctctactaaaaatacaaaaattagctgggcttggtggtgcatgcctgtaatcccagctacttgggaggctgaggcaggagaattgcttgaacccgggaggcggaggttgcagtgagctgagatcgtacc

SEQ ID NO: 62949 - DNA, 1825 bp, Homo sapiens
gtgcctatagttccagctactccagaggctgaggcaggagaatcgcttgaacccgggaggcggaggttacagtgagccaagatcgtgccactgcactccagcctgggcaataaagcaagactccgccttaaatgaataaataaggttttaccatagaattaccggagaaacctactttagataaggtagcaggtaaagtctctgaggaagtgaatgaactttaaaatgaggtgtgacggttgagagagccaggctcaccaaccctgctaaagaagcagaaaacagcaagcgccaagaccctcagggaaagaacggccttggcccttttaaatgcagttcaaacaagggcaacaacaaaacctgttgcagaactgggcaagagagagaatgacaaccctgaaggaagtggacacaagcctgatcatatagggcatttagggtgacttccctgggggtataaagctggtgagagcctgggaggcgatctggctgcaggcagcaaaaagccacagaggggaatcaacaaaccagaaacaaacctccctctttacttagcacctagcatgcgtccaacaccgggttacaaaaatacttttgatctgtttacgcttccaacaaccctatgaggcaggtattatcaaacccatttttaaggcaaagcagataatctaaatccaaaatccaagcacttcactacgactctcgaatgccctccctctctactgctctgatggggcagtgttaccatttcggtgaatgacttaaataaacgtcattatggagtacagaatacataacggtgaacaaccttaataaaaccgacaccctctaacatgcaccgaacgcttatccagtaacacccacaagtattcccgtttcacagatgtggaagctgaggccaagatgctaatgcacagcttggaaaccaggtctcgctgcagagtccaagctgtcattaactatgctttgctaccctcctcttacttcccttctctgggggaagttaggtcaaggccaaggaggctcctagaccagatcgctctctcggcctcgcctctcaactgcgcccctggaatccctaagagcaggctttgatgcagctatggcggctcccaggccccggtgcagccccggatggtgtccgactggcggagcgcacacctgaacaaaaggttcccccggcggaaggttccgcagccccagagtcccctccccgggtgaggggcgggcagtacctgcgggaaacgcggccagggtcctgcccctggctctgtggaaaacaccccccgcctctgcagccgacatggcgagcgagtttctggccttcacttagaacactgcgtgggtggaagccgcgcgacttcacacagaacaaccgctggacctgtcccgctttgggcgacgccctttgatctcggggcgggactggggcgggacggggaggggcccggtggctcggggcgccactagtgctgcctgggcggagcggaggcgccagcggcccctctgggatcgacctgcgcgcctggcgagtggagactgtctagggcacgcgtgggcggggataaggctttggggtcagtccttccctaaaggcagagttactagatttaacaagtaaaaatgcaggactcccggttaaattggaatttcagatttttttttttaaagaatgactgacttggtataaatatgtcctatgcagtatttgggagctacttacgttaaatttttttttcattatctgaaattccaattgaactgggcgtcctaatttttttaaatttttctctttttgcaggtttgaatggaagcgtcctgattt

SEQ ID NO: 62950 - DNA, 827 bp, Homo sapiens
tgctagcaggcattagagaagaaatgaggaggcaaatttcttgcctcttgcagtgaggttattcatatgatcatagttttctaaaaaaaaagaaaaaaggctagtttcttataaattatctgcccagccctttattttaaaaacaaggaacctgagggccagaaaagaccaagcaatccaagttcacagagagagtcaggcagacccaagaccaaacctgcataatcatatccacctttgaaccccacaaatctcattctgctgcttctttttgaaaacaggcaatgaagggagctgctgttgctttgtggaaatatgttcccatgaactcaatgacctccctgctgcttagaacaaatcttgatcaggcagtgaataaaccttccagacaacagtattcttgcttcaggagaggcttgtgggaaaatgcagtgagctcaggtgccttagagtgagaatgacagacagggctggaaagagaaatcttgcatttacttgacaaatatttattgtactaggtggtgggggtgtagcactgcacactccagacaggttcctctttctggagttacagtccagtgggaaaggcaataattaactaaactacccttcatgggatttaaatgacaatgatggtacgtgctatgaagaggttcgggatgttgtgtgaacatatgactgagggacctgacctcatttggggccagaaagcttttctcttaagcttagaccatagaccatagaccatagacagactggcttaaacaacaaatggagatataaagaatgaagagaacttaatgagaaaaaggggttgagggaggggc

SEQ ID NO: 62951 - DNA, 3362 bp, Homo sapiens
tctcctaaagtgtagtgtcctgagctaaaaccttccagagcgtgctgagcagcatcatgtgaaaagggacaaatggattgttttctccaggggtgtgacaggtatatgatgattcagggtggctgctttgacctggctctctctagactccagagcattttgggattctgaaaatcaaaattattatctttttgtgtgtgtgtgaattactgagtgttgcaggcatcagtcttgacctctggggctcaagtgatcctcctacctcatcctcctgagtagccgagactacagatatgtgccatcatgcttggctaattgttctatttttttgtagggatgggtttgctgtgttacccagggtgaccttgaactcctgggctcaagcaatcctcccaccttggcttcctaagtagctggaactgcgggcaggcatcaccatgcccagctaagatccacttgtggtcttcaagggtaggcccaacttggcttattactcattcactcatttctccttactcaccacctgcttgcatctctcctcatgctcagggatgggctggtgggtgaaaatcttgcaaggcacttaatacacacatcactcagttgttcataaaagctgaatgtttaatgacttaaaaacccccaactttatgatggtataattgacataacatcaaattcacccattttaagtatacaattcaatgatttttagaaaatttactgacttgtgcaactatcatgagcatccagtgtgaggacattttttgtcaccccaataagatccttgtgcctgttctcatccctaacctcaggtaaccactaattgattttctagctctagagatgtgtcttttctggacattacatgtgaatggaattatacagtatgtgatcttctatgtctggcttcctttacttagcatgtttttgaggttcatccctgtcttagcaggtataaattcttcattttttattgctgcataatattccatcatatggatagaccactccattcacacattggcgaacattggagctctttttaatgctgagatattatgagtaatgctgctatgaatactcacttgtgagccttttgtggacacatgttttcatttcttttgagtagatacctaggagtggaattgctgggtaatatatattaagattatattcaacttttcaagaaaggaatagcttggtttttaagctgtgtcaaagtgctctccccaccacatatagagggttgtgttgagcatctctcataacctggaatgccctccacacatggctgcaactgagatatttgcaatggaatgttcaggtccttccatgcccagccatttgctggagcatttccgcctactagtcattctgccaagcctcccattcctgccacagccaaccccaaggaagggggaacacaaagacgtctgtggctgtctgaacgtggctttttctccagatgggacagatgcagtggctgtaaaagcagctgcgatgtttccgtgctgaaaagggcttttcatgcaagagacgaaaagaggaatgtcatgctggaaaggtgaactttgggagctggtatgaaaagaatgtgatgtgtgctccctgtttctctgggacaaatgagtcatgtttgagaaatggtcccttttcagcctcaatgactgcttgcatctatttcaacatccaaaaaaagtacagggagaggagagctggaacttgagcaagactcaaaggttgctggagactcggaaacagtcatctgatggtgtgacaggtcagtgagccaatcagccagccaaagagctgtgatgaagggagagtctgtgattgtagagtgacacatggcctcatttatcctggagaaagctggggaatttggtctcagacagctggtactgaattgagtctttgtatgtccaagagacaagatattcatttaaattgaacagatgccaatgttacttgggctccttagtggtaactgatcctcccctcatgggcctgaaggtattaaaaaatatttagtacgtggcttctaagatttaactgtagcccttaagaagtaaactcagacatacaagagatgtgaaactggctagccatatgcagaaaactgaaactggaccccttccttacaccttatacaaaaattaactcaagatggattaaagacttaaatttaagaccgaaagccataaaaaccctaagagaaaacctaggcaataccattcaggacataggcatgggtaaagacttcatgactaaaacaccaaaagcaatggcaacaaaagccaaaattgacaaatgggatctaattaaattaaagagcttctgcacagcaaaagaaactatcatcagagtgaacaggcaacttacagaatgggagaaaatttttgcaatctatccatctgacaaagggctagtatccagaatctacaaagaacttaaacaaattacaaaaaaaaaaaaaaacccaaaaacaaaaaaacagcttcccttatttcttaaggtgatctcagatggcagactccctgagttcaaatcctgattgcagaagatcattgaataatttatttaagtcctctgtgccttggttttctcatctgtaaagtcagactgaaaacacctccctgttttgaggattaactgagattatctgtgtaagacacttagcatattggtgggcacatagaaaggccagagtaaacattaactatcattactattagtttgaaatttattttttattattaagataattttctttttggagcttctatttaaccaggtggatgaaattcaaatcttaccctattccaggtaacctcaagcaattcagtattgaatattaagtattcaatgcagtattgaattgcctctccccaaagatttggattctgtaaatgtgtggcagaattgtgtttaaaggagggtaggagactatgattgttcctggataggtgagaggccatctggtcttcagttatcatctgttgaggcagacattcgtggaaacccatttcatcttgtatttgcagatgagaaaactgaggctcagagaggttaggaaacttgcctaaagacacacagctaggtagtagactcaaaaccaggtctgtctgactttcgggcctttgctctttcccatttgtcttctaaaaatgactccaaaggcctttctatcttatgcccaggtggtcataccactcagcaaaagggtaaggatttttttttgtttgtttttaaaggagatggactaggttgtttcatgattcgtcagaaaaaggcctgaggacttgtgtcagatgccaaataaagctttagttcttgatatgtttagagagcaatttggt

SEQ ID NO: 62952 - DNA, 2851 bp, Homo sapiens
gcattcaccatgttgtacaggttggttttgaactcctgggctcaagcaatctgcccacctcagcctcccaaagtgctgggattacaggcatgagcctctgcaccctgccttattgcccacatttataattgagggacatgctaaatttcaactagaggccagtgaaagtaaagacatgatatattttctcccacctactttcataaacccactgaattctacccacaaatccctctgcaggtgtgtgggtcccaggtgaagcactgtgtactagtgagacttagagctacttacctattctcttcatgcttctatttttttaaaatagggataacaatagtatctctatcattggctgttatgagagataaaataatagataaaaagacagtagcttaatgcttaacacctagtaaacatttcagcattagcttttgttatgagaattattctttcagatgattcctataacctcacaaaattgtgttttatttttcgccactcatagaagaagaaacaggctcaaagaggtaaaaattgcacaaagtaacccaggaagtcagtggcagagctgattgaaacctggttctctctgattcaaccttaagctctggcctatcgtgtgtgctgtgtcattttttaaaactgatagtattaaatgtcctcacttctccctggaatgaggctagaccgactttggagtagatcaccatggatgtccccatttcttcacccctcccagaggagaaagacaaatgtccaaggttcaggaagctcttgtctggcgcctgtttatttaagggcttaaataaatagccctttattaattaactggagacagttaataccaatgtcctcccttcaacacaagctctctccagcccagtacttgcaagatcccaattacaaacctcactgtcccagaaattgtcagattctagttttttatttaaaaaaaatccatcctgttaggaatatattcaccacataaaaccaaaataagtctgatatggcttggctgcttccccacccaaatcttatcttgaattgtagctcccgtaattcccacgtgttgtgggagggacctggggggaggtaattgaatcatgggggtggttttccccatactgttttcatggaagtgaataagtctcacaagatctgatggttttataagaggaaaccccttttgcttggctccaattcttctccatgcttccccatgtaagatgtgcctttcaccttctgccatgattatgaggcctcccgagccacgtggaactgtaagtccattaaacctgtttttctttataaatttcctagtctcaggtatatctttatcagcagcgtgagatcagactaaaacagtctttctcatacattcagtctcagccttgaaagataataatcatcgtaatgctaatagcaacaacttctttgattaccaattattgaacattttttgtgtatcaggcactgggttaggcactgtaaaagcttcattcttctcttcttgctggggctctgagcctcagtcagcatgagtctctaaatggttttgtgaagcagtaacttcctttaccaccatttccaccaccaactggacgttatgtgagttaggaataatcttctattattatcagtgtgttaagcactgagatttcagggtttatctgttagagtagctagaatttccttaacaaatacaaaagataaagcacttagaactgtatctgactatttaaaaaaaaacaataaatgttatccgttgccatcatcatcattatcatcattgtagcactctgttttcacactgctataaagaactaccctagactggataatttgttatgaaagatatatagtaaatatatagtatttatattttaaatataataatataataaaaataataatttgttattaagtgactcacagttccacgtggctgggaggcctcaggaaactaacaatcatggcggaaggggaaggggaagcaaggaccttcttcacatggtggcaggagacagagagtgagcaaagaggaaatgccacacttgtaaaccatcagatctcttgagaactcactcactatcatgagaacagcatgggggaactgcccccatgatctagtcacctcccaccagtttccttccatgaagggattacaatgagagattaaatttgggtggggacacagagtgaaaccatatcaatcatcttaattaaacttctactctatgctaggacctttacatacctgatctttaatcctctcagtaaccttgaaagggttcataactccattttaaagataagggaactgagaggttaaatgtcttactcaaggtcacagagcaagtgctggagcgagaatctaaacctggagttttctggttccacaatttctagcaccccacttaaccctctcaaagttcctggtactatctggatccagttactgtggttaaataaataaataaataaataaaaatacctttgtggaagaaaaatgtcttcactgtcagcttggcatctcacttattttcttgtcagattccaaatcctaactcgtgctgtgttgtacagttcaaagaaagcatttcccatcaagaaatgtcatggttgctagaaataattttgtcacatcctcttgaatttttcctttttgcaagttcagaggtttcagttagattcacatcttatgatgcctctttttaaaacattataaaagggcaactcatttttaaaaatctcaacatccaaatagaacacttcattgttttcatcttaaaaggtaaaaaatgggaagactctaaagaggcaatttacaatgtgcgggtgccttatt

SEQ ID NO: 62953 - DNA, 1289 bp, Homo sapiens
caccagctgtgtacattggaaatgctactcaacctctctgagccttactttctgcatatgtaaaatggtcaaagcaatacttcccctatgggggacatacaggaataaatcctcctccatatttccagggatatccaggcttctggtgatcacaaacagaaaacacttccaagatggggctttctatgctcccactgccatctatcttcccctctatggtctcttaacagtgagccagtgagcctctgccaagcaggctcttctgctgttgattcagtggtaagcttggaaaagccacttcccttccctgtaccttggttttctcatctaacaaataaaggaggtaaacaaaaatagcgcctttcagctatatcattctgagagtgttctaggcagaggagacagtatatgctaaggtcctgggtgatatactagaggtggtatggataaagagaaagaatttaggaggcagtggctacagtaaggctgtagaggtaggtgggaatctgtgcctcagagaggtgatataacttgcccaaggccatctatcttataaataggggatctgggatttgattcaaggtctggagcagaatccatgctcttgcaatcaccacagatttggtgaaacttggcctctttaaagttccccactagcgaggctgacatttgccaaaagtgagtttttgttcaagggcattagaatgagacccagagagcctgacccaattataattactctacctgccacagaacatttaaaaccaaccacattgggaggaaatgtttgctgggctctgataagggcttacatggagcaatgccctgccttgctcaccggactccaacagaatccaactgtttacttggtggaaactgcagtttgtctttatttacatttcccctgatggtgagggtcagcaggctgcaacctggctgagacaaggagtaggactttggagcattgggctgatacattgcgcaaagcctgtagaattctacagacccaacaagagcaggagttgggggcgaggggcagttaaggacaccattgcaactctcctgggcacctccactggaattttgaaaggagatcttttgtacaaggcaaagcagacttggaaacagaatttaccctcctaatgacttgctcttaggagagtgaggaaggaaaagagaaaatgagggcgatagaatgagctttgcaagaatgtatttacaattaaattgcattttaaaggaaatgtggaaatccttgctctgcagagaagtgaagtggagagaagcca

SEQ ID NO: 62954 - DNA, 1248 bp, Homo sapiens
actcctaagtcatacactgtcacttctgctttatcctatcccttagaattgagtgacataaaaaatttgtggccatatcttaacacacacacccatacacgtatgtatgtgtgtatatatacacattatgtatatgtatgtgtgcttagactgataccttagtagtctaatagtagtagatacttaataaatatttatgaatgaaatgtttacactgcatgcagaagttttattctatttcatttaaaatgttacaaacatgtttctatggtattaagaaataaaaatatcataggctttgcatagactcaggctggtttgagttttgaataccagatccatctctacaaacctggacaagtcgttcaactgctccaaagcacagtttcagtatctatcaaatgagaataatagcacttacatatcccagagttgttataaggattaaatcacctagtatgtgcacaggacttaagccactgcctggcacatggcaatcattatttaaatgtcatttatttttcatattttgcattccagaatggtgtggcctttcatgtacttcccctgtattttctgctgctatttcctcctggcttgtggttgaggttttaaggattcagacatccaggaatgaggtttcacaggggcctcatggtgtgaaaggggatacgctttctgttctagtagaagcacgtggtcgcttcctgttctgtatctgctgtaggagatcagaaagcacaggggctgatgccaaccattatgctgactgtagacatgactaattggttgtccattccaggaattaacacttcttcccacaaatacctgattacaatgactaatcagacaaaagttcttcccaaaacctgcgtgaagtacagctctaatgtaataaaccttattcaatgtagatatgattaatttttccattctttctccttataggaatcaataagttgtttagatgtgtttaatagagaggaaatgaacaaaaagtaggttttgctcctttatgaaggtaacttttaaactttttgcctttaaaaaagaccatctttttcatctacccaatgagtgggattttcaggaaaatttagatgtgttcatttccatgattaggtgaggatgattaacggtccttccagcaattagtgttggatttcactgttaccaaaatgaacttgcgttcacaaatctcaccgcatatattctgagtgccatatgttacagaccagggaaaatttg

SEQ ID NO: 62955 - DNA, 926 bp, Homo sapiens
gataatcttgatcttggcttggtgcttctggtagccaaggtctaaaagaaggaaaaaatagcatttgtaagtcatgaataggtacaaaccaggaagctctgttgccttaaagaaagagcttccttagcagattctttatttcatcatttccagtttggcagcgccctcatggttgtggctgggacaggactgctggctgctcaggaaatatcgagcaaatgggctaatcagcaggcaaagaattgattcccgtgtcacatcccttccccttaggccacaagtctacaaaattgccaagtggcagaggcttctgaatccctgccgttggctccctggaattgcagaagcttgttaatattgactttcatctaattgcttcactatttagttggcaggattgttctttaaaaattttttcctagttacgttatgcccaaaggcaatgctaattaacagaaagatccaggttctctcagactcaaactgcatcctcttttctcctcattccactacttgtctgtcatgagaattacacagaagtttcatctcttaagctttccatgcctcagttaccttatctttaaaatgggcataattagattaactctgtgactttctttatagagtaattgtgaggattggaggaagctttccaggtaagtgtgctacctagcacttagggtttaattaagggtagctctaaagaataatcacctcatctgcagggagatgttgccaaggcctccctgacctgttggaggagtttgagaatcacacttggtcgatgccaccattctttcactggcctgtcttaccatgggtttctcatggatggctgctaagctttgtgcaaaatcagtccaaaacttacaatcctgaagccccaaaactggtgctatttcctccaactctggttctccctatca

SEQ ID NO: 62956 - DNA, 707 bp, Homo sapiens
ttcaggactccccacgacctatgagggtggacttcagatggaaggttctgaggtgatcttgtgagccaggcagaccacccaaaagctctaccctgcaccacttaaccccccagacctcaaggaagccagcccctgcccctcctccagccaagccagcctcttggcagacacacagatggctctgaattaacaagagccaaaattaactttccaggaaaatgtttccaccttccgaaaaggacactgagaaaatattgcatatagcaaagggtttcaaacttttttaaagcaggtgattctgtcactgaacaaacatgctcatcatttaatgatttggcaatcagagtttcaaaaaaagtatttgactagagcatagtgagtgcacaaagatgcatttttagattaatgtatatgtaaaaaaaaataaagtcctgctgctcatgaaaattggagagagaataggttttggggctccagctccttgccccaactccatcacctcttgtgagcagctaattatagattgaaaagcactgagaatcctccctgcccccttctttgccatgctaaaggaagcatgggtctgagttttcattgggtttaaagccacccatgtttgaaaaccagagacaacatgagtctaaaattaaaatgacccttattcagcaaaacttgactagatattggagctgcaaaatcaaaacttt

SEQ ID NO: 62957 - DNA, 753 bp, Homo sapiens
aacggtcaattagccatcagattgatggtcactggtcaattgatggtcagttagggcagcctggggatggttttcctcctggggtaggctgatggttggctggctgcagcaggggcagtggcgggggttctctgaccatatgtctcccatcatccattatgctagcctgggcttgttcacatagtggtggaggattccaaaaatatcaagggagaaccctgcagggactgggctcagaactggtacttatacttctactaccaatagcatctctttctgaatgagaggcacatgatagcgagttttgcaatgtactgcaaatagacacagaggtacttgcccagaagtgacgggaagggaatagtttattttggaagccccatttgcctagtggctaaatgattcacttataatccattgacttgtacccataaggaatgatgggaaattggattcccagatgtctcttacttcccaacacaccccgtaatgaagcacagcataaaccctaacccatctgctgccctcaagaatcaaaggcaaacccattctttcatcaaaggccagactcctgagtctccatgttttctctctatctcctccactcacaacacatgccacccattcaaccccacattctgcttctttggcagtgcccctcatctccatgtcagcccaacacacacactgctggatatgcaaggaaaactgaccacaatgggattcataatgcagattgtcacaaagaatagc

SEQ ID NO: 62958 - DNA, 695 bp, Homo sapiens
ctcttctgaaaacagagcctgaaacaaggagtctgatgcaagtagtttattggggtggcaattgcaggaagatagtaaggatgcagggaaagagagacgggaaggggagtaagtcaataaagtgtgtattaatctagggcaattgggactcaatctcagcaggaacctcctgaatagccatgcctcagaatcaatccactaagggacaaggcagctgggataattattttccaactcccttctctcattgatcgaggattgaccttggggcattgcgcctccagtcctttgggattgccctgtggacgggctaagcaagctctctcgccactagagggaaccctggggcagagaaacgtgtgctccagggcgtaagcagtcagcgtgcctggaaaccatccaccatagctgcaagaggcctaaagagattggccaagggatgtggcatgggatactaatcatatctgctacatgggaaaaactgtatcagcaatgttttgctttatttttaagaaacatctgaagtaaataaaataaaatgttaatatttgtcaattctacccagtggttgcatgggtggctgctatattattctctgttcctttttgcattttgtctttaaattttacaaattacattcacaatgttgtaaaaccaccgccactgttttgctttatttttaagaaacatctgaa

SEQ ID NO: 62959 - DNA, 2128 bp, Homo sapiens
catgaccatgtccagctaatttttttgtatttttagtaaagacggggtttcatcatcttgaccaggctggtcttgaactcctggcctcaagtgatctgcctgccctggcctcccaaagttctgggattacaggcatgagccaacactcccagcccacaaattgtatcttaaagtatgcataaaggtaacaatacttgcaaatgttcaatggattggactttatcaaggacagattttggaggggaaaaaagacaaattgttcaacagaaacagggctggagtagaagtgggaagcagattggtcacaaaattaatagcaatgagtgagtacccggcaaaatacccaggaaaggctgccaataggcaagactagaagtatggaagtctgccaccagaggtttcatttacccacagaagagtgagcagagcaaaagcctgttcttgggagtaaaagaaatagtggctgactgtctaaatgcctccatccaatcagcttgtgtctggctggcaagtacatgcccttctttctggataatgcacgggcttctcagccaaggaaatgtcattgtgcagaatcgagccacctggcagtgccacaaccaccagtacaaaagtccagggctttcacattcttcttaagtgaggaatcattggggttttgccattcaaatgtttttgcagaactgttgactctgcttatctgtactttcagccatagtcagaacggattgtaacacaccatgctcagaaactgaaaactcttgtcaaggcataaaagattttcaaagcccaacagtttatacattcttttcaaatacacataaaatatgtacccacaaaaagcccgtgtgtttaagccacaaaggaagccttaataaatttcataaaaattgatctcatattgattacagtgtaataaaattataaatctaccaaaaaacaatattatctagcctccatacatttagaaacctaaaaacaccatctgggcttggtggctcatgcctgtgatcccagcactttgggaggctgaggcgggtggatcacttgaggtcaggagttcaagaccagcctgggcaacacggtaaaaccccatctgtactaaaaatacaaaaattatctggggtagtggtgcacgcctgtaatcccagctgctcaggaggttgaggcaggtaaaaattgcttgaacccaggaggcagacgttgctctgtcatccaggctggagtgcagtggcgcaaactcaggagccgaaatcgtgccactgcactccagcctgggtgacagagcaagacttcgtctaaaaaaaaaaaaaaaaaaaaaaaagacctaaaaatgctctttttatttaatgggttaaacaagaaatcaaagtagcaactacaaaatatttagaaccaaatgacagtgaaagcactgtgtgtgatatagacaaagtggtatttggacggatgtttataaccacataccttaatatactagaattgcatatttaaaaattgagaaaagagtgaactaaacattcacctgaagagcttagaaaaagaacaacaaaatagagccaaagatcactgaaaaaaaaataaaaatagaaattaaatataaaaagtgctagaattgacctacaaagacacaagctgggtctttgaaaagatacataaaatagacaactctcagcaattttgattcagaaaaacaaagaagtgacaagtaaacaatattagcaatgtaaaggatgacataccagtgggcattgccatgatttaaaaatcaaaagagattacaatggactttatgtgctattaaattttaaatcctaaacgaaatgcagtttccagatgtatttatgtaaggtggcccaagacaaaataaaaaagttagaaactaattaccataaaagaaatttcaatagtagtcaaaggtctatcacaagagaaagagagaaagaaagagaaaaaggccccaggcccatagagtttgacagacaagttctcccaaatccttaaacaatagattccctcttcaacagtaaaaataaaaagctacctgactcccattgcaaaattattgtaatcttgacatctaattcaaataaacatagcacatacaagaaaactcaaaccccacttc

SEQ ID NO: 62960 - DNA, 862 bp, Homo sapiens
cctcaaacaactgaaaataaaagtgccatacgattcagcaatcccacttctggatatttacccaaaagatctgaaattattttgtcaaagagacatctgcattcccatgttcactgtagcactattaacaatagccaaggtatgaaaccaacccatgtgtccatgacactcagctagcttggctgcagcttgcttttgcttcctaaaacctgcccctgccactcctccagaggagctgctgtgcctgtatttgcagagaataaaatgtgcctgggattttactccccacccctgggccagtagaaaataactgacggtgcaagtttatgaaagcccagctcccttgcctcagggcaggataactatgagaggtaacttcgacccttgaacccgtgggataagcctaggctttgcccaaaatcacaccttgcttggcttctttccctttcctgttctgcttcccccacttccttaccagtttctcctgagatccctcccttcctaaatcacttgcacagcacagtgatttgcactattgatgcaagacaggcaagccccacaactggggcttatcccaggagggttcttggcttcacccaggaaagagttcaagggcgagctggtgatattggacagcagcttttattaaagcagcagttcagagcagcagcagagggactgctcctcgctgagcagggctatcctgtaggcagtgtgcccagaatacctagttctgcagtcatatttatacccacttttcattatatgaaaattaagtggcagtttatgcagaaatttctagacaagggtggtaattccaggttaccaggttgttgccatggaaaagggcagtgacttctgg

SEQ ID NO: 62961 - DNA, 2675 bp, Homo sapiens
cgttacgtgctgctgtgcgttctctcctttattctttgggtattggtttgcatcgtatggggtactgtatctgaaaaagtctgggaaatgcataatattctaatttctaacaaaagttaatataactgtgactcggctaagtaattttaatcttctaaaatatctttcctataaattttaagaaatgactctaaattacatccatataaaactaaagtgttgggggaattactgtaccaggttttcttgagtttcaagatatatcagatgaaacatctacagaaatatcagatgagaaaatgatgcctcccaaagaagatagtgttctggctttccaattatctgaggggaaataaacagcaaaattaatatcctgaactcagtctgaaccaaaaacggagccaaaagaaaccttcccctagcattttaactaacacagcctttcagagtagagatgaatggaggagctggatcagaaataatgcaggatgaagagattagatgaggctggtaaaataattataggctggtaaattttttgtaccgtgctgttgatcaactttgtagatagcttatgtacaccaagcttctttcttgcctgagaacagaatagtgtggtatttgggagcaaaatgttagaatcagaagggacctgggagttcaaccacttactctatcaacgggaaactgaggcccagaaatggtgactgagttggccttggccacatgacacatccgtgggagagctgagtctcttgactcatcacccaatgatcttttctctgtttacacttcaaagaattatcatctaggaagataacagctaaaagaaaaaccaaggctcaaaaaggaaaatagctttgactgaaggtgaagcaaagggacagaggaggtgcttaattcagctctcttagcaacaaacaagatggaaaagcaggccttttttttttttcctttttttttttttctttgaggcagtgtcttgcccagatgcccagactggagtgcagtgttgcaatcatggctcactgcagcctcaacacctccccctttccctgactcacgtgattctcccacatcagccccaagtggctgggactacaggcatgtgccaccatgctcaactaattttttttttttttttgtagagatggggtctcagtatattacccaggctgatcttctgagctcaaatgatcctcccacctcagccccccaaagtgctgggattacaggtgtgagccaccgtgcccagcctaaaaaccaggacttttctaagagaaagtagatcaaattattctttgagatgcctgatgtaatccatacgtcttccatgcccatgtatttatataaaatgtgtgaccgctgtattctgttaagacatgaattaaaaaaaacgttcataggctggttttcataactactgtccaactttttaaatgattgtttggctgaggtacaaagaaagaattggagaagcctctaaaatttgtgtgtttttctgtttgtttatagttatgaggagagaattattctatccctctagttatatttcagtgtttacctaaactcgtttcttccttttggcaaaagaaaataaaaaatgccctgtgtggtaacgagacctttaacaggtggggtttaggcagcttaatttgagctagtgtgtgataaatgaaacctttgattcttagtcaaatatttgttatttgagcgctctaggttgctgatttcacatgttctgctgttcctttcagggattaaaaatgctgtttttccaacctaaaagttctgtcttaacatgcagggtttactttcttatatacggaggttcaactgaggaacaacgctatctcactgctttgcggaaagaaaaggaagcttttgaaaaactcataaggtaatacatagaaaatcagtatgaaagccccaactacattggaaacctctggatgggggaatatcagatagtcctgctcaggaaggatagggcaaggaagacgttggagaggatcacattgagataaacctgtggtctgaattgtcctccagtgtagatctcagcacatacttcctttttctcttccccgtctcttccttcatctccagttgcttttcagtggtttgtttaatagaatattagaaatgtgacaaagacaactgcttttttgtttgtgaagcagtatgataaaacacgagaaatatagctaaaatactgcttttctaagaaatacattagtaaatctccctcctccctgccttatgcacaatatgtccttgggtgggtggctgctttaccgtttattgggaaatgcttttacaacacagccaattatgatcaccatcaatagaatcactctgggaaaatatttcttaggaagtgtgttgtttgtctggacatacacgtgtatgtttttaagaatgagtatctggtactattccaaatccaagtagaaaatgcccttccattttacgaaaggaaaatggtgagatgttcacaaactggttggctacctcttgccctgaaggcattcgataaatctgataaccacctaccagggatattgtcaagaagattgcagcctggtgtgggaagatgggccagataatctctaagggcctcagaagccagggcaagtgctggatggggcatcacagagctgagccagagaaag

SEQ ID NO: 62962 - DNA, 2057 bp, Homo sapiens
gaaaacctgtttttgtattgaattgcttcttcttaaagaccagcatcaacctgatcatgctccccaccatgtgaaacggaatgggcacgccacgataagtagtaatgagccttttcggcagccttctgttttaacaaaaaaacgctgctgtttggcattgaagtttgcttgtgtttaagctcgcggtggaacagcctaggacccctctctgtttgtaacctggctttataattttgttattatttaaagcctccctttcagcgattttttaaaaccaaaatatatgctggctaatgtcatctggaaactgaaagtcgatgttcagcaactctcactcgccaatcctacaacttggtaaggatttttattttggtcgtactgagcttactgtaactggggcggctgagttgctatggtaatttgttctcagaacagagcactttgctgcaatgcatggaaacagcagataaatctactttatgttgacttgattgtgacattaattctagttgaaacatcctccatgctcccatcaggactcatgtataagaattttaaattggagccaagaaggcattggctaaaagaattgcaacttcggctgtttaaacccaggccttcacaattcatgcaactgaaggctgttggctcacagcctagagcgctgccccgggggcggcttgcagctgggggaaggttcatcactgaggcaattatgtggttaattgctccagtgtgggcttgggctgagagttgtgactcatgccgccctctgtcactaatagatgggggtagggggtagagtggacaggactcaaggacttactgaaaactcagctgccttttccctttcctcttgcaaataaatctgtaactcactaacatctgccctggagatgtgggaggaaggtagacctcaactccaagacttggtgctcccggcctccattggtaggggtccccattaagtcccacgtcctgaactacactggagccctcggacactttaaggatcactgcactccgaattggggtgtatcttcctccaattcttgcctaaccatgacagaggagagacaaaaactagatgcctgacttcgagcatgactcattataaacaaatagaggacagattgacttcctcttatcagagcccgagtctgcgccccaggacacagcatgagtcagacttgaagtcccaagtcttgttgggaattttccccctgagaaagaggtagatttttgagtagagttctgttgatttcttgaatattatcagtgaccccatgttaagccctgggcttctgcatcaggtcacatcccttcgaaaccaatagagcttccagagtaaggataaaaattggctgtgctcacaaagaaactcatttggaattgatagaaatgtttgtaattttagcggtgatggttttgcaatgtatagatgtcaaaatcataaaagcatacactcaatatgtgcagtgtattgtatataaattatacttcaaatattttttagaagaaacatagtttagcaggaaaaaaaaagatgtagtaggcacctgcattgaaatgagaactgaagacattggttgaataagtaagtggttaaggtaaagaaaccgtaaacgactaacagaatgctaaaaatgcctacacttagaagaagggaagatacagacagaatattagaagaagaaactgagtcatccagcagccagaatgaaacaggagggaatttatagggagtgacccacaacaccaggagctgagcagtatcagcgtagatagcctggtggcctttgacgcaacaatgaagagagcactggtcatcctgcgtggtggttaattattattatgatttatcatgaagttcagtgttacctcctcccttccccatccataccgatctattgcttgtatttgggtgcaaacacacacagagtacctgcctgaagggatcatgaggtcacagcatccaatgctgatctcagactcccagagtgtgtgttagtaggtaacatttatttttactcaactccgtatttcactaggtaaaa

SEQ ID NO: 62963 - DNA, 1350 bp, Homo sapiens
ccgccatggaaaccctatccattcctgcatttggcaggaacagggaagccaagaggaaatcctagtacttggtgccttcccatagggagtttgcaatctaatctaaaagaccagaacactctgtcaatgcagtctgaaccaggatccattcccagggggagcagccaaattgctcagccaggtcgtcttgcagagtggcatccttcctctgcagctcattctaacttagcatgtgaatgagcatttagagatgaagacagaatcgaactgaatcccaaagtctgactcacctgcttctttcccctctcctggacaacacaggggaaaaaaaagtacaactcttcccccacgtagtaccagcagggtaacccgagaacatccgtttagcacgtctgtccctgcaaaaaggaccttccagtgacaccaagctgagcgtatcctcactctatttataggtgctgtttgtttaatttgagtccagtctctaagaataagtaatgaactcatcttgggcaccagccagagcctacaactctgagacgacccgtaaacccctttccctttccttctggttctggaagggattctgtagttcaaaggtgagccacttttgtctgctgggctagggtgggcttgaaacccagacgtgtttggagatttggttttatgatggtttctcagtacggtttggggattgtttatttatttacttttttttttggtgtttggttttggattggtgattgcagaacagatctgtaaactctttgtcatccacaaatgattgacaaagactgaatatctccagcccttcgttggttgatcttcggataaaaagagacctcgttgggactcagatgtcccccagtaaggaggccatggccttggagaagcaaaatccattccttttcagtatccttctgacttggtagcagaaactggggtcaggttatcttctaaggtctgataccattcctgagatgctgttttgttttgtttttttcaggctatgtgataaggaccaggagccatgacccacttaaactttaaacatctaaccccagaactggttgcacttgagtccaaaggagcattgtctcttgcaaacaagttcagtttgcactttaagctcctcccttgctggtctgatggtttagtgacctcaagaactggccccattgattctgaagggagtgacctaaatgcagcctttgggcttggttcagtatattcgtatattgaagtgtatcagtccttcctgacactactataaagaactacctgagactgggtaatttttaaagaaaataggtttaattggctcatggttccacaggctgtgcatgaagc

SEQ ID NO: 62964 - DNA, 1104 bp, Homo sapiens
cttcttaagggtattgaatctttacctctaaggcaatcaggtccagatggcaaagggaaaccctcttgtcaccagctcttgggcatttaaaaacagcatggcaggttgcggccttgcaaggaaagaagaggggaaaacattgtaaatactgtgtaccctgactgtgttggctgcacttgaaaacaggcatcttcatttgcagttaattagattaactcagctgcgattacgaatggaattccttgctccagcaacagcgaacgtttgttgaacatgtgttgtaatcttgcctttaaatacaaccacatgtatgacatattttgttttctcttggccattggactggaaaactattaatacaacatctgctttgctttctgattgaatcaggggcaaagagcaggtctctgtagtgtccttcagattatgcctgggatatcaagttacagctgctaaccactttcccactgcttaagaatccaaccctgaacgtgacttttctattggaaacgcaggtctcactcactggaggaccaaattacctcctgatcttgcctccagcatgtgaagtccaccctcgcacctcccacgcctgaacaactcactattgtaaccccttgttagttttttaaacggtactcaaccccatttcaaatcattttatttttcgcttagtcgtttgtctgtctccaccatgaaaatattccctccagaagggcaggacccatgtctattccccatgccctcccctcctctcccctagggccaagaacacttagcaggcaactgaataaatatttgttaaataaatcacggtgtttcccaattgcgtggagaatgaagtaagagtgaagactggtgagaaagtgacagtcttcttgcaatcatttcagtcctgataatatcaagagtctcagtgccgggcaaggtggctcatgcctgtaatcccagcactttggggaggctgggatgggaggatcacttgaggccaggagtttgaaaccaacccaggcaacatagtgagaccttgtctctacaaattaaaaaaaaatagtaatagttagctgggcatggtggcacacgcctacagtcccagctatttgg

SEQ ID NO: 62965 - DNA, 1130 bp, Homo sapiens
agcaagcaagcaaacaaataaaaacgctcctaaatttacctctaacatgaccaaagtctcaatttttttcctcttttttgatacaaggtctcactctgtcacctgggctggagtgcagtggtgtgatcatagctcaccacagccttgacctcccaggcttcagcaattctcccatctcccttgatgcatgcctgtaatcctactactccacaggctgaggcaggaggatctcctgagcccaggagtttgagtccagcttaaacagcatagcaagaactccatctctaaaaattaaatttaaaaggattgaaagcaaacagaaagcagaatgactttctcactgtgattcagtgttttcaggcaagggtcagtccagccagaggctgctgctagctcagcagtcaggtcctcctcttcagtccaataaaataactagttttcagactcggttttctcagctacaaaatggagataacacagcgtactccaggtgcagaatgggggcgggtctccctgctcttggaggtctcgataatactgtcttgactcgccacctccacccacattccagacccagggaaattccaatgcccttgcaaagatgtcatcgaattcctggcaccttacactctcactgtcacctagggctctacttcctcctgtctcggccgacttattgttctccctctgattcttatggcgatttatttgtctttaccatcacaggaattcaatcctgtgctgtgatttccaacacacacacaaagacaaagacacacacaaacacacctggacacacacaaactcacaaacagaggcacacagagacaaagacacactgaagcagacagacacaacagtacacacagactcagagacagaaacattcacagagacagacacagacacacaaagacacacacagacacagtcatacagacacgtacccatagacatacagacacacacggacacactcatatagacacacaccatagacgtacagacacatacacacatagacattcacagacacacagacacatgcatacatacctataggcatacaaacacacagacacactcatacaaatacacacagagagacatacagatgcactcatacacac

SEQ ID NO: 62966 - DNA, 1900 bp, Homo sapiens
atgctctctaccagcaaaacgccaccagtctaaggaggagacagaaccgcataaaaatagtcacacagtcttcagagctgcacagggagtggcacaggggcttcacaggccttgggaagtttgtaaagtgagggagaagcactttactgtcgccagctccattgaaaacagattgtagcaaatgacttcccaggagctcctcctctcaccttggtgaatgttgggagagaatgaagactgcggctgagaggcagcgccttgagccttgaacggaaagagggacagggcctgggggctgtcactgaggtgcagaaatgggttttgggctgggcatcagacaaccccagatcccaacactggctcagccaattcctggctgtgtgacatggagccattactgtactttccttgccaggcctccatttttcctctctctagaatggggaggctggtaatacccactttggagggcagtgtgaggaccgaagggggctgttaagtgctcggcgcgcagcgagcactcaggacgggtggcagcggtcacctttgtcgccaccgtccaagcctttgcagaggctcagggccgagccccggacatgcgcatgcgcacgcgcacccggccggccaggtgagaaggaggcggccgcctcgcacctgggctttaacccttcccagtcacgggagtgggcggagtgcacgcagggacggagtcgggggcgagcagcgagagaggccgggcttgacccttgaggcggggtgggcagcgtccggggagcgcgccgagccgcttctagcctggggtccgcgcgcgccgcggggaggagggggagtgccgaggggagcgaagtctcgcgagatcgcgcggcggcggcgggagcggcggcggcggcggccggggaggtgagcggcgggcggtggcggccgttgggggctgaggccgggtgagagcggccgagaccgagggctgggtgggggagcgggcctggtgaacatcccgcgtcccaggcagccatccctgttcgtccccgcagcagctgcggcgccgtttggtccgcaccgtccccgggactcgcgcggggcggggcggccggggccgcgggccggtgcctccttcaaccggtcctcgcgcccgggcgcgaccccggggccgcctcagtgtccatctcgactgcagagttggccctgctgacagtggcagcggcgtttatggagcctctgctgtgtgccgggcacttaagttgcgcgcttgcacgccggggctgcacagagaggtggagcgcccgggccagagccacactgcgaggaggcggtgggaggggaccgggacccctgcgcccccttcctcttcccacctcccactcccctcagcccttttctcctggggtcccgaccaggcttcagagggggtgtctgggagcgccctgaagttggatgcagcttggtatatgggtttcttgggagagagtttttccagggcttttgtctcgttcctaaaagggtccccgatccccaagtggtcaagaaccattgtttggccctgcttggaagcagaggtgggctgagagcagcgggcgtgtgctggtagtggggtgtcaggcccaatgaagtggaatattggagcccagggcttgccttaggcaaaggaaactcttctctaaaagttcgatttttgtttcagcacgcgattccactcttgggaacagtggttctcaacctcgtcagaatcaaggtcccttcttcccctttgcagcaaacatgtataaagccctctttactaccctgaaatgaaattcataaacaatgtgacctccctacacacatccttgaaaagcagtatgatggtttgattgaagcgtaagggcgaaatagagaacagtatatgacagatgttgctgtacca

SEQ ID NO: 62967 - DNA, 1227 bp, Homo sapiens
tgcactgcaaaatatgcatttccctctaatagtaagtgtttctcttggtgtgtctctcagttcagtgcttttaaatacctcttaggtgaatgaatgctttgtgccatgccctgatttaatatatttaaaagacttaattcatggctttgttaccttcaggtctttgggaggtggaaatggatggaggggaataatttatgtaatacgaaatctttgtaggatcttttgattgattagatgtccttggatagaagaaggatggccggtgactgttacttatactgtgatataaactctcaaatgagtgtgttctttgaagagttgagagcagtgcggaattttatggtgggaatgtacattgagccttgtgcaatgtcttttgtgtgcattacctcattttgttttcacaacagttctgtgaggatagatgtaattaccccagttttaaagagcagaagggctcaatgagattgtgaaatcaggacttgggcatgcagctagtaggttaaaaacaaaacaaaactgtgacttgaatacggatctctctggctccaaaatccatgctttcttccctcggacagggaaaggtggtgttagaatgctcgaaagttcttagaatgttgacattgtagaccatggaaatgctgaacagaatgaagataacgctactttatgagcacccccagcattattttcaccatcctctatttctaatgctcttcatcatcaactcatgaagccaaggagcctgccagggtgtctggctcatcatgttcaatacagcagagacttgtttaatttagcagcactctgagatgaaaggttcatgactgccaagtacaaacagaccttctgcgggatgttaatttggttatagaagagaatgcttgtttttccttgctctgtgctaataaagaagctggcacattttttcgtgaggaaaaaggactttgacttattaaatctgtgtaatcaaagagaagcagttctgataaccatttttctttgtgcagtctttggttaattccattctgtacctgccagcaaattgcaaattgcgtgcttttttgttctttcctcttttttattttggatttggttttatggttggtcactgtagggatttattggtaggaaaataaattatttcctcatttgaacagattgtgtgtttttacaacaggttatcttgtagcaagcagagtgattcaaccaggcctctgcacg

SEQ ID NO: 62968 - DNA, 1071 bp, Homo sapiens
agcaagtgattgtgaagtatttcagtgggttgaaccttaaggtagagcttgcctttcctagtattataaggagcactttccctagttgctatggaaacaaatatgaattgttgaaagttatggtgtagattgtgatacagatctgctgtgaaagatagatgttgcaaactaagtctcttaatgctaccacaataatgatttcaagaacagatatttactgtacacttgtgtgtgtggtaggtactgtgctagaaacctgggaatggaggtgaaaaggcaaggttctcaaccccatggagctcagattctcctggtaaataataaacagacacatggactagagcaggaggtagatagaatggcagtgagtgccaggtgcagtgggagtgctgctgaggggagttggggagtgcttgccgtgactttaaggatgtgtagcaatttgccagtagagaggtgggacgaaggtggtgttcctacaagggaaactgcataggtaagggctgagaggtgaggagttactttaaatcagttctttcaaatcactatacttcttacctatactgttaagaaatatttgggggatcttaaatttttgaattcatgggctgatcgagtgtagactgaatcagctacgccacttgactgtaactatgtgagtgagttatttagcctctccaaacctcatggggttgctgtgaggattaaatgggagactctctgtaaagggtagagctcaaagtttgacatttagtaagctctaagtaaacatgaattgctttttggcagtaacaatattatcttctggtaattttgaaggcttttgtaagagtgagggtatcatgtttttaaaacatttcccatgcttgctggatgacaaatcttgtttgtagtaccctattgaatacctagtatgaggtcagcattgggctgggactcagtgaggggaattatacatcgctcctatccctaggcagcttccaacttagttgagaatgaaaatggacaaatagaaaataagagtaaaattgtatgttcaagtgtgctaaatggctgcatacaggttttcag

SEQ ID NO: 62969 - DNA, 613 bp, Homo sapiens
gaccctgaagcagaaagagtaagagcccatatcaagggaggtaggaaaggaaaaaggtggcaggatcagtggtgtggagaccccggtgggattaacggattgttggatccagaatttgagagatagctaggaggcagtggtcagaggtaggtgcgtgaaactggggagatcacggagtgttcctggtttagggaatgatcatgaggtgagtggctgaggaagagtggatgacggggttcaaaggtaggaaattcaaagctgagggctccagagagctggcaggaagagtggtttggaaacaacagtgatgagctggctcgcctccaagcctagtaaagcaggaggattgtgagaggcaaaaatcaccaccacttaaaagggctgcaaaggaagcagtgtcttccaggtgagagccaggtttccctgcttcttctcttattccaccacagtctgttcttcacatagaagtctgatgttttcatttctatctgtccaggcctgtgtgacctgacctctagctgagtttgctgtttctgctccaggcactggcctgcttggtgtgttgagcacaccagggatatttttgccttgggggccgtttgcacttgctatt

SEQ ID NO: 62970 - DNA, 808 bp, Homo sapiens
attcttttgatatttctaggctatgtggttcatctgagctttttcaaattttcacacatctccaaaaaattttgcaacacatttattgaaaagaatccaaatatatgtggacccatgaagttcaaagtcatgttgttcaagggtcaactgtgttttaatttttactaagtcagtgtggcttttcagaattttcaccatgatgttttataacttagcatttcttttggtcgtcccagtaacttttgctcccattttctacaagtatttcttttttaaaaaggcaaaatgacattcagtttcttaatgtctcaccatgtaccttcataacatttgaagagcagcttatctgatgagtgctgagagggcaaaggcagtgggcactgatttcccatgaagttcatctcttgttggtactgccagttcccacaatcctagcattctctgggcatcagtcagtgtctacaaaaaaggattttcaaatattaaagcatgtgaaaagacaaacaggccaaaactcagagctctctagggactatgacctccaaaacagactccattctgacattttcacaggctacttgaaggaattccagcagggttgttccatttggtaaactcctaaacaaaccctctgtcatcgaggactgatttatagaattttctccttatgtgcttgttctgaagagattaagatagtagatatggttgctgagactcttttaaaagtcatttgatatatatgataagtactatacagaagatttttggtattttgaagtaataaaacagttatttgtaatgtttaaag

SEQ ID NO: 62971 - DNA, 684 bp, Homo sapiens
gacactattttgcaatttgcttttttcactcactgtattgtgaaaaacacttcataccagtttgtagagatcttccttgtttttaacagctatatagtattccattgtatggttgtaccatagttttattcagccagtctcctatgtgtgaacattttagttgtttctaagattttcctgttacaaactgctgcagtaaataacttttggcatttttttaatgatgtcagagatttatctgtcaggtaaattcctagagagagggttgctgggtcaaaagaaaaatgcatgtgtagttttgttagacattgctttcccagagggttgcatcacttcgcattccaactagcactgtaagagaatgtttattcctccacagcctggaggaataaacagaaagtgttgtcagacatttttaccatctaatgtttggtgtaattttgattcagtttctctaattatgggtaagggtgaacctcttttcaatatgtttaaggaccatttcagaatcttttggaggagggaaagaatgaattatctgtttatttctctgtcaggtttttgaacttttcaatttttagagttatttacatattggggtgattagcctttcctcttcagtatgtttttgggtttttcctttaatgtggccaaaatttatcagtcctgtttttattgcatcta

SEQ ID NO: 62972 - DNA, 813 bp, Homo sapiens
catctctttaaatgttattttctttttctcaaaaatagcaaagccatcccaagaatccaaatgacaaacaccgtagcaaaaagtgcaaagatcccaaaccacgggtaaagaagttaaagtaccaccaatacattccaccagatcagaagggtgagaagaatgagccgcagatggactctaactacgcccgcctgctccagcagcagcagctgttcctgcaactgcagatcctgagtcagcagaagcagcactacaactaccagaccatcctgcctgcaccattcaagtacggcggggcccatgctatcctcaacgcggggttttctgtggttttttatgaggaactataagttaccaaaagttgaatgttgtcatttatttgtgctcagtaatgattttcatttctttgttatcagagcttatcacacagtgtctgaagtccacatggtgagagtggcctgcattccattccagtttctgtcctccaaaataggttctgaatttttacaagttagaaatgccttttcacaattattcatccagatttgcctattattagaacaccaaaatagtactagatgctctgagaaaagcgtaagtagtataatacctggcataaacagctaaaagaagagaaggatgggcatgaaagctggagtggtcaaaggaaagcctggtggaaaagacaggatctttgtatatagaaggctcgagaagggcctttccaggcacaggggaatgctgtgagcactagtacagaggaaggaatagagtaagtagtgcctcttcattggaaggtgagaaaaattgcct

SEQ ID NO: 62973 - DNA, 1930 bp, Homo sapiens
ggtgttaatattacacaacacattcatgaataatagaaattgttatatttctcaaacaatgctattaattttgattaaactgtattacctaccaagagccattgaattaacacatcatacattaattcatgaaaactcaaagtgcagagaacagtaaatcagtccgtttgtgtggaaatcaaagggcatgtttgaatctataaatatgagcgtgcacattaaactgtcaggtgccttggggctgacttagccgacaagtcagcaggtctgggcgggagagaagttgcatttctcacaaaatcccaggtgctgctgctggtcttgggaccagggacacatccaggctaaacaggtaaactgggggaagaagaaactttcggctttgtttgtttgtttttatttttttcttttctttgagacaaggtctccctctgtcgctcaggctggtgtgcagcggcgcgatctcggctcactgcagccccgatctcctgggctcaagcgatccttcagcccgggccaaagcgcggagcttccagaagcttttattttctaaatctcacgcctccattcagcaaccctggctgggcgtgggctccctgcaaggcggcggtggacggcccgcagtcgggccgataaggaaacctgctaccattccttggcttcctgggtgcctcactctagagggggaaactgagactccgagtcgagccgtcccgaagcgctacatcgctggcggggctgggattcgaacccgacttctgagatacaggccggtgccccgcccgcgggacctgcgggaccctcgggacaccgctccagccgcgccccgactccagaggttctccagcccactgcagacgacagaatcgcccgcgggtccccgagcccccgagcccgccggggcgcgcccgttgaagccccgccccgccggccgcagcagggagggggacggtgcgagctcgtgctcgctgggcgggcgcacgggagcggcgccaggatagaggttcgcgagaccgccatcgcaacgcaggcgcggtggccaagtggtaaggcgtcggtctcgtaaaccgaagatcacgggttcgaaccccgtccgtgcctgatatccaaccttcagctatagggtggagactttttaggagtggtcgactcttgccgtactctgcgagtagatccttccccctggactgcagacccagccaactgttttccttcaagggtttgggttcaagctcccatccttccctcgcagaaggtggaagtctgggtggtccagcctcggcgagtaaggtccgcaaatttggccggccccggcgatcggctccctacacacagctacccctggggcgcttcatcccctgggagaagatggagggctctgggggtggggcggggctcgcaaactcaaagggtcccctgcagatcatggcctcagggaagccccaacacccttggggcaaggagacctgcagctgctggagtttggcttaagggcccatccacattcttctgcacaggaaaatccaattttatccgctctaacaaaagccctgccgttgcctgatacagagcccacacccagagtcagctggtgtctgtctggcttgctatttttgaaaggaaatccactgtaggcattgcattcgaaagagaagcagccctgtccaggcttggagcaattctgacacgcaaatctgaaacctccggctctgagcctccgcttgcccctctgtaaaatgggcgcttgtgaagcagctgccaggagaggctgctgtggaggcggcctacgtagacggagctccagtcagatcgcacaggttttctttgcatcacgaaggatgcaccaaagggctgctggaatgcctttgaagacgtcatgcaatgaccccaacctccaggaccgccacatcgtgcactctgaaaaccagct

SEQ ID NO: 62974 - DNA, 3962 bp, Homo sapiens
cgccactgccctccagtctgggcaagaggagtgaaactctgtctcaaacaaaaaaaaaaaaaagaaaaagaaagaaagaggatggagagggcagggacaccacaggcagaaggagaggaggccagctcgctccccttggctggggtccctgggacctcctctgtggcatcaggactgcccgctaagttgggtggtgtgttttatgagcgtgacctgtgttggccaacagaggacagcaaaatacattttttatgatcctgggaggttcaggccagtcacgttttcgcgcagagaggctgggcggtggagagggacaagtcatgtctcagttatgtggattctctttgcgaaagaggggccacttctgcaatggatttgggggtccctgggcaggggtgtgggggtgggggaagattttaggaaggggatgagctgctgggggggggcatctcccttactgcgggaaatgaaaagtattacagctatggctggtgagagtgtcagcaccagaggccagatctttgccaggtggaggggacacccttgtgccctacccccaagttccagcacctctccaagagcccttagccccggaagcagcaacaaagtgacattggactggggaggaggaagcacaactttattttctggcccgaagctgggttggtatttgggggagttcttgggaacacagtgtgtctgtgcaatttcaaccctgggggatccaggggactccagccattccagaggaggtgagagaccgtcatggggtgggtgtaagaggcttggggaacctgcctgatgctgctcctacttttactgtttgttcacgggggttgtgtgtgtttgtgcggcgggggaagcggggggtgctgaaaattgggggaagggccaaaagcgccagctggcattggcactgggtgttcccgaaagagggggacagaccgggtctgaatcttcagtggatgcgcccctagctcccggatacctcaagcgcctttggaggactccagcacgcccctcgggagggaagcccggcctcggttccgtctgtgggctgcggtggtactggaagtggggactctttccccctcctccgtgccccctgtttgaagcaccccgggctctgccccccgcccccagggtcgaggctgacgtcgccgccgcatttctaggaatgcccctatccgctgactatatttggcgagcgtttctaggaaggcgcccccccaccccggcccccgcccccacccccacccccacccccacccccacccccacccgggcgggcgcgctaggcttccaggctctcgccctctctgcctggccggggaggagccgccccgccgcctgggccgctgccgccgccgcctccccagcgcggccaaccccgggccggcccagcccccgccccgggccggccatagggcgctggggggttggggggggcgggggcgcggctttgtggcggcagcggaccgtggaggccgggtgcagccccgtcggctgcgcgctctctgcagaaaaggattttctacgctccccgcccatcacttggatctcgtctggggaggggcggattttttttctggaagtacccttcttctccacggtggaggatttaaggctgggctccaatcgaggcggaggctgcagggcccgcggggcgccccccgcccggcgcacgcctgcccggagcccgggaaggcgcagccctgggtgggggggcccgtgcacccccggaggcggcagcggcggtgagtgctccccttcttcccgcctggcaccttccgccagccaaggcagggatcgcggcaggtgggtgcccaagcccccagggccgaaggggtgtggggcggctgtctgcggggtggatgggaacgggagaggggaggtggcggcgggggagcgcgcggttctctcgggactcggcgcgagacgcttgtctgggctgcgattgccgccgctgccgccaccccggctccccctcggacccctcccccgctccccagaggggcgtgtgaagccgggaggtaggaagggggcgaggccgcccccagcctccctagtgcctgggcttggaaattgacgaggcggtggagcgtccgcgtccccgcccccaccccggaaagcccgctcgggaaactgactcgctgcgtgaccccgatctcaatgccgcgcgcggagcaggccggccgcgcccgccgctccacgtgcgcccgagccccgctggcatgggcggcggcgcctgcgggggccgggccccggggatcccggactagccgggaaccaccgtccccagagagttaccgccgccccctaaagttgtcagctccctccccccgagaagcaggcagccctggcgcgttggctttagcttctgcaggacgggggcaaaaaaactaggttccggggtgcggagcggggtgtctgtgcccgagacaacaccaagttaggaaaaagaagttagaaaaaaaaagaaaaaggcattttgatttgggggtggggggagtggcgtttctggtttctctttgcttccaatccccaccaagcggagcgttggaatgcgccgcttatgtcctctgaggacacatccatatttataatttatttttaggagaagttgtgaaaaagggaggggggttaaaatgaggagaaaaggtgcgtgggggagtggcctttccagaacctagaggctaattaagctattaaaatggaaatcatttcccccaacttgggcgcgcagcaaatttgactttaatgagagacgattaaggacacaaataaccaaactttatttagctggagatggggtggggggaactgtacgaggcacctcggacacccgatttatccgctgctaagggacgtttggggcacccctcgtgttgtccgggaagcttttaggcctgtttgctgggcgagattggtgattgctccgggagggaagagacaccccgggatcaagcgatcctcttgccctcagccatggtgtggcaaatgtcccctcctcccacagcgaccccctggcattttggtgagatgaaccgccgccctgagggaacacccagtaacgattccttcagtgatcccggttctccaaactcttgcctcaaaggcggcctgccccggtgctgtcagccgtgaatggggactcacttcttgggaaaagaggcttttggaggctgtggtctcagaatcggggttttgagggcgagatgagtttatgttttatccaactggccctcaaagtcccgcttttggggtcattctggacagcgagggactcaggccccggcagtctcgggagggtgagggcagagagctaccacccccagggagcgcgtccaaaacccggctggcgggggggcggggaaagagggggaggtttgctactttccataaaactaaaaggtcccttcgagggcggtattcttataagtgtgtgttctcagtttgccgaacctactgtgttttccaagggcttctctccttgggaggccgaaaaacgatacaaggaggagaaagtacattccccctgaccacccccacagtggtttaagggacagtattggattggaaaggaattagtaggatgtcaattgtggcaaagtgtttgaagcccccaaataaggcgctcctgaaatgatgaattgtaacgacattagatttgtctttacgtttgctaaattaggagaaaccagctgtttgcttccacctggaattgcaacatttctttgcaactctttgctgttgaaggcgttctttttgttctgttttgttttgtttgtttgtttgtttgttttttggggacagaatctcgctctgtccaggctctgaccaggctggagtgcagtggcgcgatcttggctcactgcaacctctgcttcccgggttcaggcgattctcctgcctcagcctcccgagtagctgggattacaggcgcccgccaccacgcccgg

SEQ ID NO: 62975 - DNA, 2236 bp, Homo sapiens
gtatctggagcaggtgaaaataaaccctgacgctcacaaacatgatataaacaacatacttttcaggcctagtagccaagccgacttttcagggaaagagatggacgttgaaagaatttaggagtggacttggggttccctccatcaccccatgcccagctgaccccttctgcccttctcatgacctcttttcaaagcagccagtgttcagatgctgcctttccagcgtccccagttgtaggggacatatgcacatatttaccaagctttaaaataaggtttctgattttatatcatccgtctgagtttacggaaccacaaagcaaacttctttctccgtgtccctgaaatgctgccccactgcagcaaaggggacttcgcctgggcagggagaggagttagtggctggttgcgcctaaggttagctgtgcggtgtggtatgacagttttctcagagatgtgcaaaaatctaggctctcttgctggaatcgtgtgagatcagtgctgggcctgttggcattggcatttgtgcccaagacagcccagacctctgccagccgaggcccagatgtggcctcagagccactactggtgcccagacaagtccagacaggtgcctgggggtctttcctcccgagacgaagcctgcagcagttcagccagaagatggggtatttggctctcaaagtcagcctccccagagactctgcagggtttaatagcctggtgaccctgtgggctctggcgagggcagaaccccactttgctttccaaatgctcaaaggggaacagatgaggctatcccacaggctcagagcaaatctgtcctgtgtgagtgcaaacgtggttctagaagattcagaggcaaagctgagcttttgcagcccagccccaagcccttgctctcgagcaccagggctgcgatccttcgacttggggtgggcctaggaggcgtagctcccagccagcaagacaacacataacacatctgagttaccgtgcatgtgtttgctggtctcttctccagctccgtgaggcctcccacctgggagctgagccttttgctttgatcaggctgggaggaaaacctaggccaggaagggccgggctgcaggctggaagtggaaagaagtgggccaggtggacagaaaaaggggccaccaactaagccaccttgggggtcggcccagagtgagaactgggctggcattctgggttcaaacacacaagaaaactgtctgcagcctctctgccctggcaccaacatgtgcctgctccaggaagttgcacccagccctgagtcagccaaacccgtgggactcccatttggccccagtaactggactccaggctaccaaaggcctcgtgggttctcgatcgtatcttagaatggcgttaaaaggtccagacccggcacctgtaggccatgccgtatttagccctaggttcacccggagaatattttaggtgctacttgaaagaagagatctgggccctagttgccggctgtcacatggcaagggtagaatcgctccctcacagacctggccgagatggccgggtgctcactggtacaggtgcccagagtccctgccagagcttcggggccatgcgacgggtgccaaggagccagctagcgactggggcgtcggttctgtgtggggatgccttttcaccccgttctcaatctgaaggcagtgaatccacttccattcacagaactcacagaggcctctcctctctgagatggcccagtgtgatatcccaggctgcgtagtaagctcctcctctggtgtcagccatgtggaggggttaaccctttcctggctctgagggtgctggctggcacagggggcacccacctgcagggcctcaaaggttatatgccttggggaagacaccctgaactccttagtcctcagatcttagtggctgaaccaagagatggcacctgggaccttagcagtaaaacccgtccccttttttttgagacagtgtcttactctgttgcccaggctggagtgcagtggtgagcacagctcactgcagcctgaacttcctaggctcaagcctcatcctcctgagtagctgggactacaagcacacaccaccacacctggctattttttgcagagacttggggggggtctcactgtgttgcccaggctgttctcaaactcctggcctcaagcagtcctcccactttggcctcccaaagtgcagggattacaggcgt

SEQ ID NO: 62976 - DNA, 841 bp, Homo sapiens
tgagccaccagctcctcaggcatgaaacctgtaactcagactcccaagtctgatttgcacatctctgattttaagcggcgccggctaaaggtgaaaattattctagtaggtattctttgcaccgctgatttgtacttcaggcaattggttggttttccatttagggtcgggagacaggggccctttttttgtccatcaattgatgtcagttaaacaaaaaagagtgggtgttttggaagaaaaatattaagcaactacagctgccctgaggatgggacagaaatcagaaagtcgtgtgtaaagtttcagaggtccacttttagagaattcttgtttatctcagggattttccgcactcctgtagtcggtgtggggaggggtggggggagatgggggagttgccagttcagatctgtagagggctccagcatgacaaaactgggtgtcacacatcttccttttgggggtcgggaaaccacccttccctgctcaccgacaccactgggacccctcacccccccactcctgcattgatccatagctcagatttctctctcattttagggtcacgatgactcagcaccctcctttctggccagggcacctcccttggcctctaggggcacttgcctgacaggcctcactgtgccggacctgggagccagctgcccaccagccccctgggactctggttttgcagggaaaccatgggtgatcagtcccagccggcaggggccaactgcggtttcactttctgctgcatcatggggtggggggtggcagcgggcccccgctggccagctagagcaggcactgagaggcctgcagacagctgccggcc

SEQ ID NO: 62977 - DNA, 729 bp, Homo sapiens
tgagaatcctgccgtcagccccttagtcccacccagctttcgggcacaaagtcttcaagcccgagagctggggaagacacagctccccgcgtgctcagccatgccatcgtttattctgaaaatatttactagtgtctcccaggcacggttccctatgctggggatacagagacgacaagagtagcaaaaagtgcacatgctcatagtgtgtgtgctgcatgccaggcctgggctctgtgcctcaggacctgggaggaggtggcctctaccgtgcaggagccagcagggctgcccctcacagctgcccacactggccgcacttggccccagcccgtagggatgtgtatcggcaaactccttttgctgctgaactctgcagtggcaagcttggctgtttttcacagttagagtctggtgacgtttaactaaggctgtggaggagagcgcatgtgtgagtgagaggggtgctcgcacaagctcgcatatttcccaaacacaaagcctgcagtagaactgcctgacactcacccccaccgccgcccccgccacccctcttcccacacaaacacaggtgatgaaaaagtaaactaagtgagaggtcaggtctctttagaaatcaagggtgtttgaactcaacagcagagagctactgtttattctaaaccccatgaaataagatgacttatcattaacagataagtcagtggggctacatgttgtttgaacatc

SEQ ID NO: 62978 - DNA, 1384 bp, Homo sapiens
ccttccccacccccacattccccagaggaagtaaccagtgcccatttttcctttcgcacctttctctctgcacagtcatccacctgcatatatgggctttttgcatttttacaaaaatgggcaaattccatacacatcgtcccaggctaatacaatgtggaaagatcaatctcgttctttctagcagcttgctaatattactcattggcaatgaccctcgatgtattttaaggcactgacccctttcccagtgatggatatgtgggccgtttccagcccttcgctcaaccagcagcgctttgacctatctcctcgtgtctatggaaagatgcccaaagcatgattattgggtcaaagggcatggtttccatttgtgtgtctgctttttagaaacagggtctcactgtcttgcccaggtctcacttgtcttgtcttgagtgcagtggtgtgatcgtggctcactgcagccttgaacccccgggttcaagcaatcctgccacctcagtcttccaagtaacttggactacaggttcgcgccaccacaccgggcttttttaatctgtattttttgtagacacagggatctcaccatgttgcccgagctggtcttgaactcctggcctcaagcaatcctcctaccttggtctcccaaagtgttgggattataagcgtgagccaccgcgcccagccctgttcttagtactgagggccctcactccccttgtctcttgtcattgccctatccccagacttggcacagtgcctagcatgcatggtgcctagtacgcaatcggtgctcagcatttgccacaaccaaaagagaaaccatcccacagccggtttgaggacagagccagggacttagggcatgacctccaggtcactgggtcaccgcgtccccactgcgatgacacaactccctttgcagcacatctcagagcgcggattgcaatatccaggttgtttcactgtttccgcccgcaatccccaaaggcagacgagctgatggcatggggaggaaggcccgtgtgcccttgcctcaggaagccaggacattcaacaccagctgggcagacttggaaaggccaaggggcagcaaggccaggaactggcacctctccaggtttctgtcatttaaggtcagcttctcgctgaccactgcccaccacccataagttgagctccaacccagaaaagcaactgtccgggccctgcccaagccagtcccctgccctccctcatccccacacgcctcaccgcacgcattcacttagcacacaattatttattgagcatctactatatgccaggcaccatgccaggtcaggagatgcagtggtgagcagatgaagctctgcactcccagctatcgtggttgtggttg

SEQ ID NO: 62979 - DNA, 1051 bp, Homo sapiens
agtacttattcgaaaatgcatcctccgatcaagtgggaaggagtccagccccacctccagcccttgacaacacaatggagaataaggaggcgcagccctgtacccctttctggtctcctggcccccgggtagctcatctcctgccctgcccttggtgtcctggggctgccctgcaagcctagccaggcctgtgaatcatcaggactgactcactgtctaaaaatacatattgtctcatgttggcgggtgctgctttgatcactgtttgcactcaatctagtctttttctgcttgactttgaggtctttgtgcgcaaggtctgggttttcgccactctgagtccccagggccaggttcctgttgcagcctggagccggaaaagaatctgggaggaagaggttgggtgttggggccagcagactaggggacgacagatcctgccctgccactcatttgctgtgcaactctcagcaaagcacccaacctctccgagccctcgcttccccatctgtgaagtggggatcataaggcccatcctgcaaggtggtttccgcggtgaaaatagaaaacgaggcctgttcctacagcctgtgtgtcttgggaggaactgctcatcatctgtgatccttttttacctgattacgggaaaggggagtgatctgctcactgacccccggctgggcttttccctgccagtgaaatcatttgaaattgtccaaggaaatcaggaacctgagccgacgcagagtcaccgagcttggtgccaagcactgggggagctccagttacagaaaacaagtggaatccacaggccccgggctgaacgtggaactaatttgggaggcaatgagaaagagcggaacataacgcggagcccgggaggcaggtctgccctgagtcaggacgccatccgggggggtatctggggccccttgaaattttcaaggtcctgcttctgaagtggggagagccgggacatgatggggacccacttcggaatctcaggatggctgtgcagagactcagggcacgggcctggggtcggagcaac

SEQ ID NO: 62980 - DNA, 2491 bp, Homo sapiens
aggctggtctcgaactcctgagctcaagtgattcgcctgcctcggcctctcaaagtgctgggattatgggcgtgagccaccgtgcctggcctggctattgcgttctttaatctaaaaggtttattttgatttgcaagcacacccaaaagggatgacatctgcaataatccctctgttgccaggtgtggtcgctcatgcctacagtcccagcactctgggaggccaaggcaggaggactgcttgagcccaggggttcgagaccagcctggacaatggggcaaaaccccattctccacacacacacaaaaaaaaccacaaaaattagccagatgtggtggcttcagactatagtctcagttattagggaggctgaggtgagaggattgactgagcccaggaagtcaagtctgcagtgagccacgattgcaccattgtactcactccagcttgggcaacacagcaagaccctatctcgaaaaaaatccttctctcaagtttaatttggattaccaagtaggagaggaggcttgggtcaatattccccatgaaagcaaaggtgatgacagggtcacaggcgagctgagttaatctatttaatgatatctgatagttttcaataattcagctcccagctgatagacaaatgttacaaacaactccctaaccatggcgaggggatttatctgagcacatttggaatttaggatcacttaaaaggggaaataaataacagtccgcttttcactgctggcctccacgtggcaataatttaccagcattccttgagtcccagcagctttgcagctctcggcctttaatctagaagccaagctctggctcaaagccacgcctctaatggatgaatcagcaaaatgaattggctgtcaactgtgtcctccagctattccagctcgcctgtcagaagcagcatgtagcaggctgctgggtaaaactaaccttttccaaatttgtcagggaaatgattcaaggcaatctatcggtcttgccactttgtgaaagccactggggaaccaaatgtgctaagagtcctccctgtttccctggaggtgagtgggagcagttccctcacataagagtctcaaacactccggcttcactgtgcccaagaacagcacggtccggggtggtccagtctgatcccaaccggcccacccggggcatccggtggaagtcttcgccggaggatccgaaggcagcatcaacgcggttgtctcttgacactgcacacagcatagcatttaatcttcggatgttctagtcaccacacaaataaagagactgagcatcggagaaactaaacagcttgcctgaggtcttgtaggtaagcaacaaagctggcttgaaaccaggatgtggcatttatatatacattttaacaatgttaatactgccacatgcctgctgtgtatttatatgcattttgtttatgtaggttgacaattagcttataaaatgcttcctgtattaaggaattacttaaaatgtttagactttattgttttttaaagaactttccactactgtcaagcaaagactttccaactaagttgatgcattatgtttatgaagaggaagacaacataagatgtagattccttcctaaattgacttatagatttactgcaactccagcaaaaatattccaacattttattttattttttaaacaacttctgtggaacagggctaactcataggcagtgtgcccagagttggcctccaacattttaattaaatattgaaaaaaattaaaagtaagaaaaaaaaatctcggtagaaaacaacagtggttgtgagagcctggggctggtgctggggctggaacgggagaggaagttgactacaaagaaggggagggcattttgaaggtgacagaactattttatatcctgattgcagtgctgattacattactgcatgcatttgctgaggcacagaactgtacaccaaagacggtcactttattatacatcaattaaacctcagttattctgggaaacctgaaagatgaattctaaaattagaataaaagggccaacaatagctgggacatttctaaaaaagaatgggaagggggacttgctttactaggtaaaaaagcttattgtaaagctataggaattgagacagtggagtaatggtgctgagataaactgaccaatggtacagaattctaagagcctagaaaaacacgtatatatctgtgaaactttgatttttgacagaactgcctggaaaaggaaaagctggaaaaattgtttatccatgggggggaaaaaaaaagaaattggattcttagtcacaccatgccgaaaaattcactccagatggatgaagagctgaaatgtcaaaagcaaactctgagaatttgaaaaggaaatataagtgagtatctttctgagcttgaagtagggaagaatttacaaagatagaaaaaaggacaggcataaaagaaaagatcaataagttt

SEQ ID NO: 62981 - DNA, 953 bp, Homo sapiens
cctggcaatagagagagactccatctcaaaaaaaaaaaaaaaaaaaaagaatttacttatacctcatgactcagcttattcattaacccagtgaaaccccggaggagaggaggggaactggagagagaaagagaatgatgggcagccaggcagagctgagctagctcacctgcgaggtgagtcatggcccctgggagggagggtgtctgtcaccaaaagcagcctctcccaacctattagagagtcacagaaattccgtatcaatagtaaatgggacaattttgtctctggttccctttaaccgtcccttgccatgctcctagcattggaagcactcagcactttcctgatggtgccaggatgctgcgctatgaacatgagtcctcttcctaggcctgcctctcacctcttcccacctgctagccctgcaatccacctacagatgcagagcagctccaggacacatcatacacgatctgtcaccaccaagaaggtttgaaaaaatgccaacaccacctccttgaacaccaggccagctcctccgtgccttcatggagccctgtgcctgtgcttcccatcctctgtggagagagaacagtttattttaaaggaagggaatgaaatcctctctccagactatgggttgccttgggacgatgaaatttacttgttgtaactggcaatatttgacttcgaaaaagagttacacttctccaaaagggaaatggataaagaatgaggatgttatttttattttccacatcaattttacgctttgccttgatgagatgatgtgctcaatgactaatttatttcattggtgagttctgtctagaccctacacgctgaaaccctgaaggtcaccaaatgtccccaaatggtggcgcaaatctgagtaagaattgttttgattttgaagtcccatcctgcctgggcatttaacacaatgattc

SEQ ID NO: 62982 - DNA, 6784 bp, Homo sapiens
tggagtgcagtggctattcacaggtgtgaccatagctcactggagcctcaaactcctggactcaagcaaccctcccgagcagccagggctataggcacgtgccaccaagcctgcctacacttgtggattttataaagtactctctacatttctttccctagaaaaaaatattaccaccctttagattctaattctaaagtgctacatctaatacctctaacataagtaaagtctcattttaaagcatgtccaatgaataaatttgcttctactgcctttgcatatgctaagattttgatggaggaaaaaaaaagtacctgaaagcagctttcatggaacccagctataaagctccacaaaccccatttttccagtgagctcacagatagtaccctgtgccctatgtcagcttagggcagcagttagaggcctttaccaacagaaaagaaaaagcctagcttgcttctaaggctacatacatccagatctgttccaccaaaatcaaatctgtggcaaggaggtccatggctacagattcttctgctatgaggcacccagggaaatagtccagaggtctgaattgcaaacaaaataattttaactaatataaaaaagaccatctgttcagtaactaattcccttgaggacatgatatggaagtcaactatccagcttccacctttacatagtatataaatgagaagagaaaagcgagcaggttgggtgcagtggctcacgtctgtatcttaacacttttggattatttgagcctgcccaggagttagagaccagcctgggcaaaacagtaaaaccccatctttacaaaaaaaaacaaaaaacaaacaaaaaaacaataataataataataataataataataattagtctggagtggtggtgtgcgcctatagtcccagctacttgggacgctgaggtgggaggatcacttgattgcgccactgcactccagcctgggacaaagcaagactgtccaaaaaaaaaaaaaaaaaaaaaaaaacagaaagaaaaagagaatgaatgttaaaatgtaggcagaggcatgaaaaatagaaaagaaagtcagcttgcagagccaagtttatatcttaccccaccctgatgtggttggccaacagctgatagagggcttttcggtaaagtaggtagaaacaaaccccaccaaccctcaggttaccaggcaatgtgccaccatgttattaaagccatcatggtgagagttcctgggcaggcagcccgctggaatgctgagtcatctgttcccccgctcacagctggccctcctccccagcacatgctctgcccacaagcacactctttggggaatgcattaggaagcagctacctgaatgtatcctgaaaatcacagacaaggcactaaacacacacccattggagcctgttctgtcacaactcaagccagagtgcaggcataaatcactgccgtttctggaaagagcacaggcacaccttgcactcagctctctagaggccttagctaaatgctgtttagattatttttaaaaaatgtggttttgactggttcaggatttaaaagagttaacaaacatcatatgagcagaaggcacaatggaatgagtgtgtacactctggggtagacagctctactactggaaggccacatgcctctctgggcaactgttttcttatctttgaactgagatgctttccacagttggcttcagggaaagcatctaagactggagtcacaacagagtattcacgcatggggcaaggggtggggacgctaaagctgaactttgcctttagttaaaattacccttgaaacttctttcttcacactggagaacatgcgtctctcagtgaagccaacacagctggtttttcctccagggtcagaacacactactgtttctcctctaggacatcagaggaagacgatggcttgcatgtgagcaccatgttattaaacacacatgtacacacatgtgtgaacacacatggtttataaccagcaggaagcttgctacaagaagagtgtgaaagttgatattcacaaggaaggggcagaatctacatctcccatttcatctccaactcactgggataaggataaatacttttgctgagtgaagtgacaagcaaaaccagtctcacaccctaaaaaataattagccacatcaagtacatttgaattcacacaagtttcaaaatgttatgatgtaactctacttggtacctagcaaatatacgatctaagcctctgtgcctgtcctctggtcacatgtacccaagctagttctctgaagacaaggaaggtgttttagctattctatacctccagtgatatttcttcaggagagaacagctaatacagctacttctctctgcttccgaacagccctgggcttgcaattactacaagccactgaagaaccacggcttaacttcttagggcatggattttaccagagatcagggaggaaaaattaaataattaatctggcaatttaaaacaaattaatattaaagtaaaatggacatattgcagaatagcatttttttaaattgtgagaatggtttaaataaaacataagacggtagagatatttcaccttctgcccccctcaccccgctgcgcccctgagtgctcctatccacgctgctttggtgttgtttgagaagaacctccccccacagaggcactgatactagctgaatggattctcctttctggggaatgagaacaccagaaaggaaaagagacttccaccttctcttcttggcagcaaggaggtgaatgtaatgtccacatgagggtagtttatacatgtcaatttgtattctaggtgcacaaacaacactcagagagctgtaaggagttctctgtggttagaagcaattctgaaaagagctgactcatatgagaaaagcgtaatgcagtatctatttcttttagcaaaggtgatagaaacgcacgtatcatgaatatgtcatgcaaggaaagatgagggcagcctaagctgagaaggtgttcaaataaatttcctgtttgaaagggattatgatactgctcttttccctacctacctgtggacacaacagaaaggtgggaatcctgtcctataaattcaggttctggccctcatttgccctacaagtatttcttagccaaggtgaagtggtcacccgtgcatctaccaaaatggtctggaccactgactgggcaggttttgagaagcatggtcacctgcctcagggtggtagctatcatttcctgagattatatcacaggtagtacacgctgccaatgctgtaggctctgttaccctcactttatacagaaaactgaagaccctgttgaatggcttgtccatagtcttgcagctggtataaggagaactggaatacaaattcaagatgtttcaatcatacaatgctgcaaggagctgatgtcaaggaagatacaaagtaatgaccacctactctgctagcagatggtggtaaattgttcttagaagcagtgaaccaagggcatgatatcaacagtccttgtgtgtgccttcttcagcagagaggtctactgactgtcagtgagtgttctgtctaaacgagaaggggcttagagaggatcatatcctttgacctagtaattcctcttttaggaaatcatcctatgaaaacaatctgaaatgaggactaatttttaatgcacaaggatacgtaaatttttaaattaaaaatgtcttcaaaacacaaacaaatgtttaatagtaggagaatagttaaataattatgctattcatattcattaaaaattatgtgaggttgagggaggccggcacggtggctcacacctgtaatcccagcacttttggcgaccgaggtgggtgaatcacgaggtcaggagttggagatcagcctggccaacatggtgaaaccctgtctctaataaaaatacaaaaaattatccgggcatggtggcatgagcctgtaatcccagctactcgggaggctgaggcaggaaaatagcttgaacccaggaggcggaggttgcagtgagcagagattgcgccattgcactccagcctgggtgacagagcaagactccgtctcaaaaaataaataaataaaataaataaaaattacgtgagggagaaagtagggagaggggagaaaaaatacgctttcaaagcaataataaccaaacaaaatataatcaataaattctctggctagctatttgggaaaaagtaacatgaatgcctctctcataggttataccattgactcaatcaacaaatatttgctgatcacctattttaagcattgagaaaaacttagaataaaaaaatctttgccctcctaagacaattcgttaagcagtacagtttcatatgggtattttcctatatgtatgttaagcctccatttaaaagttaaaataaaaagcctgacttcatggatcttacattctagtggtgagatatagacactaaacaaaaaagtaaaatatacagtgtacgtgcagtgctatggagaaaacaaaaagcaggcagtactgagatgtgggttgtgattttaaattaagtggtcagggaaagtcttactgataaagttaccacataacaatgcaagatgccaaatttcagataaattacatatcactgtttagtatatcatacaatatttggcacacagctattttaagtgaaatctggcaatcttacttactgaaaggcaagtgaacaaacctcattcctaataaattaaatgttaatgcttctgaataggacactaaagccagaaactataaaagaataaactgacagatatactatggaaaatgtaaagctttggttcggcaacataggctagattaagaatagctgggcacagtggcgcacgcctgtagtcccagctcctccagaggctgaggtgggaggacctcgagcccaggagttaaaggctgaagctggagggtgctataatcacacctgtgaatactgggtaacaaagcaagatctcgtctcttaaaacacacacacacacacacacacatacacacacaaaactgtacaacaaattgggacaagtatttgcaaaatacaaaactcaggattaatctaagcatcattttctcctataaaatgaggggagggggaagatacctgtggttcatacaattataaggatttcagaaccatgtcttgtacctaataaccaatggttcattaaatgtaataaataataatcatgatgtaggtgtacttataaatcagcaagaaaagcacacaattcacaaaataatatcaaccaattaaacttctgaaaataattctagtgtcagctttggcaacatgtgaactaaaatttgaatgacatccttgcacaaagaggtcacaaaattttaaaagcaatccattttttaaaaaaatcatcaatggacattaatgctgctggatgaaagattactgaggaacagggtttcacagtctcaaagtattactcacagagtacttatttattacaaagcaggaaggctacaatggaaaaatctgtgaccactatttacctaaatgatgtcaaaccagacatcagcaataagggaacaaactgataccatgtgcctctcagtgtgatgcactgaaaagagcacatcaactacgtggtactcccgccagaaacatttaatctgaatcttatcatgagacaatcagaaacatacacattgaaggacactgtaaaacaactgatctgaactcctcagaaaaatgtcaatcttgtgaaaataagaaacaggctggggaactattccagattaaaggagactaaagactaaagagccatgatgactaaaagtaacacaagactttgactggagcttggatccaaaaataaaaatagaaaaactgtaagggacattattaggacatttggggaaatttgattacagcatggacattagatcatatcaaaatcatatcagtgttaaatttcctgagtgtgataaatatattagggcaatatttttaaaaagcctgtgttcttaagagaaatacactaaaatacttctaagcaaactgttatgtctctgactctcaagtagtttagcaataaaaaacaaatacatgtatacatgttcacatatgtacatattatgcttgtgtatatatgtgtgtgtctgcagagagggagacagagcaaatatgatagaatgttgccaacttgtctataggtttgaaatttttcagaatcaaaagtgaagctgaatgcagtggcacgagcctttagttccagctacttgagaggctgaggcaggaggactgcctgagcccaggagttcaagtccagcttggccaatatagtgagatctcactgcctttaaaaaaagaaaaagagtgggagaaaatattaataaaaaataaaatgcatgaggtctaactccaaaaacaaacaaaaaaggaaagaaaatgcattctctctcagtagtaatcaaagaaatgccagtaagaatggttttgaaaaagacttaatgttggagaagcgtaactaatataaccttttttagagggtgatctgacaatctataagaaattctgggccaggcgtggtggctcatgcctataatcccagcactttgggaggccgaggcaggcggatcacctaaggtcaggagttcgagaccagcctgaccaacatggagaaaccccatctctactaaaaatacaaaattagctgggcgtggtggtgcatgcctgtaatcccagctactcgggaggct

SEQ ID NO: 62983 - DNA, 5064 bp, Homo sapiens
ggcagagattgcagtgagccaagattgcaccactgcactccagcctgggtgacagggggaaaaaaaaaagaggccaagtgaaattctagagacttttaatttcccatttgcagctctttctttcatacgaaattcctacgcccaaagaggtttgagagtaataaaaattgtagtaaaaatacaaaataaatgaaagatcctataataagaatactattgagtaaataaattatggcatatcaacttgatggcttatctaatgcagtcagttaaaatttaaaatgatttcacagagtttaaacaacctgagaacatttctcaactgttaatgagaaaagcaaatcttcaagtccatctatagtatgattacacctacataaaataatgaaaatgatactgtaagaaaatatgccagaatgttatcataattatttctgggtgattatgtttcattattgtgtgttttccaaattttctgtcataaatatgtacctgttttatttttataaatactttttatcctaaagtggcaggtcaatagacaaataacataggcaggcaggcaggcaggcagatagatagatagatagatacatggatagatacatagataagacagacaaataggcaggctgggcatggtgcctcacatctgtaatcccagcactttgagatgccaaggtagggggattgcttgaggccaggaattgaagaccagcctgggcagtagagtgagaccccctcatctctacaccataaaaaataatagtagcaaaataaattttttaaaaaataaataaaaataaaagataaaacgtgtagcattcctggactcagaacataatataagatttttgttattatagtgacctgatttagaggatctaaaaagtgagtgtggggaaatgcaggctcacattcccatagtgagacactctgtaataaccagagagaatttataaaaacgaaactttaaaataactataggcttaaggctaacagatatatcaaaaatatagaaatccctataatttctgaatgtatgcaaatcaacattgtaggctgacaatttccaacatttgatagaattttaaaattattcaatgttgtatgtggaaacttgaaaaaaaaaaaagataatttaaaaattattctcagggggcggggcatggtggctaacgcctataatcccagcactttgagaggctgatgtgggaggatcacttgaggccaggagttcaagactagcctgggcaacacagcaagacccagtctcttaatttaaaatatatatatatatataattcaaagtaagtggttctgagaataataaaattatcctgagaatccagaaggtaaaaaaattttttaaaaggtaaaatttccaaagaagcaattaaattataaataaataaaattattctgaaataattaaaataactcaggtgacgtcacccactgagactgactcttaagaaagacgcccctttgcaatgagaaaggtatctctctcctacaaggttacagtaggtaagatgtttttggcttatggtaaacagcttgtttgagaagttgcctaagaaaagtataaaccccgtgtcagctgtttgttagacttactcatcagcccctgatgtggcatccagacaccacctacccacccatagataatctcttggcaacatcaccactaagctggccctgctggctcacagaaagaacaaacagcgcacttaggagctactgagctggaggtgaagagaagggaaagaaatggggctttatttaacaagtgtgacttactgcatgattatttagtgattttttctttggctaacagtttattttaaatttttattgaaatggtaaagcagtttaataactaatcctttttcatgtgaaaggacctttggaagatgcaaattttaagccctaaaccccatccatcacataagatagataacaaattatgaagatcaattctcatcaacattcaaagtctacccaccaatattaaactctaacagttggtcaaatccaccaatttctaagagcacttgaaagatacttttatttacatattaactgcactaaacaagtactggggcaaagtgtaaaacttgcttcatataatcagtacatcctcaacccctggaaagctttccatgtttttctattcttcaaggaatacatctttggcactgaatttcttttagtagaaaaggaagataatgggtaagtgtccttgttattgctttggatccctcagaaatgggtttcgcaactcaccagagttggaaaacaaaaatgtgagggcctggttgattctaacatactcctaacaattatctttcggtggagaggactaaatcctcacccagagcaaacaaacaaaaacaccccaacagaacaatggcaaaaacaactggtaggatgttcccgttgagaaggattcccggatcacctaaagattcctcctgtcctctactgggtgttgctgccagggcatttcaggcatctttgcagcccgagactctcctcaaaggaaagaacagcaaaggctgggggaatatgttcatttgtgaagaaaaggaaaatgtcagggtcgttttcaaagcatggggtgattagttttgccaaaaaataagtcaacaaaaactgcagaaaaactgagtaaagctacatattctcctaactgtaaactgccatcaaggtggctcttttaatcattacatataaaatatccaatgtacccagtactgttatttttctatcattttggcgaattctagtgggaaaaaaatgaagaatggggaagctataaacttaggaataattaagtgcctacactgaaccacaaattatataggactttgtaaaaatttgtttaatccacaagtatggaagaaaaattaatctttatgatttaaaaaagaaaaaaactcagagactcaaagagaaagaaaataattacttagttaaaacaacaaataaggaaacccaaacttttagctggacttagtttcttaatctacccttctgcttttttgaagtccatgccagagaagtgtgttttgagcctagatctccatgctccagtcctcggctgccaacagcatgaggcccaggacagaagtcctgccacccccatctatgtgacatggtgttttgactttgccatgcaggcaatgcttatcacctagccaaacttactcttctgttacgctaaaccaggagggggaaagacaaggcaaaggaagaaaagacatctataaaaacagcagaaaatgtttctgaggcaatttttcttttcagaaaaaaactgagccacagaggaaaaaatattcaccaatgtcaaaagttctgaatgccacccaactataggattgctcaatcaaggtagtttctggatcatttctccttttaaagagccccatgaatacacaaaatcagatcaaaagttcttattcttccactatcacatctatgaaattatttcctttaaattatacattagtcttcccttgttaaaaaaatgtaagaaataaaaattaaaaactcactgctagcttaaagccttaagcactagcttgtttacctccatgagttgacacagggtgatgagtccaaggtctcattatcttttaaaggtcaaggatgagatagcttggcttgttcgatgaacacaaggctataccctcaacaccctgctcagaaatgaatgccactgtttgttcacaaaggacagggaaagagcgtctagacagattaacacaaatccattcccactgctgagaaaccccaaaccacatcctatttgatggctcattaaaaaaaaaaaattacttgggaagtgttcaggcagcagataaattcctacactagtcagaaagaacagctaatcaacaatacatcacacataatataagcttgactcaatgagctcaaatcatgacaaaaatatgagactgagacatacggttcttctctgcctcctaaattattgggtgtagcagtttcaagcagagatccatgtatacccgaaaggttaaatgcatccactatgttatggtatgttatgttatgttatgttatattttagacacagggtctcaccatctcacccagtctggagtagagtggcacgatcttcacttactgcagcctcgaactcctggcctcaagcaatcctcctgcctcagcctcccaagtagctgggactatgggtgtgtgccaccatgctcagctaatttttaaaatttctttgtagagatgaaggtctttctgtgttacctacgctggtcttgaactgtcctcagtctcagcctcccaaagcactgggattataggtgtgagtcaccaggcctggacattaaatacatctataacctacttcacaagtaattctgaaaagtctctagggtctaaaaataaagtgatttttttccttccttctggaagacataagttaaaaaggcattgtgtacaaaagtcagtatgacaaagaatttaatcttccactgtgtagctaagaattaccatttagttgagaactccttgacttgtcatgactgtgctaagtgttgtattaataatcgtcctggccgggcgtggtagttcacgcctgtaatcccaacattttgggaggctgaggcaggcagattgcttgaggtcaggagtttgagaccagcctagtgaacatgctgaaaccctgtctctactaaaaatacaaaaaattagctgggtgtggtggtgcacgcctgtagtcccgaggctgaggcacgagaattgtttgagcctgggacgtggaggttgcagtgagccaagatcacaccactgcacttcagcctgggcaacagagtgagactctctcaaaaaaagaaaaaaatcatctcacccaacctgatccatcctgtgaggtctgctctaaagacacctgggggaatggtgtgtctatgaggaggaggctcactgtcttgctccagatgtgcatgcaaagtattacttcagcttcgttttactcaggaggacacctgggctcagaaacctttgataagaaatcaa

SEQ ID NO: 62984 - DNA, 3615 bp, Homo sapiens
gtatttttagtacagatggggtttcaccatgttagccaggatggtctcaacctcctgacctcgtgatccacccacctcagcctcccaaagtgctgggattacaggcatgagccaccgtgcccggcctcatccactgtttttactcagctcccatctcaggccgcttccttctaaaggggccaagatgcaagttaataagcagctgaaatgaacaggctggcaaagtaaaccatacatccctggttttcccaaacctcatcacacaaaggaaaagtcaagggtgtaatccacaataaggagattcatctgcagaaaataaactatcaagaaaagaaaaaagcaacatcatcttcaattaaagtcaaattcaacagttgtagccatcctatgtctccatttgcctaactatccagtacttggagccgtccacggtcactgtgccagggttaaagttgggccaggagtggccgggcctccctgcagccagcccatttttgtggcatttctcttgtcaggcaagaaccagaatgactctcctgaagctctgaggtgagtacctctcctttaaaagcaaataaaaagtagacagcccagaaatcctcttcctaatggctttgggtcaaacaccctggtgaagaaaggaaggcagagaacaacaaacactccagtcttgcagctatattctataaagtctccattgttaaataaaatgtatagaggtcaatggtttggactgagctcctgcactaggcccaacagacctaactgaaatggagtcactcttaaagttccatgtcaccaagctgaaactaatttctctatatgaccttgtggggaatccaaatgagagtaaacagctgaatctccaaacaagccagttttacctgacgacatgataaattgagttccctctgctttaacctttacaaggaaagcaactatgaaatgaccaatctgctttttgttttctgtttctgctttcttcaacccttctctatctataaaaccaacctcctctgcccagctcattggaacgctcattctattttatggaatgagttgttgtcccattccagaactgcaaataaagccaatcaagatttttaaacaaaatctgtcataatttttttctttttgacgtcatgaaagctgaattagcaaatgctgagtcattgtttctagggaaatacaagattagggtcctacaaacctctgatcacatgttcatcaaccgatcaatatattatcttgttttatgtgtgtttctgtttaaagacatcttagttaatatactgttgattcattaacactgaactcatggccaagagcactttaactcatgtgtgaacaaagctcatctaacacgtgttttctctgtaaggcacctcacatccttcttgcattcaggaacactgggtatccctctaacactatgctttggggtcattttcaacagcaaaatcactaataaaaaggacaaaaattcaaaacaaaaaactggcactaaaagcctgtgaaaaggagccgtgtttacagcccaagagcagaaactggaaggcagagtgcagtctccttcagctttggctggaagcacatgttgggcaatacaaaattttcccaacctgcatatccctggggatgaccacaaaagcacgtgaaaactgaattgtgggttacaaaaaattgaatatctgaattcacaaatacagaatctgtgaataatgaggactgactgtatttttaaaaccatgcccaaaccagctgctcaaactgagtgtcagaataaatccatagccctaatgagtacaacttcaccttacagcaaacttctcctgtgcctgtggaattctcacattccttatgaacctactcaaaagttaacctctgtaacagaaagctgctctagtaactactgaagtgggacccccacaagaggctccaaaggagacccctgactgcactgataagagattaattagaacggcaacccaactgtaggaagccatgggaaagaaaaggaaagacaactaaaaatcattctggcagcaggttttgtctcttgtttaaaaggtacagacaggtgaagacctgcaagtcacttagggcaacaaacatggccctacctgagggacatgctgtcattttgcaagccgatcatacaaacaccaagagcttcacactcacacagtctccatgatgcagcaatacatcttttttacaaacttgactctgtgatattttattgtctggatttctgaatagactgatgtgggggggaaagtggacatttaccgagcagctaatgccaggcactatgtcgagaactttaccttcataacctcactgaattctccccagcctggtaaaatgaattttctcttctccactttaacctctggagctaaggactcaggttacatcaaacaccaccgattttatttccttcaagcggctaaaataactcgagagattgtttggatatttcaactagttgagtattcaattaatcactttaattactaatgattactttataagtatttcttataaactggattcatgagttttcctctaggtagagatctttccctgcaagaaacgagagaaaaaacattttctctttacagaaacttctctcatctctagtcataattctttaactgtttcatggaagactggacacagatcaagcagcactcagcagacatcttcgccctgactcctataaaagtgtcacttcaccgtgagtgcaaaggtggccctgagcgagtgcctaaccaaggcccctctgccaggcttctccagctccggactctaaaggcttccccacaactacaggagaggtacgctgtcgaatccgaatgctaagtctgtccacattacttagcatgaataagcatttcaatgttttacttggcgttggaaaggtagattggttgccagcacgacagcaccaccttctggttggtgaaaaggaattaagatacaaagtcacatctggagcatttcaagttttgtaagccagatggatggcaaagttgaaaatctagtttccataaaatccgaacaatgtcagtagcaattaaacaccctcacagatcagtaatggaatagtaactgtaggtcactactggctactgctccacttctgggcacactgcagccacttccagcctctcagccctgacattgaagcccactgcgccctatgaaagaaattccttatcatgtcatcagagtcacatccatccccctggctgtgcaaaaaggttctctgctgttcacaaagtccaaatttgatggccagcaataaagtatcagacactggcccaacaaccactcccactggtactcgttggcaggtagggagtatcgtcctctgatggttctaacgaggactatcatcctcttatggagcccatgaggactcggcatccccttcctgttcccctcaagcatgggactccttggtagactgtgctggagaaggatcttgagtgtgaggtccaaatggggcttcctcctataggtgataccatccctacagaaatccagaaatccagaccacgagaccccatcatgacagctgcaagaggcctctgaactctaaacgat

SEQ ID NO: 62985 - DNA, 1456 bp, Homo sapiens
ttgcttgagctcaacagttcaaggtcagcctgcgtaacatggtgaaactccatctctaccaaaaaatacaaaaattagccaggcatcctagcgtgtgtctgcagtcccagctactcaggaagctgaagtgggaggatggcttgagcccaggaggtggaggttacagtgagccgagatcatactctggcctgggtgacagagccagactctgtctcaaagaaaaacatcaaaaaaaggatgcaggatatatgaataagactaaccaatattgatgttctttttaagtgcacacagtatgttcaaaaacatagaccttatgcttgactataaaggaaattctggtaaatttaagaggactgaaatcctattgaaatctttagtcacaacagaatgaaattataaattagtaacaagaaatctaacgaaatcctaagcatttggaaatgaaacaacacatttctaaataatccaggatcaaagaagaaatcacaaaacttttccaacttaatgatatttaaaacatacgtataaataaacagttaacatacaactaacgcagtacttagaggataatttatagctttaaatgcttctgttagaaaaggaaaatggttcaagtcaatgacttgcagagtcttagctatgtacacatagctagctgaccataaggcctgtgcgcccacagaggacagaggtccagacaaaagtaaacattggggcagacttgtaagctgccggaatgttgagtctgttccctaacttagctggcaaagggttaaagctttaccagctcaaggtgtttcagcaccacctcttaccaatcactggctaatcagtaagatattaatatgttgacctaccaacaacctcgaggacgccaggcttaaattttttaaaaagaatttagaaaaaagaagaaaagaagaaccaatcacatacggttctagctcaagaaactgagaaaagaagagcaaagtaaacccaagcaagtaaaaggagaaaaaaaacagaaaccaacaaaatagacaatatcaaacaatacagagaaacgaacacagccaaaagcgttcttgagagagatcaacaaaatggtaacagctgactggaatgaacaaggaaaaatgagacacaaatgagtaatatcacgaataaaaaccagttatcactacagattctgcaaacatcaaaaggataataaaaagcacaggtaaagttcaaagttataagcagccttttagcaaattcagggctgaacaatcatcctgaaagagttgtctctacaattctaatatttatctgttcagcataatcaaaagctgtgctttttaaaaacacaatttaacataagcacactcaataatttagactgaggcaaagccaagtgtcttccctcatcccaaaaatcatcctgaaaaagcttctaaggcagggtatcaggaattcatacaactatctg

SEQ ID NO: 62986 - DNA, 1356 bp, Homo sapiens
agaggggagggaagaagaggggaagggagaggggggaaggtggggaggggaggggaaggaaacattggagaaactgatgttgaagctgagataaggcaggaaggagggcatagtcaggttctggtgggaggtgatgactgcataaaagatggcttcttctggcaaaggaaatgttgtcagaggcacagcatgctcaaattgccaagtattttgttaagagttgtcttttgcataagaaaagagactataccggaaaattaaactttactagcaaagctgcatatatcaagagaacagtgatctacttaacctaggaggaaaaaaggtaaaatatcacaatttcatcttggcctattccccatattccctattcaaacacacatttatttcctcatgctgcagtgtgtgtcaggtatgagagaggactcagggccaaacaagagggacccaacactgccctcaggaaaccaatgcaatgagcaatcagacaatagagtgcttctatggctacacatgattctgaaatgtagctccctgattagagttaccacggaataaaatacttagcttaaaagctactgttttaagaattgtccagtagtaaagaagagagcaactgttatttgacatcagatatggtggtataacaggaattttaaaagaaactttgacatcccatacacacaagcaaggaatcatgcttgtattttcaaataaatgctactaactcatgttttacagatttcaaagcactcttacacactgttcacagcaagggaggccaagcagctattttaataattacctaccacgggtcaagcactgattgtgtagtatggggctctttgctggcaacttaatatccatgatctcatttcatcctcacaacaatcatgccaagtaactattatctccctcttaaacaaacacggaacctgtggctcggaaggtttacataacctgcccaaagacacatggctgacaagtggtggagccaaagttagtccccgtgtcagtctgtgaaaactccttttatcgggctgcacagcttcaatgtcaccgagtgtggctagcaaaggagctgaagagtgtacagtgagcagaggaagctgaattagactgcaggtcaggactttgaactcagtcttcttgcagccacactgaagcctcactgtaactgtaacctcaaggtccccacccccacctaaagttatcttgagctttctaataattcaatccctctggattctctctaaaccatctttctaaggatagtggggaaatggatcacagaaaaaatctctatgcaaaaattaaaatatttaacaagcaacatcaatcacaccctgcatccac

SEQ ID NO: 62987 - DNA, 598 bp, Homo sapiens
tcccaggttccagcgattcacccgcctcagcctcccgagttgctgggactacaggcgtatgccaccaagcccagctaattttttgtatttttagtacagatggggtttcccgatgttgaccaggctagtctctaactcctgacctcaagtgatccacctgcctcagcctcccaaagtgttgcaattacaggcgtgagccactgcaccagccatgtaaaatcatttctaaagctctgaaattcatttcagagatttttctcctgggccaaatatttatcacaaatagaaaaaacaaacaagcaacaaactggcatcctcaacagttcctggcactcagtagctgctcaataaatattagctaaatgaacaaaattaatcatcaaagagtcaagggaaagtcctccacagagctgtcgtgttagtccaagtaaacagaaagaaaataaatattacccatcttaccaatctatgaacaagtgttcctaaaaattctaagtgtaacccttacaatgggcatttgtgagctgagaatgacaacacaggtttctttttttttaatgaaatgcaaagtcactggataaatgctaatctctctggg

SEQ ID NO: 62988 - DNA, 1487 bp, Homo sapiens
caatgtgaaataagcacatcatggagaatgcagtgtccatcccctcaagcatttatcctttcagttacaaacaatccaacgacactctatttaaaaatgtgcaattaagttattaccaaatatagtcaccctgttgtgctatcaaataggtcttattcattctattttttgtacccataaaagctattttttaatgtagtcaatcctacactatcttgtttgtttactccacattaccttacacagaaacccctttcaaatgaattattaatagcacttctcactctttccctataccttcaccttcacatctggggtttagagggaactgaatagctccaaaacccggaagaacacgaaaaccaactctgtgtgacttggcagactgcggctctggagagcgccacgcaattgtgaaactgactctaaaactgtggctgagtgtctgcggaactgaaccaaagtaaactctcccaacggcctcccaccgtccttatgccatgctgtttggaagccactgctctggtaacatctctgcccttctgaagtaaaattaaaacatttcaatataggcatgcctcatcccagctggctgtcaaatggcctgcactgactccctggaatgatttgataaaatacttcacatatgcctcatccaacttgacagttttcatcctagcatatgaggaaatgcactaggcaagcagaaatgctgataaagacatgaaaggatgttccatcactgtgaactgtattgaagaacaatctctcccagaaggactttcatctgcagatatcaaaaagacactcagactaacacttgcacgaaacgttctttctattttagcaaagatccgagagggtgtaacacggtaaagaccctcaagactgcgtgcgggtatcttgccacatttctgaaagctttctgatgaaatattatttccccacttattctctaaaggactgacattaactttatcaaacactaaaattaaaattcccattaaatacaatggctaattttacaaaagaattctatcctaagaaacagtgtaactcaagttcacattctagatgtcatagagcaagttttaacctttgtggaatctgtcattttttaaatgttgtatgagtatatcactggcagtgcttgttatcctggctttcaaacaagtctggaaagactccagggtaaagcacagcataccaggatcttttgctcaatacactgggtcacttccactcagtctcttcacaggctacacagcatacgctacacaatacctttagctccaaagagccaccacctcatctccattacccatgtgctgggtggcactcacaaaaagccaccctccaaacttttttgtgaaacaggcggtataggccgggcgcggtggctcacgcctataatcccagcaatctgggaggccgaggcaggtagatcacctgaggtcaagagttccagaccagcctagccaatgtgg

SEQ ID NO: 62989 - DNA, 3187 bp, Homo sapiens
ctacaaagaaatacagaaaattagccaggtgtggtggcacatgcctgtagtccgagctacttgggaggctaaggcaggaggagcccctgagcctgagaggtggaggttgcagtgagcctgggggtcagagcgggactctgtctcgaaaaaaaaaaaaaaaaaaactatgaataaaaaaaagaaaaacataaaactattaaataccaaggactacctcaaaatccagaaggcagtaacataagccttctaccactccttgaaaccaggaggccaaactgtagcatgcaactaggttctctgcaagagataaattgggtgaaattactgctgacagctaccactcttgtttttaagtagatttaaaaaaaaaaaaaaaattactcaaactactctcttggcaactcattagcaaaagtctaacctgtttctgtgaattggccacaaattaagctttagccactaatgcagcactaaagattagcaaacacttgagggagtaacacacacaatacaaaagaatcagacacctctaacattagcaaaatcctccacccttaccacaaagcttcagacacagattatgttaagtacaagcacagatcaaaggttattctatgatgacacaatggcttgccttggactgtggcttatctaagccattccctagtagtccggtgaatattaagtgggttgcaaaacaatgctgctattaacccatttcacgcagctatgctcaagaaaacgaagtatgatattcaaaaatgcatgcaagcagtcctaaaggtgattcaggaatactttggatggagactcaaacctctgagaactgaaaagatcattatagttctttcaaattctacattaccaaatctatctacaaaatcacagatttgattcacaaaggaaaggaaatacttagttttgctcctgaggcagcaggctttccagtcctaaaactgatggcagaggaggagcgtgaatcagacaggcggccactttaagaagcagttagcaaaaaatggtcacgcctagtgttggagccagtgcagtgcaaggcaagcatgtactgacaagagctccagccacgaaggaaggttgtgagtgtaccatgacagatctggctggcaggccactgaaggctgtctacatgatgctgaccacgagttttaatgtgtttgaaaattcctttgtgtgtgtgtgtgtgtgtgtgtgtgtgtgtgtgtgtgtgtgtgtgtatataattcttttaagttctgggatacatgtgcaggacacgcaggttaaatatgtatcttttaaattgagacagggtctatgttgcccaagcaagactcaaactcagtctcaagtgatcctcccacctcagcctcataaatggctggaatgacaggtgcacaccaccgcacctggctttttttttttttttagttatacaattatataactagtataatctcaatcagcaaatgaggaacactgatctcaattagtaaatgaaatagacacagaacacaaactagcaggaaattctctaagaggacagctttttttcttctgggctgaggaattatgagtgggatttttgtgttttaaaaagaaaaaaaaattaaggacaaaaattcctaactaaagtaacatttatcatggcctgttcagcctcagttgatcctctcctgtctggaagttatcggtccccctgtactgagaatgggaggcagattcttccaagtttagccacttgcccttggccaccatggaggccgaccctaagcttcccactacccgccctacacacgcaggccctgttctctctctcccacgtggcttttaacctgagctgtctccatagcctccctgtgaaatggtaagcctagagtaccagcgggagcagctagggacaagggttttcatcctaaaccactagtcaaagcccttgtgtatataagagaagcaagtgtaagcaagtgctcaggatacaacatcccagaaacatttttttataatactcaaagggctgattaacttatagcttcacgtgatggcgtggagccctgatacaaaaaatgaggttgctgtctgaggaagagctttgggtagagcgaattttcaaggcaacaggaacaacacgcagtgaagagagccatgtggccggagatcaaaaggacaaccttcccacgactgtagtgcaaagcaagctgctacctgggcatggggcttgccaggcacacctgctcccacacaccgtgatcaccatcaggaaaacgagtgaatcagcatctcagggtgaggcgaggcctcagaggtgtagggacacagaggtttagtttgcataatgacacacacacaggcctggatgatctagacagacttctaatgtcatgacatgtgttaataaagaagaacagagtttattctggtctctcttcctagcaaaaggaaaaacctcaagcccccaaactctttatccttcctcctaagaactcagtattttcactccccgagtgaaaaatttgcattcgtgtccatctgctttctgcttctctcaagactacacttccgatttctcaaaaaagagatttccaagtaaaattgtacccctctcctaccactacagactgggatacagaaatgttgaatacaatctcatctcaacccaatttgagcacagaattaatctgcggctcaccccaagtcccaagccttctaaagagaaattgaaaccttaaccgaccagcagctctactgtacttgcaaacggtcttggtatttccttcagggcagagcagtaaaagcacttcataagaaccctgtatgcaaggctcatcattatacatatttatgtgctataaaaaactaattttatcatccagggtaggaagcatgcagacatctctcacaaaataagctcatttattttgctcactaaggctcctgtgtaaaataagggtaaccactggctagatgggagtgactgtggcatcagttattttaatttcactcaggtggggggaatacagttttcaatctagccacttgctgttttgacaaatagagcgttactcaacatttgtcctgaagccaactcatatcctttcttaaatacatacactagaaacaaaggcaaaaaaaaaaaaacaaaggaagaaaaaaacaaaaccagcagctcatttcaacagtctccaaatga

SEQ ID NO: 62990 - DNA, 746 bp, Homo sapiens
ctcatcttttcacattccagtgcttactgaagatagccaaaaaagagacctgcttattcttcctctttctaagaactgaggtaaacagaaaacaaccttcccgaaaaccttcataaaagggtcaaggtgtcttgacaataccgaagacagttaacaaaacataaggcaaacgtctgattttgtgctttctgttgtacaataaaaagcaaaagcagagagcatttttagctcttagattttagatctggatttgaccaaaggatcttaacattaagtttggttttcaatgcattgattaaaactgaccaaagctataaaagcaggtaaatcatttgctgaggagacagcctccaatataaacagagtgcattccacacaggctgtcattagcagtggcgtgatcctgatttccatggctcaattctctcatgactttcctcctgattccaaaaaagcaaggaggactatgggaggtgcccaggccatgaaaaagacaaaatggcaccatgcaaaacccttatgggacattcttctagaccagtatggcttaaaaaaacacctcatatcacattcagtctttgcatactgcttaaacaacagtggtctcaggatttcctcaatagttgacttgataaagcttcccaaaatggcataactgatgctactaaatgctaatttagaataatgcagacgtaagtgaagtttatttcccttcgaggtttactttttaaatgttaagtctggtg

SEQ ID NO: 62991 - DNA, 600 bp, Homo sapiens
aacagggtcatgaatttattaccctaaaactgaaggtcaaaggtgaaatgatttgccccaaagcccaaagttaatagagaaccaaattctgatttcacatttccatgctgcctcatcagcaattcagaaaagaaaaatctcaattatgctacttacctgacaaacaaatttgacatctggtgaggatctattgaagggtttcgggaaaacatagaagttaaatgacttcgttatatacctgggataagataaaaggagacttaggaggtgacattgtgccacaaaaacggaattcccaacgtttgttaacacaacctactttgaatctgtgtagtcatacttaaaagtgcaaaggccaaactgaaatagcaaaaagtccatggaatgctggaaaagggaaataaaacatctgtcacaaaagtgctgcatattccatgtgagcatagcattctcaaacaggtgggctttctgaattactcaatgagacttcagcagaatacttccaattagaacagattacacatatgaatcagaagcattattaatttgtatacatttcataatacttttcccatttaaggacctatttatccatcatcc

SEQ ID NO: 62992 - DNA, 1217 bp, Homo sapiens
aacgtttaaagggtaacactgagacctgtgaaacccgcccaaggctactaacagcaagaggccaccaccaagcataagaagttgggggctgggggattgaaggagccttggctatgcactgcaaagtgctagcctgagcttgcaagggagggatacctgaaaactccccatcgatggcgaagaagtcggcctcctctatggcctggtacactttgtgaagattactcttaaaatctgcggagaaaccgaaaagaggctcagaaccagtggcctgaattcctgctaaggggagagggaaggagggccgaggagctcccgaggctgagagccggaaggggaaaagtcccggaggtgtgcaccggggcgaggggaatcaagtcctcgaggggtgcatgggtcaggggggacaagccccggggggtgcccggcccggagaaggacaaggccccggatggtgccggggttggaggagtaagtacaaggctcctagggtgcacggtccgcagccggaaaagaccccaagaggcgcaccggcttaaggagggaaaagccctgaggggctgcctcagccccaggcccagccaaacacgccggccatggtctcggcctagcaggccaggggcagccgggtgtggggaggcggggaggtgtacggcggacacgcactgctcctgattatctccattctgcagagtggccggaaccttggccccacccgggcccgcgcccgcctcagcggttctactcgccgaattccgcggcgactgcggcagtagctgaggcagccgcagcggtgacgccggccgcgacttccggaaacagcgcgcgcctgctgcgcttgcgtcagcgcctgcgcggcggcgggggcggggccaaggctgggctcctttccctccttatagggacaggggaggggcgtggctatcgaagtccccaaggcgtggcctaatttgtgcgggctttcacttcagtagaaaaaatgtgcatgtctcgacatccagtcgaccaggaaatactgactgggtttctgtgatatgctagccactcttacaggggtggagatacagtgatgaacaggaagacgtgctccctgccccattgtagcttaaacttggggtaaggggaaattcaggcaggagtgaaacttgccatttggtaacacatgaaaatcgctattaagaaaaagagcggggcgatgtaatagagaataatgggat

SEQ ID NO: 62993 - DNA, 2658 bp, Homo sapiens
cacttattagttctggaatgcattaaaccttcctaaacctcaatttcctgggattgtattgaggctcagtggtgctaatgaatgtgaactgggaagcagcgtattaataaatctgtataaataactgtttaatgggggcctggcgccatgactcacacctgtaatcccagcgttttcgggggctgaggcaggagaatcgcctgaacccaggagttccagaccagcctggggaaaagagcgagaccctgtctccataaaaataaaatgaaattttaaaatgagccaggcgtggttgtgcacgcccgtagtcccaactattcacgaggctgaggtgggataatcgcttgaacccgggaggcggaggttgcagtgagccaagatcgtgccactgtacgccagcctggcgggtgagagtgagactctgtctcaaaaacaaacaacaacaacaaaacaaaaccaaataatcagcataagttctagacgctgtgacctagacgctgggaaggggcgaaacgtggtgataagaaaaccatttcaagctgtacgaggtggctcacgcctgtaatcgcagcactttgtaaggctgaggcaggaggatcccttgacgccatatgttcaagatcagcctggaaaacgcagcgagaccccatctctacgaaaaaaaaaatattttaatagaaataaaagtcatttaattccgattcttaacaccgtaaattgaacgtatagtcctgtgattttctacataaaatgtgaaggcaaaaaataactgtagagagtacggtgcggccttgtaatattttaatttctaggcaaagcttgtatcctccggatacaagaacagccgcccaggaggagcggaaactgacacacacccgtcaccccttgggctgtgactgccgagcccgggtactcggtctctgggtgaagaggaaggggcgggaccggcggtattacgcatgcgcccacttcctccggctgggagtggccgctctaggcagcggggaggtcgcggggttgaggggggttgtgaaaggagagcggcctctcctctatggtcacggggccggggcacgcttcccccactctgtcttgttacttccggtagcgaagcctctccctcttcctctgctcccgcggggtctgtgctgagaataatggcccggttggcccgggacgagtggaatggtaagccgcgacacggctggggggtgctgagggggcgactcgggcttgatatcggggagtgatgtggaagacggagcgggaatcccttctgcggagcctccccagccgggtcgtaggaggcgcgcggggcctctcctcacgcaggcccgagtcctgagcatccccactcctggccgcggggttcggaccccagcttggccaactgcgctatcccttcccgagagccccacgtccgcacagccggtcgctgggcctcgcctgcgtcctttcgggggtcagggtcagagccactccctcctggggctccctagggcgggaaggaggaggggtcgcttccaaacaccttggaggggaaccacggggcgcctgcccgccaggagcgcttgccacaccctgcaacagccggaccagaattgatgaggcttctgatagtcgccacgctgagtttacggtctaattgtcgaggcacgttcctggcctaaggcggagcgattgtgcccattctttaaagtagggtgaccgaagcgcagaagggagaaagtgaaatcccaaagtcacactggggccaggcaagaactcggctcttctgattctgcgacttgcggctcggaaataacttaggcaaaagagaattttcttttttttctttttagagacggagtcttgccctgccgcccaggctggagtgcggtggagcaatctcggctcactgcaacctccgcctcccaggttcaagcgattctcttgcctcagccttctgagtagctgggattacgggcccgcgtaaccacgcccggctgatttttgtatttttagtagagacggggtttcaccatgttggtcagactgttctcgaactcctggcctcaagtgacccactcgcctcggcctcccaaagtggggagattacaggcgtgagccaccgcgcccggccgagaattgtcttttattaaaaaagccggcgggagggggcgacagatgagagtcaggttgtgtctaaacggggacctttggaggggcaggaggcagcatcccagcttccgcggaaaacagagtgagagcctagacgctgttaagccctcaactgtcgccattgggtcctccccgccgaagcccattggtcggtcctttgcaaggggggtggtcttgatgtcatgctccaaatcgccaataggaaagagctttactctcttcccaggacacacccccgagccggcagggactgcacgtgctgatggggttgttttgtttgttcttgtcgctgctgttttctcaacatccagcctgggtgtatcctgacaggtgtgctctgcatttccctatatccataaacttgatggagacattgtatttctccagggcagttctttttgtttgctttttggttccagcgtttggcagtgccactaagtaggtagccatcactcaataaatgctgctattgataattctgttaataatgccgatcag

SEQ ID NO: 62994 - DNA, 542 bp, Homo sapiens
tagacactaatatttgcttaaaaaaaaaaaagcttttccctcagtccctcatccctatttcccagttcctattcaatggcagtattctcttaacccagtgaccagcagattttctgaaaaaggccagacagtaaatatttggggttctacaaggccgcagtctctgtcacaattgctcaactctgctgttattatgaagtgaaagcagccatagacaatacagatgtggctgtgttccaataaaactttatttataggtgacaccgaagttttaatttcaataccatttcccatgttacaaaatattattttgatttttctcaacctttgagaaatataaagaccattcttggcctataggctatacataagcagggtccggcccatgagctgtggcttgttgacctgtgtcttagccaatcacctagctgtgacctgggggatgatcatgtgaccctcacccctgctgtcctgtttatcaattcttcctttataaacaggagaggggcatgaaggtgatctgtgaactgtaaagcacaatg

SEQ ID NO: 62995 - DNA, 1600 bp, Homo sapiens
gtgatcagtacgttgcccaacagatattaggggctcgatatttgactctcaaatcaaggaactgattgattcccctttaacaggatctatggcaaataggacgtctgcccccgccgccacgccccgctctttttaaaacctgagaacccccttgccaacagtccctgcataagcgtggacaagagttcagagatctatttgagcacaaaagcagaaaaaacaaaaacaaaacccgtgcatcagggcgtggtcctatggcccagctgcggaaagcagggctctctctcccggctaaaaataactcggcgccctacgccccgggggtaggggagagagaggaggaaggactgggggtccccgccaagatcccccaggccaaacgctctccgaagcccaccctggaataacctcctgcttcacggggacgcaaggacgaagcaacgttcaccgcaggctgcgggtccccgaaggcgggcggccggatttgcctaaacggacccagccctatgggggctgcagccgccccgtcggggaatgggggtcccggcgtgtccccgagccgcagtgctgtgcgaccttgggcaagtcacctaacctctctgggcccccgtcccctcccttgtcagagagtggcctccggggcagcccgctgaagtctaaagaaggcaaaaactccccgacccctcaaggggaagacgcgagccgacggccggggctccggatgtgccaacagcgccaagtttcaagtctgtgtcgcgtgaggggggcgctagcccgccctgcagcttcccctcgggcccgccccgaagccccgcgccgcgccccactcacctccaaaggcgggtgggctcggacgaggtccccggctgactgcggcagccgcactcgccgcccctcgacgagcagcggcatcgcggaggcggccgcccaggcaggcccagggaggcggcggccccccgctttgcagccccgggccgcccgccgcccccgcccctcgggccgcgcgtcccgcctcgtcctgccccgccccaccgcgggcgctgccgggaagtggagtccaggcggaggcggtgccggccgaagagactggagaaatccaggacatggccgcaaggcctcacgggaaatgtagtccaaagccaggaagtggccctggaagcagcgcgcggcccgcctcctccgcaaggggcgctgggaagtgtagtcccaaaagcgtgggagtgaaggagcggggaaaggagagctgccagggagcagctgcaccagccaagagagcctccgggcgagttcctggggcgggttctggctccgactgctgcgctttaggtcattgctccacgcttcccaggtgtgtgaccttccacaagcttgagtttgggaccctgctgtgcagctccgtaggattgcattcaatgagtaataataaacctaatcaggcgggcacggtggctcacgcctgtaatcccagcactttggggggccgaggcaggaggatcgcttgaggccaggagttcgagaccagcctgggcaacatagtgagacccaccctcccccataccctcgtctctgccaaaaatttaaaaattaactgggcacggtg

SEQ ID NO: 62996 - DNA, 511 bp, Homo sapiens
cgagctgggtgtgtgtgggtcgctcaatcgctccggagcttctggagggggcagatgcaggtgccggctgctgcagtgcagtagctgctggaggctggggaggcccggacccggtgcaggaagacgccgaccacgcgggctcctgatcgcgggcgcccacagcgcggacatggcgggctggtggccggcgttgtcgcgcgcggcccggcgccacccgtggcccaccaacgtgctgctttacggctcgctcgtctcggccggggacgcgctgcaacagcggctgcagggccgcgaggccaactggcgccagacgcggcgcgtggccacgttggtggtgaccttccacgccaacttcaactacgtgtggctgcgcctgctggagcgcgcgctcccgggccgagcgccgcacgccctgctggccaagttgctgtgcgaccaggtggtcggtgcgcccatcgcggtctcggccttctatgtcggtgaggggccgggaggggacctggggggtggg

SEQ ID NO: 62997 - DNA, 1280 bp, Homo sapiens
agattgttcttaatactctcatattacaaatgaggaaactgagtctcaaaggggttctgtgactcacccaaagacaacacaatccaggcacttgatgctctcatggtgggaagtttgacagtttgcctgaaactgaaagatgctgagttactaacaagacttgaacctaagtccaggccaagctctctgatacagattcctggccagattgcagctttgctttggtcttcagtttttcttttctttctttctttttttttttttttgaaacggagtcttgctcttgttgcccaggctggagtgcaatgacacaatctcagctcactgcaacctcagcctcccaggttcaagcgattctcctgcctctcctgcccctcctgagtagctgggattacaggtgcccgccaccacgcctggctaatttttgtgtttttagtagagacggggtttcgccaagttggccaggctggtctcgaactcctgacctcaagtgacttgcccacctcggtctcccaaagtgctgggattacaggtgtgagccacctcacctggccggttttcagtttttctggttcagtttcccttacctcacatttcaatgaaaggggaagtggaaggggatagagtggaggtttgcgtaaggctttacatggaaattgcaggaatcaattgatctttgtgctggggctaccttggggaaccagagtcgtaacagattaacaactctggcttgggaatcagacacctgggttgaactctgtccgctattaacctctctaagctcttttcctcctttgtaactctacccaccttagcgaattgtaaggaggggcacatgaaatgaggcacgtaaactacatagcatttaattaatgctgggtaagtggaacacagtattaccaatattttgctgggtcatgtaagaatcgtctgtaattaactaataaagctcttatattccctccctcctaatcagggattggaaagaatttttaaagtactctcagttttacaaccttcctaaaataggagagctttgccttgctacctgaatttattgttacttttttccttttctttttctgagacagggtctcactctattccccaggctgaagtgcagtgatgtgatcacagctcattgcagcctcgacctcctgggctcaagcgatcctcccacctctgcctctggagtagctgggactacaggcacgcacccctatacctggctggtttttaaatagttttgtagagacaaggtcttgatatattgcccaggc

SEQ ID NO: 62998 - DNA, 507 bp, Homo sapiens
cactccagcctgggtgacagagcaagactccatctcaaaacaaacaaacaaacaaaaaagaaatgaggtgagttcagcttgggaaatgttgaatgtcagatgcctttggcctattcagagggagattgccgaagcacagaggagagttcatggcagggtttaattatttttagcgctcacatgtcccagattcggccagtgggagttcccccaagctggttcctgtgtcctgtgcatcacccatcttctttctcctttacttctttcttaagccacttcctttctggcatgacagcgtgttccaggatcatcttgtacttgcacctgccctgccctggccctagaatcagccaattctttgaggcatcctgcttccttttagtgggggaatgatttgagaacaaaatatactactacatgatactacattctgacaagaaaaaaaacacagccataagaaataaagccatggccaggcacagtggctcctgtaatcctaaccctttg

SEQ ID NO: 62999 - DNA, 1715 bp, Homo sapiens
gtctccctacccagcccccaagcctcccctccaagcctccactgcgcatgtgccgtgcatccctgccccttctgggtacccgtaggcgctcccgggcgctggcggcggcggaggagagggagcagcgtcacgggcgcccggcccgttaaaacgctgctggctggagccacctccctccctgcagcccgcaacgggaatggagtaaagggagacccgtcgacctggccacggggatcagcgatggaattaaagcaatctttgtccacccatctggaagccgagaagcctctgaggcgctatggggcggtggaggagacggcttggaaaacggagagactggggagaagtgagtactggggcggggggcggggggccggggacagctggggatccatgcgcctgcgcgggtggtcgcgggagcgcgaggaacgccagcagtggacccagggaagcgcccccgcagcggggctggcagctcagggggatacgcagctctgcgcagcgacgcgctctccccgcgaacaaaagggggggaccctccgggctgagcctcactgggagggttgggagatggccaggcagctaaggcaggagcctgggctcgacttaggagtcccggatccgtcagctcgcagctggtcctgtgaagtcgggtctctcccacagcccagggaggaggatcctctctccgcctgggatgcgccagggcgctggagacgcgggaccgtcctggaaagcgcccacgtccctggagaggggggagtgtctgctggttttccgcttgctttcctaccccctgcgtgaggtttcggagcgcacctgaaattcccagcttttcctccctcgccttccttgggtcggggtgggaggcttggggcggcaaaagggtcaaaaggcacacaccgttctcttttctctcttgactcagttaaagtctgcttgggcacaactctagaaggcagtttcgaaatagaccggctgtatttatttactggttctctctgcggtgtttggatgtcaacatttctaagtaaacgaaggattttgtttttcattaataggatacaatagttgaaactcctgccctcaaagtgtagaggcagcgtcaggggctccagggtcactggaggtccctgcaaacccgggggctccccaaagccgctgctctcacatggcttgcccaccaggctgggaaggagaggtccttctcagggacccggcagcttcctgcctcggctctgggtcactgctccgcgctctgccccagcacggatctctgagcgatgtagggctaaagtattgtgaatgtgatcttattctgtcctcacctggtggaaaattgtgtgtgcgcgctttctttctctatacctgtaattatggatttagaaaatcttcctagaagggctcaactgtgttctgattctgacgggttgaagttgaaatcacaatccaatgtcttagtggttcatgggctaggatggatgtcatagcactgccaacctctttccttttctttttttttctccctttttaaccttggtctttctttctagttcatcctttcaagacccaatgacttggtgctttggcataatatcagggcgtcagggctgagggtctctgtttctttctttaatttttaagtgcacatagtgggtgtccatatttatggaatacatgagatattttgatacaggcatacaatgtgtaataat

SEQ ID NO: 63000 - DNA, 717 bp, Homo sapiens
acacgagaatcgcttgcaccctggaggtagaggttgcagagattgcaccactgcactctagcctgaacaacagagcgagactctgtctccaaaaacaaaaaaaaaagtgtgaaattaggaaagaaattggctgtgactggggagctgcaggccaacagcaaagaggggtgtttgcattgggcctgaaggctaaacagggtttcaaaagaggaagagtgtagagaaggggatttcaggtaagctgtctgccccaggcacagaggtgaatattccaaaggccagggtccaggcaccagctttgtttttttttttttttttttttttttttggctgtttctttccccttggcttaatggatcctgggactgcctggttcacttatatgaatgggcttgggggttggttggaagccagcacaggtaaaggccctcttttagtacttcactcacaagttcccccaaaagatagaatcaattcatttcttcactattcacttgttgtgggcgtctcctgtgcacttgttttagaggaacagagctagatgggtcctgaccccacccttaagaattccgtcctactgtggtccatttcttcctctgctgcttcctagcactgtgatcttggacaattggcctaacttccctaagcctcagtttcctcatctgtaaaatgggtatagtgatttctttaatcccctgagaaataaacagaataatg

SEQ ID NO: 63001 - DNA, 456 bp, Homo sapiens
ttttagtagagacagggtttctccatgttggtcaggctggtctcaaactcccaacctcaggtgatccaccagcctcagcctcccaaagtgctgggattacaggcatgagccaccgcgcctggccatgttaactatatattaagatacgaaacagctttctttcaaggggtgcagctttaaaacagtctacagtagcaaggcatttaacctgtactcggaagccaggaaaccttggcctgacttgccactgtgttctttgaaaggtccgtcgttaatgtttgactattcttaatgacaatttgtggcttatcaggttgacgttttcctttcttttcaggcagctgagacttaagggagtgaagtaatttggtggtattcattgcaggggccacatagatactgtcagtacgcttttaaaaatctttttaaagtaatagatgctcattataaaaattc

SEQ ID NO: 63002 - DNA, 1073 bp, Homo sapiens
aaatttttgtatttttttttttagtagagacggggtttcactacgttgactagcctggtcttgaactcctgacctcaagtgatctgcccacctcagcctcccaaagtgctgggattacaggcatgagccaccgcgcctggcctgctgtgtaattctaaataatcatcaggaccatgaacctgaccatctgtgaaagacagagatgtttcctggcaggatagggtccactgccattgatattggcaaggtgcctgctgctccttagcctgctgtaggtaccagattgaccttgagtagaaccagccttgagagaagaggaaaggagagccaggccctaatcatagggatccccaggggtgtagatgatgttaaggcaacatcttctctgtgtctaagagaaaaagaatctgccctgagtatgaactgacttgtgtgctttgaggtcagtgtcctaaacaggaagccatgaggtgagcagagacacttccctgctgcctggggctgggagttgggaagtgagaaaacatcctagtggccaccagaaccatccagtgggtggctctgaatcctgcattgatttgttgggagactttggaggaggagcctggtgtggagggttgagcctggtgagttggaggcagcagctggttactttccatgcagagcagcttggagttgagtcactcgacaatccaagggcacctgtggaagcagccatgactcatgctaccttcagtttcacatctggaggaggaaatcactgacaaagcaaagcaaggcgacttctgggggctgccgtgtaggattctcccatgtttaaaaaagaaaaaaagattgtacaggatttaaacatagcatttattgcctgtgttcttagttataaaattaatacatgtacataataattgttgtagttagttattttattcagcatttatcctatgtcaggtactgatgcttcaagctttacatgcgttgtctcacttagtgtttctgaccattcagtgggggagatctgttattatacccattttacagatatggaaactgagtctatacacacacacacgcgc

SEQ ID NO: 63003 - DNA, 2305 bp, Homo sapiens
gtggtggtgggtgtctgtggtcccaggtaccccggaggctgaggcaggagaatggcgtgaaccgagatcgcgccactgcactccagcctgggcaacagagcgagactccgtctcaaaaaaaaaaaaaacaaagatatatagtatttgtgtgactttcttggttttgtgcaacagaaaactcaacccaaactgcatatgcaaaaaaaaaaaaaaaaaaaaaggaatgtactaaccggggtttctacactctaggggtggttgaggcaggagtccaaagtctatctgtttatccctcagcttttatcccctccatgagggctttgttcttaggattcagggtttcttttcccccaggggggttcacagcaaagttctgggtctgactacttctggtgtgtatctgatcctatatctatctgaatctgaacgggaagggaacacagtgagcaccttaggccacacctgggtagggtaagccccattaaatttgcaagtcctgggagcggtggtgccagttggttccccaaaggaaacaggtcctattacctaagaaaggtgaatggatactgggaggcaaatcaacaaatgtccattgcacatgaggacatcacactgtgacatttagaatctaaatgctctgaacaaaatgtataggggaccttccaggaacgggaaattgctgttcctaccccctctttttggagaaattgctgttcctcccattggcaaaattcccctcgcaggttccagcttctttctcttagaacagaccttctggtttggcaagcccagtcccacatcgaggtttagttctggacttctgtgcagggtcatggcactcgcttgattgaaattttgtttggggaagcaatgacctgaagagcttacagcctgggtcaaccactcaccactctcaggaaaagcagacagagccaaactttctagctgggctcaaaatagctattttctgacgtgggtcctccatgactcatggtggagttttccaggctcgaggggactgttgacatttactctgctcctcccacgccacagagtctaactttttctatcttcccccaaacataactcattacctccagtttatcccatgtacacttctttttcaccccagttttcttttattttcagcgatccattccagatccaatatctttttttttgagatggagtcttgctctgtcgcccaggctgcagtgcagtggctcgatctcggctggctgcaagctacgcctcccgggttcacgccattctcctgcctcagccttccgagtagctgggactacaggcgcccgccctcatccggctaattttttgtattttttgtagagacggagtttcaccgtatgagccaggatcctctcgatctcctgaccacatgatctgcccacctcggcctccccaagtgctgggattacaggtgtaagccacctgcacccagccctccagatccaatatctttttcctccatcctttgccaaaccaggacttcagcttctggttactggtgcccacttcaagagatgccaggcagggaactctcaggacacataccaggcctgcactggcatatgtattttttggagacaggatctctgtcactcaaaatagagtgcagtggcgtgatcatggcccactgcagcctttaactcctaggctcaagtgatcctcctgcctcaaccttctgagtagctgggaccactggcatatgccaccacacctagctaatttttcaaaattttgtagagatggggtcttgctatgttgcccaggctgatcttcaactcttggtctcaagcaaccctcctgcctcaacctcccatagttttgggattacaggcatgagccactgcacccagcctcggactgctactttagaccccactttcttgtccaggtgtgatcctgggtgcgtgtgcccagagacgccctggctacctgggattcatccatcaaacacctggtcattcagccaattctgtgcgaacagcaccttcccggctgtcccaccctctgcaaagatctgtgatgctggaaagttgtgtgtggctaagtcggaagaagtgaagttcatctgcataagtgcagtagtgtatttattgatttttattcttattttttatttttatttatttatttgagacagggtcttgctctgtcacccaggctgtggtgcagtggcatgatctcagctcactgtaacctccaccgccttctgggcttgagcaatcctcccacctcagcctcccgagtagctgggaccagaggcacacccaccatgcccggc

SEQ ID NO: 63004 - DNA, 2093 bp, Homo sapiens
aagaccagcctgaccaacatggagaaaccccgtctccactaaaaatacaaaattagccaggcgtggtggtgcatgcctgtactgccccctactcgggaggctgaggcaggagaatcgcttgaacccaggaggcggaggttgcagtgagctgagatcatgctactgcacctgagaaactgtcacagtgtagaagagtctaagaagacacaaggactgaatgtcatgcactgtcctcgatgggatcctggaatggaaaaagaacattggcggaaaaacaaggaaatctgaacagagtatgcattttaatctttttttaaatcccctaaggatttccagtactgatgctttgcctttgtgcttgagatccctgtttagagccacatctcccttctggtgtggattttcagtccgacatgaatgcttccagatttgcttccttccttcttctgccatgatctgactctccctctgacttcacattgaactggacccgttcacgcctgcacacatcctgtttttcccctggctgctcttccctgcgtcccccctccgcagaccaccctcattcagatgaggatatatcccaccctatttcttgggcttacctttctgaatgaaaataatgttcctggtgcaatttatctctcctgtcaaatttccagcctgcagggaattaaatgaggcacatgattttcaggctaagcagtttttaaaaactgaaatattactttagacaggcccaatttattttcctctggattctcatcattttaaccccgccaagcacatggttttaagcagctccatctgctcctctaaccatccttgcgtgacctgggcccttgactgacttctgaattggtttgtaaattggaagaattagggagtcggttaagatgcatgaatcatagctcaggatagatttataattgtctgttttcatgaactcattctgagattgcagggatgggggatatttcagaacaaatggaccttgagtaacagaatgaacctacagaagtgccgaaaaagatttgttgtttatgcaattttaaccgggcaattgttgttattataggtttatcaatttccacaattttaattccacagccctaatgatttgctttgaattaggaagtatatactttattctctcatatggtcccaaagggccttagaaagcaatcggagcccttctgcttgtcattggaagaaatatgacagcatggtttggtgattcattgaaggtcactttgaagtgttggggagaggacactgagtaatgtaaaatgacattacaatttgttaaataatttgccggaactcttgtgtcatctctttcaaagtctcaccctggaaataacacacacgtaattcaaatgcaatctttctggaagtcccacctgggaactgcagtcccaatctgtggcaaagtcttgtgaatatccttaatgtgataaaactttgccttagacggagtttgctttttggaataaccaaagtcattctgggccaaggtgtttgaataaagtggttgatcaaatgaaatttaatgtaaagttattttaactgcttttcttgagtaacgcataaactgatttgaaagcaacaaagaatttgtttattactacctctccttattccagaaaggacttaatgatcttattggagccttaaaaaagttttaaaaggctcaagaaatgttggtaaatttccttttttttatcttttttttttttttttttttttttgagaaggagtcttgctctgttgcccaggctggagtgcagtggctcgatctcagctcactgcaatctctgcctcccgggtttaagtgattcttgtgcctcagcctccagagtagctgggattacaggcatgcgccaccacccctggctaatttttgtatttttagtaaaggtggggtttcaccacgttggccaagctggtctcgaactcctgacctcaagtgatccgcctacctcggccttccaaagtgctgggattacaggtgtgagccatcacgcccggcctaatttacttttattattattattattattgttgttgtttgagacggagtttcgctctgt

SEQ ID NO: 63005 - DNA, 2596 bp, Homo sapiens
tttagttctaggaagttggccctaggttccctgcctccagaccatattctcctgcctcacctgatccatctcagcattagtaatttttttttttttttttttgagacagagtcttgctctgtcacccaggctggagtgcagtggcgagatctgggttcactgcagtctccgcctccggggttcaagtgaagtgattctcctgcctcagcctcctgagtagctgggactacaggcgcccgccaccatgcccggcaaattttgtttttgtatttttagtagagactgggtttcactgtgttagccaggatggtctcaacctcctgatctcgtgatctgcccgcctcggcctaccaaagtgctggaattacaggtgtgagccaccgcgcctagccgagcattggcaatttttaaagctttgcacctgattgtgataagcagggacggttaggaaccgccaggcctgttcccctctctcatttcacaattctccaaggattagtctggctgaaaggtacagaaacccatccaagcttatgtaagcacaaaacaaacaattactggaaggacagtggagtctcctgaagccctagggcattacattcatttcccagagctgcctaacaaattggtgcaaactggatggcttaagcaacagaaatgtattctctctcggttctggatgtattctctttcggttctggaggccagacatccaaaatcgaggtgtcaacagggccttgttccctgctaaggctctagaggagactcctttgcctcttagcttctggtagtgttagtgaagtagtgttgttgactggggtaaatacccaaggttcgttgtctctctccaagcagattaaggacacagacactgacatacagaggagtgagtttaggagtggaggtttaataggcaaaagaaagagaaaagggaacagctctctcggtctctctcgagaagtccctgaatgggaattccggcctgtggcagactgcaccaaattttatagacaagcttgaggaggtggtgtctgatttacatagggcccacagattggttggagcaggtgtgacgtttgcatagtgcatgggaaggctggccaccccaccctaatcttatcatgcaaatgaactttccacttgggcggcgccatgttgtcttctccttactgtacacatggctggcaaagagaagggagcgtggagccgccattttgaacatacctagaccaggtggccttttcctatgggcacagctgccagcattcacccgtgtaagcttccagctcccttgactatgtctacagctcgattttactggctgctccttgttagaaaagaaaatgatttgggggttgcttttcattaaaaggaaaaccttaccgaggacttccttaccctatctgcctaaataatttcttcttcactcctgtatcattagcagtagcaaatccatacgagtctgaagcaacttgatacttgcctcctcagaggaaataattccaccagcgggcataaggcagagtgagagaccgaggcaagttttagagaaggagcaaaagtttattaacaagttttagagcaggaatgaaaggcagtaaaggacacttggaagacggccaagtgggtgatttgagagatccaagtgcaccgcttgacctttgatttggggttttatatgttggcatgttccggggttttatatgttggcatattccagggttttatgtctctcctcccttcattttccctcagggcaggttgtgcgcatgcgcagtggcctgccagcgcttgggagaggctgcaaacacagtgtatttacagaagtcatgggcctgattatttgagatgtttttccctcaccagttgagtgttcctagaggaaggtcatataccagttagactccgccattttgcctcttaatgtgcatgcttgagcccagttgcccaactcctgagatctcatcgggaaaccgctgataacttcaggtgttttctgtctgttgggagatggcctttccctggcaccagctgtgaccaattattattttagagagacaattttaacaactgcctgacatcacctgatggttgcctggcattccttgggggggaaatcccctctcctttcttgctcatggctgcctggctacctactctaacagtaacacacacaattcttggcattgcttgccttctggttgcaccacttcaatctctgcctccatcttcacgtgaccctgtgtgtgtctgtgtgtcttctcttctcctctttttttttttttttttctaaaagacagggtctggctgtgttgcccaggctggtctagaactcccaggcttaagtgatcctcctgcttcagcctcccaagtagctgggattacaggttcaggccaccatgcttgggtctctttcctcttctcataaggacacaagtcattgggtttagggtccatgctaataagtatgacctcattttagcttaactattataattacatgtgcaaagcaacttacaaattactttggaaatagagtatttccaaatagaagagatataaactggggaaaactatttccaaatagggcacacat

SEQ ID NO: 63006 - DNA, 1147 bp, Homo sapiens
ggcggaggttgcaaagagccgagatcgcaccattgcactccagcctgggcaacagagtgagactccatctcggaaaaaaaaaagggggggcttggggggtccgggcgtggtggctcaagcctgtaatcccagcactttgggaggccgaggcgggcggatcacgagttcaggagatcgagaccatcctggctaacacggtgaaaccccatctctactacaaatacaaaaaattagccgggcgtggtggtggacgcctgtagtcccagctactcaggaggctgaggcaggaaaatggcgtgaacccgggaggcggagcttgcagtgagcagagcttgcggtgagcagagattgtgccactgcactccagcctgggcgacagagcgagactccatctcaaaaaaaaaggggagaggggagtgggggggtcagcgaggtctgacctcaggccagttatacagcagtcactcacagatccaacgaaccagaggagatcaaaccctcatcaaaatcctgcctctggtacttccgctaagctctgggtacacctactgtatgttcctgtaattcctactgatttttttaaaaaaagaaaacattaaaaaatccaatttatttaagctgtcacagacgcttccagattaccagggccaccttccaagctgggaaaccttgcagactgtggggtcctgcacacctagacttgctccttttagaagccatggaggaggttgataatgggaataacatttattgtagcttatctctatgccttgagcaatgtgctcacactggctggttccctcctcacatcagcctgatgagtcagatcctgttattacttctcactttacagatgaggaagtagcagtaaatccattacccttttcaagcggaggttgcaagaggttgcaagcggaggcagaataaacacttgaaacagtgagtcagatcctgttatcacttctcactttacagatgaggaagtggcagtaaatccactgcccacggtcccaggggttgttagtgacagagtcatcattcatctccctccctccccaccactgtagccccaattgttctttctcttcccatcggagggatttaaacaggtctctcccatttaaaagcaaacagggctggacacggt

SEQ ID NO: 63007 - DNA, 1893 bp, Homo sapiens
gggctgggtgcagtggctcatgcctgtaatcccagcactctgggaggctgaggtgggcggattacctgaggccaggagttcgagatcagcctggccaacacggtgaagccctgtctctactaaaaatacaaaaactagctgggcgtagtggcgggcgcctgtaatcccagctacccaggaggctgaggaagaagaatctcttgaacctgggaggcggaggttgcagtgagccaagatcgcaccactgcactctagcctgggccacagagcaagactccaactccaaaaaaaccccacagtgggaaggaaagggagagtgaacccgttctggctgtttacggaattaaatgacacagaaatgtgtgcagctagtaatgggcctgtaactgagggtgccgtccttcatgcttccctttccattccttcctcctggcagtgacttcttctggtcctgtgggggaggaggccgaaaactggcagctgctctgcctaggacaggaagggtcaagtgcagtccaggacagcaaacagcacgagctgccctctctactacagctctgccagtgacaaaggccactctgcaccctcgcttgctcctaagcctactcctaagtgggtgagaatgtggagggagaggacactgtgtgattacgggctcccaagaacgtcacaggcaaaactcacactggaaggagtcaagctcaggccagcagtgctgaggcagctgcacctcatgaccgaaccctggggtgaagagtgacctcatcagttcacaaaggcattgctttggcaaggccattcagaaacacacaagaggaagaccaaaactctcaacttccaaaccaaggcttctattacctaataagcactaatgacacaaaacgagtcataatgctgtgacagttaagtagttcaaggtgtaaataaagaaacgctacagcacacgcaaacgtcctaatgagaattaggtcactgtgagttttatcccatgagggaaaaaaaaaaaaaaaaaaaaaaacatttaccttcacgacatggcagagtttctgagttaaagccgaaatggaactgacatcatagtcttggagacgaaatgtataaccaaaagttttagcatattctgtaaggagatctgtcatcataaggcagttatctttttgggaccgaaggagtttaacaaactgggcagctagagctttgaaccgctccacctctgtcagagtaaggatcttttcttctccacattccaatacctttgaaaacacacggggggaggaaagggaaaataaacaaatcacgggtgtttacagaatagcaaaaaaagtatgcagctagtaatgaaaaaacaagtcagcgttactgaatgggtataaagtttcagttgtgtaagatgaaaaagttcagaagatcggttgcataacaatgtgaatgtgctgaccactactggacaggagatataaagatagttacgaaggtaagttctatgttatgtgtattgtgccacaataaaacaatttttaaaaagcacttcagtagtaaaaaaagaaaataaaatcaacaacagaaatttggtttaacttagcaacagcgaacagcttagcactgatgttacctcatgtactcagacctaccttcaacacgaaggattttaaaagtataaaagtaatgaacaaatattcagtgtaagaaatcagcaggtgtggtggctcacgcctgtaatcccagcactctgggaggctgagacaggcggatcaactgaggtcaggagctcaagaccagcctggccaacgtggtgaaacaccatctctactaaaaatagaaaaattagctgggcatggtggcgggcacctgtaatccccagctactcgggaggttgaggcaagtgaactgctt

SEQ ID NO: 63008 - DNA, 722 bp, Homo sapiens
agactaaagaacataaaaagaaatgtatcttaaattatcactctagtggatgggaaaaaacatccagcaaaactaaatggtttgaattatcaaaacattgttttggtttttttaaccataaggaataagaatctccaaagtgggcaagttcttacctaaaacactacatttacttttttttttttttttgaaacagagtctcgctctgtcgaccaggctggagtgcagtggcgcgatctcagctcactgcaaccttcacctcccaggaaaaaacaccgtatttacataaggccttcaaagttagaaaagtgaccgtcaaacagaagcagaagggaagaaatgtaactacagccaagtgactaaaaacaaataatgacaaaggtgagttaggaaagagcctcaaaagattaaggtaaggcctgtatatgcttactccctgggtaagcctctggtatccacaactctcaactgtccatagcatgagtttcaacttaagccagaccgcagggggcttgttgggtatcggggacacaggtgactagcaggcaagtgccggaatcaggatacccggggcccactctcttaactgctgcaatcaccaatgacacgtttactttttctaagagctgatttctttctcccttaaatgaagactttgcatgagatcatgtctaacgtacttctgtaactctcagttattaaattatatgtgaagactttca

SEQ ID NO: 63009 - DNA, 2764 bp, Homo sapiens
ctgtttgacttgagcgacagtctcctttctgtcactctcttcaagtcttttgaccaattcaatgaggagagcataggctctgtcgactgtctgcattttggtctccaatttgactgcggtgcagctttggacaactcacaacctctctgaacctcagatcccatctctaaaatgggtgtgataataatagaaaccaccttacaaggccgttgtttggattacatgaggtaatccacggggaacatttagcaaatgttgtttccttagcacccaatctagtctttgaccccacaccaccccatcccattaccgttttctcccccatagctcttctgtccaaaacggcctttttagcttattttattatctttctcccccattaggctataaactccatgacagcagagactatgttttcttatccactattccaactcctgtccttagtacaatgcctggcatattttaataaataactgttgaacgaataaagcttaataaataggaaaacagtttaggtttcaatacaccgatatgcaaaagagaagaatatttaccgctcagagaagtccaaaagacacaaatgcaattggacagctcttggtaataccggaaaggtgcttgagaaactctaaaaggtgtatcacgaggtcgcgttacaactactagtgagagtggctgaagccctagacattgtcaaccctgagactacaccctatgtgttgctaaaaggccgaggagaatgcaaaacggccggggaggggggagtgtgttgcaaaaacacccgcccctttccttctctcttaaccttccagctgtgcacttcactcctggagggccccaccaggggtcagacaggggcgggcggggagccaaatgccctcgaaggggaacagcggcgccaacagtgacagtagtgaatggacccgaaagggagacaagccaactctttcgtggggggcccaactggcgcgtcccagttagctaacctcccctctccaccaccatcccaccagcaataggcggggaaagaggggacactgtcctccgtcccgccccgctggcctcggagcagagcctgccggggtctggtcgcaggactgtctgcaaactcacctctgccgccggctccacctccgctcacattccggccccgccgccttccccccgccccccccaggccctttgttttgattcccgactccgcagctcccgccgccgccgccaagcgcacccttcacttccgcttccgcaccgcaccgcccctgtcgcaaaaccgacgcccttctctcctcttcgccccgccccttcctcgccccgcctccgccgccgcgtcctgtccgcgcggggcatgctgggaaccccggggggggcggggcctcgcggccctgcagcctcgtcaggctcagtcccctcccgataaacccctaaatagggactttcccggggggtgaccctggcttttttggcgaaaacccccagtttaaggaggccttccccctggcttcacgttgtggagtcgaaaggaaccttgaagcggagaatgagctcgtgacgtggacccgaggaaaaaacctgccaaccaggatttaatagaattcagctctttcaggctttggagggaaggcgatttgaacgggatttcaatgaaaaaccctgtcccttcggctttttttttttcctctctcgggtctcgtcacgtgatggtcctactttatttttaaaaattaaatggcgcatattccccagcatcctaaatctagtgcaacctagtggcaagtggagaaaaaaataactgccaacctggcttcctacgaggtcccccggagttctcgcaaagttgcgacccagttggcaaaaatacagtgtgtgcaaagactcaactggacattgccaccaagaatcaagagatttttggggactttagcaagaaaacgttatttttaaaagccctgctccaaagctggttacaaatgaatactgcgtttccagtgacaggttgggcgagcagaaaggaaatcttacggttagtttcaaacactttgtgttttaggtggccagatatgctgtgtggtttgctttaaaaaaaaaaatagcgccccacaatcttcacgtttccctggaataaaaaaaaatttaagactcagcaaaagggtgatttctgaaactaccagctgattactattttctgttgcaaattaggaaaaaagcaaagcacatattgtgtaagttaaatctagacacgatttaggatgtgctagctgctagctaaatgctaccttaggagtttatttttaaagtttgcccagaaacaagttgactttgcaaaagaatcagtaagtcgaaattgccaaacgagaatattttgcccaaaaaaatccttactgggaggttatttcaataggcaatccccattacgtggggattaacacatccctgtaaacatccctgtagacgggtattgtggagggcaggatcagacatgtagctgaagaatcctttgtgcctgtatttaattttccagaaggcagatgacaagcacacatcctctccctgcgtaggtatttattactgctgactaaatcttgactgtgggctgggcgcagtggctcaggcctgtattcccaatactttgagaggctacggagggaggatctcttgagcctacaaatttgagactagactgggaaacggtgaaaccctatcactatttagaaaagaaagaaaaagaaaaaaatcttcattatgtctgtgtataggtagt

SEQ ID NO: 63010 - DNA, 1007 bp, Homo sapiens
gccggcgtattttcctgaaatgcgcggcccgcaagcccaaacccgtttcccgggtgtccaggcagcgttctgcagcatctccaatgcccgccagcccgccgcagcccagcgcccggcagccggcgcctctcaaaccccctccggccaggagccttcgccgcttggccgcgccgcgcccggcctgggaaaaaagtttccaaacgacgctgctctgcgctgattggccgaggcggacgcggtaccgtagagcagcagccaatgggaggcgccgaccgcaggctccggggcgggggcggggtccggagggccggggccgcaccgcccttcgcagccgcctctgccgccgccgccgcgttggcctcgccgcccctgctcgggtaagtgaggcgctgcgcggggctggggtcggggtggctgtccggggacctccaccgcggctgaaaagctcctctgccccgccccaggatcccgggaccccgggccaccgcctggcagggacccctacgcccctcgcttgcgcgtcgcttcccggccgcctggactcccccggtccctgggctccaaaatcccgcctccctggagcctcccgtcctaaaaagttaggcactgagtgccttgccaccggtgcgttcctcgcgctggcccctcgcccttggcaactttgtttctctttctgcgttggtctctctcccaccccgttgccctcttctccttccgggacttcctgggtggttaagccttgccggtccccaaaccccgctgccaggctccatcctctttctcctcttccttcctccccatactcctctcctagatgaccctcgtttcttttctctctctctcctattcctccatcctgccacccgcttctctgcgaccccagacccctcgattgcagcgttgcccctgccctcacacccactgtcccgcccctgcaggcctctttccaaaaacccaccctgctccctccctccgggaacacgtttggggcagtctgctctccgctt

SEQ ID NO: 63011 - DNA, 792 bp, Homo sapiens
accaaacagagcatctattgatgcccccatcagctgacagcttattcgaattagccccaaatggcagcacaacatttcagcaacaggttttcatgtccacaggttccgaggagatctctcaatcgccagtgcagtcggtggagcccactcgctgcgtcctcctggagcctgcgtttgaatttaggttaatgacttaagatcctgttttatttggagatgttcccaaataaagggtgtgaggcgatgagagccacgcctgggaacagggcctggtctgcctctacttgctgggtgcagatacttctctgcttacagccaggaaatggggagggtgctgcgggcggcagcagggatgtggtccgccctcctcatccttccaacgctgtaaatcatctgtttgttctttctttggagtcttcttgcacaatggctctcgccacgcctctctggcctaggcaccattacatcaccctgggtgcatccggactttctagcaacggctttgtttacttgattgagtaaagagaagttggccttttttaacttttaaattagaccttgcgcctttcttgtgggaagtgttttctcttatgtttgtagaatctaggatgggtgttttgtgttttcggttttgatttttttttgagatggggtctctgtcacccaagctggagtgcaggggcacaatcttggctcactgcaacctccgcctcccgggctcaagcgattcccctgcctcccgggtagctgggaccataggcacttgccaccacacccagctattttttgtat

SEQ ID NO: 63012 - DNA, 1629 bp, Homo sapiens
cagtacctcgtttcccagtctatgaaatgggcatagggttgttacaatcaggtaacacacaggctgagttgagtagtgcctgacacatgaggctcaatgataactattattactattacttgtctggacatttgcttcaaagtaaacagcgtacaaatgtcattaatgactcaaacataactagcttagagtatcttttcctgaaaagacaggagaatggccaggccagcaaactttttgcctctagtttcttctgatgaaaaaggggccaggcgctcacacctgtaatcccagcactttgagggggccaaggcaggaggatagcttgagaccaggagttcgacagtaagaccccgtgtctacaaaaaatacaaaaattagccgggcgtagtgaagagcccctgtattcccacctgctctggaagctgaggtgggaggatagctggagtcccggagttcgaagctgcagtgagctgtgatcgcgctactgcactccagcctgggcgacagagagaccctctctttaaaaaaaaaaaaaaaaagcaaggaggggagggctacttaacaggttgttgtaaggacccaacgagacaaccaagcaaattgtttagggcagtgcctaacccaataggggttgtgggaattgtagtcatcagccctgagtgccaagcctggtccaagtcctccagcccccggcagggtccaagaagatgagccaggggcccaagatgcaggcctgtaggcctcttagatgcctgaagattacgcaactcctcctttagctccaaactggcttaaaactcgccagtgggcaacctcttccccataagagctccccgcgcacgggccaagacagcagccagacgctccccgcaggccctcacaccgaagaatgacgcctgtaaaagccaacccatgtgttccgcgcgctctcctcccatcccatcctttccacaagatgaaggcccgacgcttcccatgtggaggcctccctgctcgcactcaccagccttcaactctgccacagtcgccatttttcaacggccgccagggccgcaccgcggccctgcgcacgcgcagctccgccccactcaccctgcggcgtggtctgtagccaataggcgcacagctctcgccccgcccacttccgcccctctcagtttatgagctctgcggttgagtgggtagtgaatgtcgaccagagactccaccaatcagcgagcgctctcggaaggcccagttgagtgagacggcagggagggcggggactgaggcagtggagagccctgtggggtgctgctggcaccttagtgcttaactttagccagctgagtttttcattgtctctgcagcctcaagtaccaactgctagtagttaccacctattaaccctgcggttctcaaacttgagcatgaatcctcatcacctccaagacttgtttaaacggattgtttgctagtcctccccatagagtttctgattctgtaaatctggggtgaggccctaggatttgcatttctatcgagttcccaggtggtactggtactgctggtcggtctggagatcacacctcgagaaccactgtattaagcacttactgtgacgccttagcgcattatttccttatg

SEQ ID NO: 63013 - DNA, 714 bp, Homo sapiens
gtaggctgaggcctttgctgggaccgtggagaagcccaacttcctcctccctttcccccacttcctaggctttgatccagccctggagccttgatcgaattgatctctctttcaagtcttccagggaggctgtgactcaatcctagaaaccaggggcaggtccaggctgcctgtggtctacttgctccacttcctcaggtgctcaagggtgactcatcactcagtaagttcagagcagagggcgttctcctcaatgtgtgccaggagcacagcaggaatgtaggcaccctcagagctccccagaattccctaaccctggaccacactgtggcattgcagcctatgtggggctgaggctctgtttcacattgggtgcccaatggactgctttacaggacagatgccttgttatcctgctctgctccggtagaacaaatatttgtagaaggaccgaatgaagtcctgcaaggtagctcatctcacagacgaaactgatgtttagagaacattaaataactggcccagagcaaccagacttaaagtggtggagctgggattcaaacccagatttgggggagtccaaaggccagccctcctcccttctgtatggggactgagaacacggaatccatgaccatttgagatcccaagttccagactgtggcatgtacatagttctcatgattaaaattgtcacgtgagaagtttcattaa

SEQ ID NO: 63014 - DNA, 869 bp, Homo sapiens
cttcaagtgctgggaaatataggcatgagccactgcacccagctggttgtgagttattgagatggttgaattgggagtggatgctcaggcctcagtggaacttgtggtacacagtatgtcctcattacctcccatcagtggcagttgagattcataatcactttttctgcctgttgtctgccccatcctctctgtggccttccctcctgtcctggagttggctggctgggtccctggcagggctgcatgcgttatccctgcaggcctgcttgccttatccctgcaggccctggtggagcatctgtgcagaacctgtgccatccagatgggagcagtaagggtgtagggcaaagttagtgagctgcccggtgcacgaggacttccatgataatcagggctgaaccaggaaggcaggtcaaggccagggtcatgtacagaaaggaggtcagcaccaggatcttgtatgggaagacttagatcaatgcctagtgccttagtcatcatcattcagcccagaaaacatgacgctatgcaacaggaattttatgaacacacaaaggtcaggggccactcggacttggacggggtccccaactctttgagtgtcagggctgagggcatggagacacaacttgatcaagctggtgaagtgtccagcaaggagaagcctctgttggagggagccgggagctggggaggacatgcgctttctcttttttttttttttttgagacggagtctcgctctatcgcccaggctggagtgcagtggtgcaatctcggctcactgcaacctctgcctcctgggttcaagcgattctcctgtctcagcctctcacgtagccgggactcaggcctgtgccaccacgc

SEQ ID NO: 63015 - DNA, 610 bp, Homo sapiens
gagagatgctgggtccctctggcttgtgtagaagtcatgcgttgccatgggaaccaggggctgggtaccacatgcacctagcttctcccttggtgactttcctaccccaccaaatcctcactaaatcagccccagccttttttctagcacctcctttccccagggcctgatttgtctgtgttgctccaaggggctcccatgggacctccaagggcaggagctgtgggccgatgccaggctggccccatcagcaggaaacagcaagacaggcggctccaaattttgccaggctgggatggagccgagccgggaacggtgtttgcagagtgactgttcccctgggggaccctaggcttgtcctcgcgttacctttgtcccatcagttgctgctctggctggggaagttgtttacattggctgctgtgtgctgctgctaggaattttgaggagtgtgcacttttttttttttttttttgctgttgttgaggcggagtctcgctctgtcaccaggctggagtgcagtggcacgatctaggctcactgtaacttctacctcctatgttcaagcgattctcctgcctcagcctccccagtagctgggaccacaggc

SEQ ID NO: 63016 - DNA, 523 bp, Homo sapiens
tctttagaactgggatttatacaaaacaagtcacacctcaactgggtggctgcagaccttggattgctcagggtaaacagagtctggttggggctgcctggctggcgtggggatcacccaacccatcaagcttcctctgggagcctgggaagagctctcttgccatggatggttctggaagctttttgaaggagggactttcttaatttctgatctcccttgggaatctggataaattccctttcacttctcccctgggcgtgtgtgtaccagggtgactcacagatctgacttggacctttttttgtgctttctgcattcctggcagcctgggcctgggatttgctctgccaccctgggtgacatgaagctctcagctctggcggctaaaaggctacactgttgtggggctgggacaccctgactcttctccccagtcattgttttctgtttctgtgtcatctcccccagctcggctcctcctgtgtcactgctggtcttccaagatggtggaagacactgt

SEQ ID NO: 63017 - DNA, 1534 bp, Homo sapiens
aaccacataactacctagcaacgtagcctagcaattgagatgggggcaaggaagggtaggaaccaggtcctgtgagaatcagctagacttgtggctttgggctcggtgctcttcctttggggacgtcagcagccccttcttgaaaacgggttgcaactcgatttgttgttggcttcacctcctctctctgtcccagacctgagccctgtgatctggggaggaggacaacgggacaacctgtttgcttgttttcccatcactctcagggattgaatcacagtggagccaggaagatggggagagtccaggcttgctgctctcccatcctcagagcagcagcaggccatccatcacctgtcgcctgtcctcagagtgatcagccaaggcctggggcggctggggtcaggtcaggcagggcgtgggtgggagctggcagggctggctcctccaggccacttcgtgctgagtcactgagtcggccaatcctccccagctggccctgctcccactccatgactcagatgtctattccagccctggctgcttggtggggctcctcccatctgtccttctggctctggggctgccgaggcttttgggagcctgggcagggctgaccaagactgccagagctccggccggtccccagtctcctgccttttttctcattggcactgagtctgtggtttaggtttgggggaggagggtcttgtagataaggggatcaaggccaaaggagatcatttattaggtcccagctgaaagcagaggtccttggaccagttggaatgctcgacatcccccggaagcttgctagaaatgctgggtctcaggcctcatcccagacctaccaagtcaaactcattttaacaagatctccaggtggttcagggttgcaaatcactggtttggaacattcagtgaaagctactcagctcgtttgcagtaagaggtatttttagtcctgtctgtataatatgtaatattttccccccagcattttactatgaacattcttaaacctacagaaaagtcgaaagaattctactgtgagcagtcatatagttggtacctagagccacagttaacattttgctaaacttgctttgtcacatatctgtctgtctaaccagatagctaatcagccagccaaccggctacttttgttttgttttttgtttttgagatagggtctcactctgtctcgcagactagagtgcagtggtgtgatcatagctcactgcagcctccaactcctgggctccaatgatcttcccgcttctgcctcccaggtagcttgggccctacaggtgcacactactgtgtttggctaatttttaaattttttgtaggcgtgagggctccttatgttgcccagtctggtcttgaactcctggcctcaagccatcctcccacctcagcctcccaaaatactgggattacaggcctgagccactgaacctagtttttttgatatctgaaacttccttcgaaatatattagtattctttcatgcacccacttccaagtaaat

SEQ ID NO: 63018 - DNA, 564 bp, Homo sapiens
gaactaaaagctgagagtgtttctgacaaacaggtcaacatgctgaaagacccagacaaggtccttaaactaccctgcgctccaagaatcagtgcctggggctgccgtacctaattggttcaaaccacagggtttctggccagctcatctggtaccaaacgtagatgtcaatatggtggatgccaaagaacacatcactctgtttggatgaatcaggcttttcctccctctgccttcagccaggacttctctgaattgttttcatttcaaatgaaagagggaccagttcacaagctgctttcatgctatctgggacaggagttactgtatttcagtgtctgaggctgggaaaccccctggaggtggctctgtcttttgtacctagtgtgtgatgtcaaaagattctccttggtttgggttaaatgacatgctccctggattacaatccagtgccccatgattttttttcctccttttttattgtcaatccttgacctacttcagaagttagttgtctttgttgtcaagtaaggccttccacgtcagatagaggctgtttccagg

SEQ ID NO: 63019 - DNA, 784 bp, Homo sapiens
gagccaagatcatgccacacactcctggctgggcaacagagtgagaccctttcctgctgctgcccccccaccccctcccagccccccacaaaaaaaaattagccaggtgtggtggagcatgctggtcatccaagctttttgggaggctgaggtacgggaatcgtttgaacccgggaggcggagatcgcagcgagctgaggtcacgccactgcactctaagcctgggcaacagaacaagactctgtctcaaaaaaaataaaaaaaatgaaatcaatgctgagctcatgggccgtatgtaaacaggtgtgggccaaatgtggacctgagccatccttgttggccagcccctggcttagaggactggaatgttcttctgagaatcaggacacctgccacattctactgccagctcacagtgtgaccccaaagctggtcatctcacctcgctggctctagattttgtcacatggaaaatgaaggggttagattccaagcatgtcaaatactgggccctgtcctccttcctcatgcccacagcagacacccacagtcactcatggggttctttcccactgagttatgttcaagcagccctccaggtgactggtgccagtggcctagagttgagcaagaaatgacatcttgttgcccttctgtaactccatgttccctaagatcacttccagctccaatgcccctgcattctgccttgtacattgcattcttcttacactccaataccttgactttaccggggtgcgttgatgaactctctctttttttg

SEQ ID NO: 63020 - DNA, 1244 bp, Homo sapiens
aggcatgtgcccagctaatttttaaaaatttttatagagtcagggtcttgctatgttacccaggttgttcttaaactcctgggctctggggatcctcctgcctgagcctcccaaagtgctggggttcaggcacctggcctgaaaatccctttatgttagtccagagaggcgaggctgcgctgcagtaacaaattcgccgtaaaatcttcggaaatgatcacaaggctttatttcttgctcacgcagttcttggtgagggtcagctgcctctccagggtaggtgacttccctgtgacaagtgatccaggctgtcctggttttgtgacatggcctcccaagggttggcctccaggtccccacagtgggagaagggagagtggacgactctcacccactcttctgtgtctgaaaccggaactgacgcagttaatcccactcacagcccattggccaaaatgagtcacatggccccaacccaaccactgcgggagctgggaaatggagcggtgcctgtggaagagaaggatttctccctttcctaactgatgtggttctggagttttggatagcggagtagtcagactagtgtgttcggtttctaacttcgaactgggtgagtctgggcagtaaggaatgtctgtatttggggagcacaccatttctgccacacctaaaaccatgcaccaagtacatgtgcagatagaacgttctagcactgccattgttccctcaagctttcctgtcccctgattgaaattgttggcttgcactagggactgtggtgtacaaaggtgctcagggaagagccggcgaggtggtgaccattagaatgagtagtagtgtctgggtgcagtgactcatgccccattgaaactgttggcttgcattagggactgcagagtgtgaaggtgcctagtgaaaagccagtaaggtcataaccattagaataggtagtatcagccagccgggcatggtggctcatgcctgaatgatgtcattggcttgcattaggaaccacagagtatgaaggtgcccagtgaaaaactggtgacgttgtgactattagaattagcagtattggctagacgaggtggctcatgcctgtaatcccagcactttgagaggctgagacaggaggactgcttgagctgaagagttcaaaaccagcctaggcaacatagtggaactctttctatataaaaactttttttttgttaaattagaagtagttgaggctgggtgca

SEQ ID NO: 63021 - DNA, 1472 bp, Homo sapiens
cacacacacacacacacacacacacacacaactggagaacagagcatggtcactgggggcaggagcgagagtgatgggtgtggtcggaaaatggtggtggctattccgtatcctcaccctggtgtggattcatgagcctacatgtgtgataaaactgcatgggacaaaataaacacacacacacacaggagtacaggtaaaacgggaaatcgagcaagattgttgtgtcaatgtcaacaccctggctgtgatgctttatcctagagttttgcaagatgttaccattgggtgaaatggggtaccaagtacacgaatctctctatattattgtttctttaactgcatgtgagtctgggattatcccaaaataaaagtgttaatttgtaaaaagtacacacagcatggcagttcccagcctcagagattctgatttaagggtctagccgggagcctgggcatgtgcttgaggcccccaggtgagtccagagtacagcggggctgagagtcgctgttgacattggctgcagggtggacagggcgagatgggccctgcccgggcagacctgtgtattgctaggtccttccggctctgatgctctgtgataattggccactttctctgccattttcctcccagagagcaaacacaggtctagactcaatatcgtgtggagctatcgatgaccacgggtcacttccatctccagcactgcaggctgtgcgggctggtccaactggggtacggttgagggtcctggctcagaccaggcctgactcctgggccagtctgtaaaacaggcccttctgggccagcagctgggccgggctgccgctctctgccacctgccccttgtccatgaccagaaccctgtgggggagagggagacagagaggctctttggacaccagcccaggctctcggcagctgtgagagcccagtgtgtctgcgctgaggttttctccatagaagtcctgctttccatgcggctccctggccctcacagctgggttggaagcgtgtgctgggcgcatgtccttgggcagctttcccacttggcatgtgttcccgggcattcctcccgctctggccccattcaggacccctccagctctaacccgaagcccagtggcccaggactgcctccgcctccttcccccaccactgcagggctgctgtgaggtcaggccggggcgggagccttaccgggcacagtccatcacggagcgcaggcggtgggcaatgagcagcacagtgcactgtgcaaaccagctcccgagcatggcctgcatctgcagctccgtgccagggtccacggcagcagtagcctcgtccaggatgaggatctgggtcttccggagaagggcacgtgccagacacaggagctgtttctggcccacgctgggaacgattgggacaattagctgggacgtgcgtttgtcggcacatggtgatgtgtgggtgtgcccagaaa

SEQ ID NO: 63022 - DNA, 722 bp, Homo sapiens
tctcattgaggtgtcagtgatagataaggcttaatgtatgacctcattccccaaacactatcggcttgtcagtgagatttacatttaatagaggattaaagccttaagccaaaggaatgaatctttaatggtgaaatttgaggcaccagaaggcttatgaaaaacaatattgaagagggggaggacctccttggtgatcccaattttctgaggcattctcataaagttctccaaattctcccaaatttaaaaacgtcatgccgtactgcacttcacaattggcagttggcagacagattctggatgaagctttgtggaactgaacgggagtgggagggggaatcgtgaaatcaaaggcacaagaagagggtgtctcaattccagagggagttgtctgttgagtgggtgagtcaggctgtctgagcatgtggatggaacttccctggggcagctgcctgtgttgagccacatttgatattgacttagcagtttcctgctgcttcttgaccttttttttggttggggctggtggttgagctgtatcaagttatctttctatcccaccctcccagtttcttccctgaacctcatcatcatctcagttcttctccctgcttgtcctgccctctacaaagtgcctctttggccaggcttctcaaatactgtgagcaagacttggaatctctcttctctccttgcacccaccactgaatctttgggca

SEQ ID NO: 63023 - DNA, 893 bp, Homo sapiens
atgtcagatcttattattgttattatttttattatcatgaattctccaggactagagtctgcactgtgccaggagtaggatacagcaaggatctctaactcccagaactttgggactgggtcagtttggatttcagccccaaggtgagattgagcttgaaggacagttgatagtgtcaccaagcatctcattctccttgggcagcttgccacattcacctgcctgtctgtattggaacaaggtcaaaatgcactgcaacacaggcaagaagtcatacacaccatggaaaaacaaacactgtggtttctgcaacacagagatcgattctggaggatcaggacatgctgcgtccagtagactctttacccacagatttccaaggttacttgtttatctcagagggctgatgagaaatttcaaaaggatttttaaacggattttttctttttaaacagaggacacaggccttgaagtaacttgacagttcctaggcaaagaaaacttcagaaatgatttaaatgagacgttatcacatagatcatcggtttttaagctgcatctgggggaaccccaggttggggctgggcagctggggcctcaagacacctcagtagaggtttccttactgaggactcacttccacccctatattgggtaaaatttcaattgtgcaaaaatggtttagtagcctaaaaacaagtgttcaaaaatcatttaaaaaacggccaatttaacttccagttctcctttaggagaggaaggaggctggcatcttactcaatagcagaactggctgagctctgccctcactaactgcccaatcttgggcagatgacaatttttctgaacagcactgttgcctttataataacaggaatcgcaatatgacatgc

SEQ ID NO: 63024 - DNA, 1384 bp, Homo sapiens
gaggacatttaagcccgggttttatttgactctacatgagctcatacctcctgcttcttgggtaaaagctgttcatttacagatatttctttcttttcccagagaggtatttactcaggggcaataccttagtcctgctccttctgcgctcctatggtgactgatacagtgctttactaacaaacaaacaaacaaacaaaaaaaaccaaattagtaacaaatgtcatctgggatctgatcacataaactctgccgggaagatgctgacacaagttcattgctcgctgatgaattattttcagtgccaggtctctgagtatttaaatggctgcattgtaaaaacaggatcgtattataaattgtcaaacaggacgtgtagtagatgaaggcagatttgtgcacgccacactacctccacgtactcattcagcaaacatttatgttacagctactatgagtcacgtgctgtttcagatgctggagaaacagtgaagatgaagacaaaatccctctgagaatggagctttggtgttccgaggcatccacgtacatcctggattagcttccctctatgcattaagagcatactagtcacataccatccttgctagaatcaagaacacaggcactctgcccacttcctgtgttttgtggctcaaatgaggaacctcagttgagcaaggcttggctagcgccatgtctggcatattatagttgctcaatgcacacagggacaaaggttgaatgcaatctccgagtctgtgccaggttcctggaatggaattcacaaactcggacagaattcctttcatgctaaggcagatacatcagcaggtccagctgagacgagcctaactgagtgacagcttgacgtgctgctgttctgcagaatcatcattcggcaaaaggtgaaataggtttaaagatcatctctactccttaatccttgcggtaccaccttgcaggtttctttatccttctgagcctcaatttccttgtctaagttgagcaaagatttgatgagatcatgggtgtggaagactcaatccagtgcctgccacatagtaatcgcttgattatctggtagcccttgttttttatttggctctgagtgagggagaagggtggcaggcttccccaggctgcaatgtgcagtcatcaaaggttttctcagggaagctgtggtccttgggatgttgacgaacccaagagttagagaccaaaccaagaccaacctctctgtggttgttccctggctggccctccagagggtggccaaaaaaataaataaataaaacacaaaagaaagatatacatctacagaagctgaaattcctctgtttttctactttatcttattacttcttccctttttctctaaagt

SEQ ID NO: 63025 - DNA, 823 bp, Homo sapiens
tggagttgtcaaaaagatttcactctccccatggtcctgatagatatttgtcaactcttgtcagaatggcttgtcattctaatgctttgctcttccctgaaaaacaagaagctaccagcacgaaggcagaagagcaatgactaagacagaatctgcacattcctaaatcattatgcaggagggtgatatgccaagataaatcagggttgaatgggaaagagctaatgtttggtgaggaaatatttattatgggtcactattgcatcatttcagaataatgaggcaaggacagggagaggggataagtaaattcatgtgatggaaaatgaaattttaaaaacatatttacaattcatggaaggccaaaatattttaagtcctgggacagttagaaacttccttatttcacacaatgcctttgaaaaccaataagaacaacaacaaaaaaatcaaggggtccacaaaacaatttttagacagaagtgttgtttatttgatagtactaaacaaatataaattgagcatcctgagagcatatttgcatagcctattgttaggctactctttggtgatatccagaaaaaagttctttctggtattgattacatgaaactggcaccttcctataggacaaccaatcacaaggtgtgaaagtgatgtaaaatctttttgacgcacctgcaaggttcaccgtgggtgtttgtggaaactccttgtcaaaactctgttttacatgctattagtatacatagtcaaacacaacactgaaagaatcatgggtggcccagatctaggagacacatctgacagtagggagcttggg

SEQ ID NO: 63026 - DNA, 1857 bp, Homo sapiens
gcttcaaccaaatgatataagtaagctcccttctacttctaaattcacctagtagatggtacctagtctctgacaagcactgatatactgggatacatagtggataaacatgaatgacaaagtccctaatttcattaagctcccaagacagaacttaagagatgcttgtttgtttggaaaaaatacagtaaaatcttttgcattaatgagtgaatgaggggcattatttccccatctgtgacctggaactcagaattgcatacataataatggttctgtctcttcttcttaggatacccacctaggccctctcattccttaaagagaggttacaagctacagaagcaatgctcctaaccaacatttactaaatctgctttatcaaaataaccaaaaccctccatttcttcaacaaaacatactaaatgctctctacagaaagctgaaagctcatggctaacaggaaactctaatttttctgctacattaaccagccaactactacttctaattatatcagataagaaggcttctactgtatttttccaaataaaaacagttccttcccaagtggaaatctaatgcaagctgttgaaaacaaagtaattctgttttcttcttatcacatgcagatgaatggatgcctcagaacgactttgccaggactacacaaaattcacttagtcctgttgcagactatgactatgatcttcttttgcagaaaggaaacgtaggtagttgtcagttgtatcagctacctattactaagaaacaaactcccctaatattcaacggtttaaaacaatacacttttattattgcttataagtctatgggtaagcagggaagttctattgatctgggcaaagtttgggtgatctcatcttatgtctacagtcagctggcaaggtcatctggtaatggctggtcaaggatagccttacatgtctcgtggttggttggctgttgcctaaagtaaagggagtcactgaaccctgtgtcatctctacattcaacaggctagctcatggcagctgggcagactccaaaagaaagtaacaggtacaacatctgctgagggggaggtttaaagctgacacactgtcacttccaacatgttctaatagcccctgtaatttataagatcttatggtttgaattttgtcccaccttagattcataagttgaagccctacacccccaatgtcactgtatgtggagataggggctttaaagaggtaattaaggttttaaaaggccataagggtggagccctaagctaatataacctctgtccttataaaaagaagaagagataccagaagtacacacacacgcacacacacacacacacacacagagagagagagagagagagagaccctgtgaggacacatggcctttgttgttttatcagtctttattgatgaaacaattgaattctttataggaaaaaaagaaaccataatactttttcccccaacaaaaattaattcaagttgaattatatacttagacataaaacccagaaccataacatttctaggaataaaagaatatttttaagaccttggatatgcaaaaaattttttgaacaggacacaaaaagagatgaggtgtcatctgtaaatcaaggagagagacctcaggagaaaccaaacctgacaacattttgatcttggacttctagcctccagaactgtgagaaaacaaatttctgttgtttaagccaccacctagtctgtggtatttttttatggcagcccaagccaactcaaacacaaggtaaacccagactcaaggagtagacagatagattccaactatttatgaaaagagctacaaagtcacattatg

SEQ ID NO: 63027 - DNA, 2235 bp, Homo sapiens
gaccaatgcgagagaagttctaagggagagagattgggctctttgatctgcctggttccactctgacttcattctaattagcaaagcttttgaggcagactgataagcattccgggcaccgcacatgtctggccactggctaattaattaatttttgactttgaacagtgacacttaatttgaaaactttctaccatccatggatgaacgtggaaaagtagggcaaaaagatgtaaaaatatgctaaaggtgccatttcaaatccagctgatttccaagagggcaaaatgggtcagtgagttaaataaagagatggactgtggggaagggacaggggagggtgtgctatgccagctctgcttctgctgtgctgtgtgtgtgggcttagccatcgatcctctctgttctctcagtgttttctcagtcattttatttgaaaattaggcgtctcctcggcaccctcatttattgagaaatgactgtgtgcattgcccatagagagaaaaggggcagaaaacaaaaaccatttacagagaggagaataggagggtggacaaagcttataactgcgcagagagtttaagtgaacactgttcagatcagaggtctgcaaaccacatcccaaaggccaaaccagcctcctacctgttttcataaatataatcttgttgaaacacagccatgcccaatttgtatatacgttgtctagggttttcatgctactatggcagagctgagttggtatgacagaaactgtacggcccacaaagcagagaatatgcactctgtggccctttgcagaaaatgtctgtcagcccctgatctagatggagtcagaattatgccttcttggtgtaagtaactaaagggacacccagaaatctttttttttttttaatcttgaaagcgcttctttttctaacaaggagggagctaacgtttttcttagcacctctgtgtggctggtgcaagggccctttctcaaagattagcctcatcccaaatctttgaagtaaagatgaacatgcttatgtcagaaaaggcaactgagaaagctaataacttacctgcaagttacagaactaatgtttaaaccagacttacttatctgcaatatgatgcctccctgctatgtcaacattaagaggaagattttggcaagagcctctgtctgacattccctttgtaagggtcaaagggctttgggaatagactttagagtaatatatttgagcatatttacgcaatcatctgtgtgcccactctatactccaagcttggagagaaacccttctattaatccccctttcaagcaggtctaagtatcccagaccataatatttaacaaacctttatcaaacagttggggacttcaaaatttttcacagagagaaactcatcgctgtcactggagttactgcctctccaatggaaactctaaaaatttaggtccttaatctccctagacccagatgtaaaaagaagttccttcctctctcagcccaaggtcttatttcccgtatcaggatggatggccataggaacagaccctttcttcagaagacacccccactccaaccacacaatggtcttcatcctccaaggtacagacaaggcattcaaaacatctacagagtacttctaaaagcatggttcattcactaccctaagggctatgccaagactagtctaactcaagttcaaagtcctttttccagcctaaaatggagacatcaggtctgattatatttccctctcagcaagactctgttcccctgatcaactataaacaaacttttggaaaaagaaacccagacttctcgcaagcaagtaagcttcaggtatcattcaaccgaaatccaatttgagagagtagcaagtttcctctaactccacaaaggcacagtcctgctaaacataatctcatttttcatcattaaatagaactctgagtatttcaggctgtagcttctgcatttaatattgacaaagattactaagagctcatatggcacccatgtgcaaattagaaaacagcacctcctctcggcaggtgcttctgttaaaattaaagtggtcccttctctgggtgaagatgccccacccacactgggatgcaaggctgggcaaagagagcaagggctgggcttcaatgtcaccattgtgcagtgagcaacctgcgcagccatccatgactgtacttggttttctcgaggaacactagtcattttcttt

SEQ ID NO: 63028 - DNA, 1522 bp, Homo sapiens
tctccatttcccaccacccaggaaaattcctatttactacggttgttgaaaacaggttatcgggacgtcagcctgcacattttgaaactcattcattcactaaccactcttcttcgaatcgtgccacacaccaacgtctggagataataaaatgtgggacaaaatccacttgacacaagacaacgtgagaactggcagaaactgccagctaccggaaggaaaacatcgggtatagtcgatcagtgattcagaacagaagcagagtatcatcggcaacattttccaaattgctgaaaatcagcagattccatactattaacattgtactttaaatcagttcactctcacctacaatgaacacatctaactattaaacatccatcttcgtgccatttaaaattgcgtccaacagcaagagccacagtggcaaacagaaacattttacatgcttgtcagactggactctcttctaatgggcaagaaccgcacactacactgaagttttgaaagaccaaagtgccaatagtaaagagtagaacttaaattccttaagttcaaaagtgtctaaagaaaaactctgcggcccagaagatccaagttggcacccagcaaactgccaaccccggcacgatgcagcttttacctgctgggtggcctcagcctcccaagctcccagcgcggccgcagcagtgagaagctgcacggcccaccagccccgatgttgcccgccgcccggggccaaggcgctgcctcagcactaaagggagatccagacgctgcggcccgaaccggagctaccgcctagctgggcagtcgaaggctccggctcccgcccgcgctgcggcctgcaccccacggaccgggatcccctgagtgcacagtctggggcgcccagccatggctctcctctatgcctgtccaggaaccggcaaggccaggatcctcggccaaggtggggaccagcctcctcgcaggacaccgagaccgaaccttagattgcaggatggcgccgatggcagacggatgaaattggagctctcagagagtgctactcaccggcgcggaaagatggcggaaagaggacgggaggggagagcgcacggagttatgggaagcgggagagctatcgcgagactttcaaaggcccggcaaaaacaaggaccgcctaggagaaggacgagggtgagggaaaggcggagcctcctcaggggttggcagttgagagtcgatggaatcgacctcccccggtggggcctgggagaggcaaggtgagccgttcgttggaggttcgtctacattttttttttttttttgagacagtttcgctcttgtagcccagactggagtgcagtggcgtgatctcggctcactgcaacctgcgcctcccgggttcaagtgattctcctgcctcagcctcctgagtagctggaactacagagatgcgccaccacgcccggctaatttttgtatttttagtagagacgaggtttccccaagttggcgaagatgttcttgatctcct

SEQ ID NO: 63029 - DNA, 1725 bp, Homo sapiens
tgtttaaaggaacaaaccatgcatttctaaaagcaaatataaaatcacgcacaatcaaaactgccctgaagtcacgtcattggccagcgtctggggtcttggaagttcaaaagcccctaagtaaattctttggttccgtttttcattgctggtatgtgacctacagtcaccagggaagggcaactgagaatatgcaaggatatttctcttgttttttgcccacaaggtgcgcttaaattcataacaaataaaaatgtgtccgcctatgataccatctcactgcagttccttcggatccctgcttattactctaaagctgtttccagtagtcctgtgaccccacccccgccagacttccaaattccagacaaacgccaagacatcccattgtctgttcagctggaccccgctcccggttccccacggtgagctcgcagcctccctgtcgttttaagttgtaccagctctaagataaattctgggcagtagccctttgaccctccacccttgtccaagttttagggggaaaagaaggcaggcacatccaggttaagatcaaagacggggaaagccgaatacggctggggcctgagccgcgaaagcgctggacaggccccaggaggccttctgcccccacccgcaccccaggctagtgtcgcagcccctctgcctcccacttcctcctcgactcctactcgcggtgatgaatcacgcgccctcctcgccccgtcgcgcaccgtccccaggaaaggtaagggttcgacacccaggagtcacccaagaagcccgagggccaggcatcgtcgcctgcccagggagagaagggccgggcccgcggcgggtgacagggacgaggccgcggtgtttgagcccacggacgtctggaggcctcgctcggctcccgggggacaggcagccaggactcaccagcaggttggtgctgcgattatctccctccgccatcgtctcggggatgcagtctctacaagcgcaggccacctccccaacgagtcctccaaccgaaacccgcacaccaaccacaacccgagggaacgccccgcaggctgcttatatgggtcggccgcccttcccgacggcccccgcgacgctcgctcctcattggacagaccgagcttacgcctcaaggaagccgggccaaccgaagctcagcgcatggcttgaaatcgaggtcaaaggagacagaggcagcgccgggccgagggggaggggacacggagtgcccaatcagcgcccagggactgcgcgacgccccgcccagcgctgtgggaagcggttcaaccgcctctgcagggggcgctgtccctcagtggttctccggctcttgccgctgcggtggctttgggtccctcttcgtctggctttcgcagccgaggagactctctggaaaatgggctactcgaagagagatgctccgttgcctcaggcggagggcggggacgccgggcctgcgacacttcatcttttcctggccccgaggtggctgggatccgttccaccttcggcccagttccccagccaggcccctgagccgtttagcccggatttgcgacccgtgaggttttgaggacaagtgaaaagagctctttgtgtggattttgctgcaatgtttctctcctacccagtaggaatgaggccttagcttgcgcggaaaaacccaggcctggtttgagaacgtgtgaaaatgcaccgccttctaagtggctt

SEQ ID NO: 63030 - DNA, 1002 bp, Homo sapiens
cactttgggaggccaaggcgggcggatcacaaggtcaggagtttgagaccagcctggccgatatggagaaaccctgtctctactaaaaatacaaaaattagctgggcgtggtggtgggcacctgtagtcccagctacttgggagctgaggcaggagaatccatcatgccactgcactccagtctgggcaaaagagggagactccgtctcacgaaaaacaaacaaacaaacaacaaacaaacaaaaaaaacccaaggaaaatgacatttctgttgcgtttggtcagaaggcccattgcaatctggggttcttattctacctgttcagggaaatacgaagtccagatgaatgtgtattccaattctgactcaggcttggtttcactttctaaattgctcagcaggaatctgataagatgctgagaaaagagtaaaaagaaaaaattggagggtggggcggggagagccagaaatagctggtttaggggaggcctcctgggattaccatgaaccaatgcagtaattaataatatgaggaacagaatctatccgaatgttaattaaagtgtttcctcctcccttactcactctctctagggccccctggaggtgctcattgaatttacttttcccaggccattctccgctcccctagacagatcatctgaggtggggtgcgggggttgggcgggaaaacagtctctgttaccagagaatcagaaaaacaaaagctggccgggctcggtggctcacgcctgtaatcccagcactttgggaggccaaggtgggtggatgacctgaggtcaggagtttgagactagcttggccaacatggtgaaaccctgtctctaccaaaaaatacaaaaattagccaggtgtggtggtgggcacctgtaatcccagctattcaggaggcaggagaatcacctgaacccaggaggtggagattgcagtgagccaagatcgtgccactgcactccagcctgggtgacagagcacgactt

SEQ ID NO: 63031 - DNA, 1106 bp, Homo sapiens
agttcgtgcggtcctccagcctcggactcccaaaatgcgaggattacagacgtgagccaccactcccaaccagttatttttgttatttatttctttattagatcaggtttgattttagatgcagggggtccatgtgcatgtttgttacatgggtgtaccgggtcctggtggagactgggctcccagtgcgcccaatctattgttattttttaagctcagtgagacatcagggaggtcgctgcttgtcgccaccgctggatggagccttgccggatctcccgggctctgcagcccctctgcggtccctgatgctcggctcctcgcgggggcgccccactccggcttctgtgatgtcagcgccggaacctggaatcccggctccgcgagggaaggccggggaggcggcggcggcggcggcggctggagagggtcctcggcagcctctgaggagcgcggggcgcggccatgagcgagtccagcggcagtgcgctccagcccggcaggcccagccggcagccggcggtccatccaggtagggcggcagggagcgcgcgcggggacggtgcccctggggtccgagggcgcacggagggagccgggtgctggaggctcggcctggccgctgttccctcccacccccgacgccgggtgctcccggctctggggaacagcaggtgggaaggagatcttccttattcctgctccctccacaaacgcgtcctcatccaatccagtggaacccagccgggccaaaaggacacgagaactgcagtctggaccgtggtgggtttgtcttccagctgttgaccgagacagtctttcaatagcctcatctgctgttaaatgaaaggatttgagcaccccctccacgcctaacattctggtatgaggtgcctgcctcccggacatttcagccttcacatacagttagaccaacttgaaaccgaattctgccttgtctgtttattgctgtgggacctttggtaagtggcttgccttctctgagcctcagatccttcagcagtaaaatgggaatagaatggggcggggattagctgagaatcgtgtgatgtgtctagcacagtgcctggcattgtggctagaca

SEQ ID NO: 63032 - DNA, 1624 bp, Homo sapiens
gatccagccacctctggcctccaaagtgctgggattgagccaccgcacccagccaccgcacccggcctcaggcactgttttgagccaaggatctgcaaacaactcctgtgccaaatccagccttttttttttttttttttgagatggagtcttgctctgtcgcccaggctggagtgcagtggtacgatctcggctcactgcaagctccgcctcccgggttcacaccattctcctgcctcagcatcccgagtagctgggactacaggcacccaccaccatgcccggctaattttttttttgtattttagtagagacggggtttcaccatgttagccaggatggtctcgatctgctgatctcgtgatccgcccgcctcggtctcccaaaatgctgggattacaggcgtgagccaccaagcctggccaacctttttttttgtaattcaacctttagtagaacacagccatgctcattcgtttatggattatctgtggctgctttcctgctacaaggacaaagctgagtaattgcaaatagtaaattcctacctctttacagaaaacgtttgctgacgtctgttctaagcacattacatatgattgccatctaatcctcaggacagctataggaggtaggaaccgctgtctacattttataggtgggaaaaccaaggcatggaatggtcaagaaacttgccaggttatgcaggcagcaagtgaggctggtgtccaaatccaggcagggtgggttgggaaactgtgctcttaactgccaggccttgccaccttctcggacagacagaattgcagtaactgccccacagacccctgaccagatgctccacgggcatgaaaagcaggggcttggctggacgcggtggctcacgcctgtaatcccagcactttgggaggctgaggcgggtggatcacgaggtcaggagatcgagaccatcctggccaacatggtgaaaccccgtctctactaaaaatacaaaaaattagccgggcgtggtggcgggcacccatagtcccagccacttgggaggctgaggcaggagaatggcgtgaacccaggaggcggagcttgcagtgagctgaaatcaagccactgcactccagcctgggtgacagagtgagactctgtctcaaaaaaaaaaaaagaaaagcaggggcttgagggcttgagttccaggcccagcagcagctcttatgatggagttagtcactgctcctgaaggctgtttgctcatctgtttgtaaagccttagacccagccagtcaccggccccacccaggtgccagttgacgtgagtcatgcagtttctcctgacactactgttacaaagtctagcagatccgggaggctaccagggcctctggctcctcccctctcagactaagctctgggctgctgtgattgaggcccctctatgctgtatttatttattttgagacagtgtctctctctgtcacctaggatggagtgcattgcttccatcacagctcactgcagcctcaaccttccaggctcgagcgatcctcccacctcagccaaaaaaatgttttatttttctgtagagacagggtctcactatggtgcccaggttggtcttgaactcctgggt

SEQ ID NO: 63033 - DNA, 1460 bp, Homo sapiens
agaggcggggtctcgctatgttgcccaggcttactattttaaagtagatgtaggatacaaataaaaaaaaaaatctccttccacgtaggtaaagcaggaaataccgtgccttgttaataagtaattccctcatgatccttttccccaggaacttgggtgagaaatcataaccttgtcctgatctttctaaacagcaatttagcattttcatctccctggcaacccaaggcgccttggccttggtcttccgagtgattgacagtgaccccacccaataaaatctttttatttgtcgtatctaaccaatctaacccctagcgcagagctagggggcgttcccaccggtgcgcgggcgagctgagccttccttacgtctgctgtgcgtcatcagtccgagccaagggcactattggccagttccgttcaacgaagtggttgctttttttagttccggcaatgagttgcgccggggcggcggcggctccccgcctttggcggctgcgcccgggggcccggcggtccctctcaggtaaaaggaggcgcgcagtcacagtcctgcgccggtctagcgagctagggaattttcgcttgaggtttgggtcgaagaggtcacgggggagaggttcgtaacgtcacaggcctgcgacggagcgcgactgcgtgacttcggcctccggggcgctggcgggcggggcggggtctgtagttagcggcgagagtgacaggaggacaggggttgtttcggcagtgacgcctggggagtgacgcaattgcacccctgtgcagtgatgtcacggcaggtgcggccagcgttccgagtcgaggacagttggcgacactgaaaattcagcgtctccgggagtctctctctttgtagtctttgcccagggccttgccaggcaaagggtagcccgacgaccagcagcctccgctacttctgggcgctcgctagaaatacagattctcgggccccaccccgacctacttggtcggtatctgtgatctgtgaacaggacctttaggtgatttgcatgcactgtaaactgtgaaagccatcagtgtagtggaaggagcatcgaatttagagtagagagacatggttttggaccctggttcctgctttccttgtttcatctgtgctgccttagaaaattgtcatgagcccgggcgcggtggctccggcctataatctcagcactttgggaggccgaggctggaggatcccctgaggtcaggagtttgagaccagcctggccaacatggtgaaaccccgcctctactaaaaatacaaaaatttgccaggcgtgatggcaggtgcctgtaatcccagctactcaggaggctgagacaggagaatcgcttgaacccgggaggcagagattgctttgaggcgagattgcaccactgcactgcaacctgggcgtcagagcgagactttgtctcccccgcgcaaaaaaaaa

SEQ ID NO: 63034 - DNA, 756 bp, Homo sapiens
cattaaggtcctccttaagatcccttgatccaggtgatttgaggccaagaaaacacaacctttcccaactcagggaaaccaaagacacctttcaaagtggagcttcagcctcaacaccgctcatgtctggcttctgcgggttcccgagaaacatcccggagcgcaaagcactttcccacctcatgtgttcagagcttgaaaaggcgcttctcgcccccaggacgtgcgtcctcccacttctgcctctgaaacggcaaccctgaggggctgagcccgagcactgcaggttctttcatcctggatcgcgtagagatcggctcccgggcgcgccaagggcaaagaaggtctcgggccctcggcgcccgcctgtgtccggcagagggcgcccgcgccccacgctgcgaaccctgcgaggctctgttgcaaggccggcgggacaacgcccggcaggagggccgggtcattgctgcgcgttatatatggtacatatgataccctggccacaatcctccagtcccgcgatctcgactttgttgaacgggaactgatgtcacgtgtgtgcacggccagaggcggagggctcggctggctgctccagtctgcgccgtccatgcgtctcgggtgtcctatcccggaggatacatttttctttttcagaaaagggaaacaggaaaacggggacgattagactctatctaggggagccatgtggaaaaaccagcttcaggcatcagacaacatccaaggggctgcact

SEQ ID NO: 63035 - DNA, 529 bp, Homo sapiens
actgctgaggaatcgccacatctaggaggcgtgtgatacaggcatcaaatgggctatcgtttcctgtccttcaaaacctggttacatgttacctgtccatgagctccccctgctcccactgtgggaaatgaatcacttctccctcttttcctctcatcagtgctcacattcatcctctgtgagacacacctccaagacatcagaaactctgggaggagtgtctgtatatatacttgctaagctattgaaaacaaaagccataggagtgacctttgtcaaatattaaatgctaaaggagttttggtttttggttccttttttttttggtttgttttcagaccgggtcttgctctgtggcccaggctggaatgcaatgacgcaatcatgactcactgcagcctcaacctcctgggctcaagtgaacctcccacctcagcctcatgggtaggtggtactacaggtgtgtgtcacactctgttgcccaggttggagtgcagtggcacgatttcggctcattgcaacctccgcc

SEQ ID NO: 63036 - DNA, 893 bp, Homo sapiens
tgcatgcctgtaattccaactacttggaaggctgaggcaggaggatcccttgaacccagaaactcaaggctgcagtgagctgtgattgtgctactgtgctccaggctaggcaacagagcaagacctatttctttaaaaaaaaaaaaaatagtgtttgctaactctgacctagagcattgccattatttgtatagttggagatagcataccactatatctgccaggggaaaaataaaccactctgttggtagcactccattttatagatcgggagatagaagcaaagataggttaagagagttatccaaaagaggtggccagctgtcatctctgcatgtcaaaacatctcatccatctttttccagccgcagcaacatgactttccttgggggagagacaccccttcccacagttcccacagtttgaacagggctgactccacctcttggttccagggctgggtacccaactgtattagtcagctcaggctgcctctacaaataccatagattgggtggctccaacaacagaaatttattttctcatagctctggaggttagaaagtccaaaatcaaggtctggtagcattccgcttctggtgagggcttttctccaggcttgcagatggtctttctttggtccaaccacatggagagagagccgtctctctttcttcctcttataaggtcaccaatcctatcagattaggaccctatctttctgacctcatttaacctaaattactgccgaaaagccctatctccaaatacagtcacattggccgttaaggtttcaacatagatttggattggagttggtgggggcactacctgggcaatgctaatcagtgcattcccttgcttggtgactttagcatatgacccaaaactat

SEQ ID NO: 63037 - DNA, 2055 bp, Homo sapiens
tccgatgaagtctcaggccaaatgtcacccctgtcatcctctggtttccacagggtagccagcaccttctcactccctcgggcacttttgtttattttagagcgttttcttgctgtggaatccttccccccactttttttttttttttttttttttttgagacggagtctcactctgtcacccaggctggagtacagtggcgcgatctcggctcacggcagcctccgcctcccggattcaagcgattctcctgcctgaacctcccgaacagctgggattacaggcgcgtgccactacgcctggctaatttttgtatttttagtagagatggggggcgggggggggggtctcaccatgttggccaggctagtctcgaactactgaccttaaatgatccgcccacttcggcctctcaaagtgctgggattacaggcgtgagacactgcgcccagccccttccttttttgattcccatttttacaaggctgtaagcttcacgaaggacagaaaccttgtccatcttgtcaactatgatttccccagcactgtggctccgacctggcacatggtaggtgctcggtgaatactggtttgaacagacgactgcggcagacggcaagggccactcctgtgccagggcctgccacgccaccgcagcttgtgcggtgggggtggggaggactggacagtctggctgtgcgcccttttctccttttcaacgtcccagtataacttcaagggagcgcaactccagaggctccctggacgaagctaccgccccggaatcagggccttcccaattctgccttcggggagggaggatgggggtgggccgcgggaggccagttccaagagcgtcctgaagtccctcccgccgccccgcgtcgctttaaggcggaggcccgggagggggccgacccggctcgccagctccacgctcggctccagactccggcatttcctccccgctagctggcgcggcctcgcctccccctcggaagaggaaactcccggggtccgagtaacagggtcaggcgcggagaggagcggcgggagagccaggagggccgcccagggtaggaggcgagccaggccgggccagaagctggccgacggcggcgcgcgggggcgccgggcggggagggccgctgggccggactcagcgcgcagccggggcagggcgcggcccggggcccgagagcgcagggcgggccgcagctggaaggaacacttgagctgggagaggaggccgagctggagggcggcctccctcgggcctgcgttcgggaagccgccgcggaggaggagacggggacagcggggctgcccgggcgctgtgcgcatgctgggcttgggtcgccgccggggcttgccccctgggctgctcggccaccgccgccccgggcgcccggcatgtcggtgcactacaccctcaatctacgcgtcttctggcccctggtgaccggcctgtgcaccgccctggtgtgcctctaccatgtcctgcggggaagcgggggcgcccgggccgagcccgccgacggcgtggatggcggcttcccgttgcttaaggtggccgtcctgctcctcctcagctatgtcctcctgcgctgtcgccacgctgtccggcagcgcttcctgcccgggtctccccgtctggagggtcacgccgccttctcctcgagacacttccgagagccgggcctcagcatcctgctggagagttactacgagcatgaggtgcgcctgtctccgcacgtgttgggccacagcaaggcgcacgtgagccggatcgtgggcgagctggtgcgggctggccgcgcccgggggtcccccggtctcattcctgggggagcgctggccttggccttccgcggagacttcatccaggtgggcagcgcctacgagcaacataaaatccgccggcccgacagcttcgacgtgctggtgccactgcgcctcccgccgcttgtggcgctggagccacggagcctgggcgaggagccagcgctggccccggccttccgcggctgcttcttgtgcgccctcaaggcacca

SEQ ID NO: 63038 - DNA, 1032 bp, Homo sapiens
agctactttggatgctgaggcccgagaattgcttgagctcgggaggcggaggttgcactgagctaagattgtaccactgcactccagcctgggcaacagagtggcactctgtctcaaaaaagcaaaaacaaacaaaacaaacaaaccaaaaaaaaccccccaaaaaaacccaagttctgattcaacaggtcttgccttcttttttatttatctatttttctgagacagggccttgttctgttgcctaggctggagtggaatggcaggatcatagctcactgcaacctcaacctcccaggctcaagagatcctcctgcctcagcctcctgactagctgggactacaggaatgcacagctaacttaaaaaattttttgtagagatggagtcttgttctcttgcccaggctggtctcacactcctggcctcaagccatcctcctgccttggcctcccaaagcactaggaatacagacgtaagccaccatgactggcaggtcctgagatttggcctctttaacaagctgccagggaatggtgatgccactggtacagagtccacacacacacacacacacgcacacacgcagctgcagaccacacagagagtttgaactgatcagagggcactgttgaatcactttagacaaggagtggcaaggtcacatttgaatttggctcactctggctagtgtggagagtggattatacaggggttggcaaactaccacctgagtatttatttttgtaaatagtgtcattggtacacagccacgtccattaacatactgtttatggctgctttcgtgctacctgggcagagctgaataactgtgacagaggccaaatggctcacaaagctgaagatatttactttatggccctttgtagaaaaagttagccaagctctggagcaagactataaggaattggatgctgcagtggtccaggcctgggcagggggccagaggtagggacagagagacaagttagagacagacagtggcgtgcattaatgcaaagacttgtcggca

SEQ ID NO: 63039 - DNA, 1680 bp, Homo sapiens
tgcactccagcctgggtgacagagtgacaccctgtgtcaaaaataaaataaaataaaataaaataaaataaaataaaataaaataaaataaaataaaataaaataagaaatccagcggagggcaatgttccacctcgaatctctgagtggagagccagaggccttgggctgggaggtttgatggaggcctctgggtccagggcgccccagccacgaggacaggcaggagggcggcggtggacacgccccggggcgcacgctcgctggcggccgcctgcccgtgggcagaggagcgcacgaggccgggcacgacgctgggtggcgctgccgggccgccccgcgctagacctgttgcgtccagggcgcaactccggcaggtttagggtaaaggggcgctccgctctctccgcgcgccccctgcagccctggacgcagcacctccgtttgggacgccctacgcccaccttaacttgaggctcccatccacgcagcctctgcaagcctcaccgcaaccgtgctaggcgcgtcgggtggggcgggaataaagtttttccaacccagtttggggagagggctggatgggaaggaccctccctgctgcagacttcatggcaggctgcactgtgtcccctcggctccacggctgccccgggggcgctgctttcggtaggtgccagcccccgtgccagcaggatgggctgacctgtgtaccgccccctcccacccccttccccattcccatcccctcccccgcctcctgcgcgctccggccccggcgtctccggccccgcctgcgctggggtcgctgcagtccccgcagctgccccgggctgcttgcccaggcgccccggccttattccagcctggggagcgcctcggtggggagcacgggacagcgagggaggccgaggcgggggccctgggcgcccgatatctccgaaccggggaggcggccccgattccgagagccggaacgcagggaaaggcaaggacggggcggccggcggaggggcgggcgccgctcatcagccacgccagtcacgtctggggccaccggctgcctttttcttcctttccccctttgctttcttccccctccgctgttggcgagggcaaagtggccgtggcggcgccatgcccgggccggagtgagtgcgcgcgggcgaaaatggcgtacatccaggtagggctgaggctgggggcaaggtccggggtgcgggtagggggtgccgcgccccctccggctgggagcgcgcggaagggagggcccacggctaggctcccacaaacttgcttcgagaaaaagggtgcccgtgcgcgggcaacctgtgcagcaacaggggtgcgccccgggaggagagactggggacccccaaaccccgggatggagggtcctatgtgtactctgcaacgcgcgcccttgcctcttggggagggaatggggggtggggcggacttttcttctcccctgccccctccctctccttggcaccccaccccaggggaggggccgtggggagggcggcccggggcgcgccagccacccggcccgccagctgccgttgccgtggtgacggctccggctaattggccggcggagcgagcctgaggcagctgttccgaccaggagggacaaggacgtcgtctctcctgggcactgggtgctgaggggtgggggac

SEQ ID NO: 63040 - DNA, 3199 bp, Homo sapiens
gagccatgagattcacttgcacctggaaggtggaggttgcagtgagccgagatccgccactgcactccagcctggacgatagagcaagactctgtctcaaaataaataaataaaattaaatgaattttgcccttttatttgcatattttaaaagtcgtggctgccagaacattttaagttacatgtgtggcttgcatttctggcttgcgttatctttctatggacagtgtgggcctaggtaatttctaagtctcatgcccagctctgaacacaggttatctccatttagcatacatctatcagagtacctcccatgcctctggcaaatgtctcataaagacaactgtttgggcaattagcaagaatgccatgagctcattgctagaagagagggatgtgcaaaggttggaataatgaacttgggatcaatgcattctgctggttcatggaagggagagaggcggcccgtaagcggtgaggtttgaatatgaaccttgaagaagtacagtcgttcccatttattggtctgtgcctacgggcacattctgtgccatgctcttttcatgccctggctcagtgaatcttcaccacattctttgaggtaggtgccgttattgactctattttactgatgggaaaacagagtcccagagagtcaaaagaatatgcccggagtcacatggctcactggtaatgagtacacgagtagtgagtaagtggctgagatggaattccacccaggcactctggtcccagagctcactctcttaaagtggagacatcgtaggataatggttagagccagactctggggtcagctagaccagcctgacccctggctcctacacttgcaagtgtgtgaccttcagaaagttacttaaagcttctgtttcctcgtctataaagtggggataatagtaattatctaataattcaaggggatgtgaagattgtgattgcacatatgcgatgatgtagtgtacacagtccattagagcagtgcctggcacttagctgctgtgatgatggcaaggtgtcaatagtgccaccaaactatctgtcacagaatcagtgagtatttcagagtgtggagaaagatggcaaaggtcattctgaagcagagtaaacaatgcaagaatctgcttacctgcaaagtggcccaggtctgccccgtatgtggctgtcttcattgttatttctggtggctctcaggtcttgagtcaagacgtcccagctctccactcatcgatattaaacccatcgagtttggcgttctcagcgccaagaaggagcccatccaaccttcggtgctcagacggacctataaccccgacgactatttcaggaagttcgaaccccacctgtactccctcgactccaacagcgacgatgtggactctctgacagacgaggagatcctgtccaagtaccagctgggcatgctgcacttcagcactcagtacgacctgctgcacaaccacctcaccgtgcgcgtgatcgaggccagggacctgccacctcccatctcccacgatggctcgcgccaggacatggcgcactccaacccctacgtcaagatctgtctcctgccagaccagaagaactcaaagcagaccggggtcaaacgcaagacccagaagcccgtgtttgaggagcgctacaccttcgagatccccttcctggaggcccagaggaggaccctgctcctgaccgtggtggattttgataagttctcccgccactgtgtcattgggaaagtttctgtgcctttgtgtgaagttgacctggtcaagggcgggcactggtggaaggcgctgattcccagttctcaggtaagggatgggtttgtggtgtttcctcctgggagcttttttaaaaagtgattatttttattttattttactgtttaaaaggcttttttggatttttaaaactttttattttgaaataatttttgactcacaagaggttgcaaaaatagcagagagttcctgtgtcctcttgatccagcatgatagcatcttacgcaaccaggaaatagatgttggtaactaacctagagcttactcagatttcagtagtttttttttttttttgagacgctctgtcacccaggctggagcgccgtggcgtgatcttggctcactgcaaactccacctcccaggttcacgccattctcctgcctcagcctcctgagtagctgggactataggcgcccgccaccacgccctgctaatttttttgtattttttttttttttagtagagatgaggttttccgtgttatccaggatggtctcgatctcctgacctcaagatttcactactttttacatgcatcactcatgtgtgtgtctttctgtgaaaatttatcacatgtatagattcctgtaaccaccaccactctggaagccttttttaaatcatcgatgctgagttatttaataaggagaatgattgcacagggtataaagctatcaatcattttgactttcagaaattgatttttttggggaaaaagtgaaggctggaaaacaggatgatgcatggatgtttttcaggccaactgttagattggcttccttccccctgtccagcccagggaaatgtggttggctgctcgggaagccacccacggaccaggctgtgtctccagtcggctgttgtgcattcctgcatattagagggtaactgtctacccattgtaggtagaaggatgtggggagcccaaggaaaggaaaagacccagccactccttcctccttccctcccttcccgcttctctcttcactccctccctcccttccttccctgctaccctcttccctccctttctccctccttcccctccttcctccctcccctcctcccctcttcccttccttctctccctgtcctgtgggatggctgttgtaggaacagggacgggagatggagaaacaggggagggggctttggccaccatgaggtcaataagagctgccttccaggccaggcgcagtggcttacgcctgtaatcccagcactttgggaggctgaggcaggagaatcacttgagtctaggcgttcaagaccagcctgggcaacacagtgagaccccgtctctacaaaaaacaatttaaaaattagctaggcatggtagtgcacatctgtaattctagctacttgggaggctgaggcaggaggatctcttgagccc

SEQ ID NO: 63041 - DNA, 1119 bp, Homo sapiens
cagcaagagtgaaactccgtctcgaaatttaaaaaaaaattattagttttaattgtgggaaaatacacacaccatgaaatttaccgtcttaaccatttttgcctgtacagttcagtggcattaagtacattcacattgttgtgcaaccatcaccaccatccctctccagaactcttgcaaaactgaaaccctacacccattaatcaataactccccatctccctctccccgcagcccctgacaaccatcattctactttctatgaatctgacagttctaggtacctcatataagtagagtcatagattatttttcctgtggctggcttgtttcactcaggataatgtcttcaaagttcatctgtgttgtagcatgagtcagaatttccttcctttctaaggctgaactgaataatattcctgtgtgtgtgtgtgtgtgtgtgtgtgtgtgtgtgtgtgtgtcatattttgttgattcattcatcctttaatggacacttggattgcctccacccaatggacaacggtgcctccaccgtttggctattataaataatactgctatgaacatgggtgtgcagatggctttttgaccaactgtgtgtgtgtttttttaagccataaaaatatccacgatgtaggtggttcattttctcttgagttcatgtggtttggggaaggaagaacaagggcagtggagagattagatgccccgtggccatgcgggaacctttctgagcattaggaaggatacacagttgtatccatttggcaaggctcatccagtattcctaaagtttgtgcatttcactgcatataagtttaatctaaaaaaaaaaacccaccataaacaaacactgaactctggttaatgatatgccgaaatgtgtatgggtgccatggtctgaagttttcctaaattcgtatgttgaaatcctaaccccgaggggatggtattcagacggcctttggggcggtggttaggccatgagggcagagctgttatcaatgagattagcgcccttgtaaagaggctccagagagttgccttgccccttcctccatgtggggcaaaaccaaaaggtcccatctatgaggaatggtcctcagcagacatgaa

SEQ ID NO: 63042 - DNA, 1544 bp, Homo sapiens
cacatgcctggacctttcaggcatgaaagatccctttactgtcatatattatgaggataataacagtaactctcccatagggttgctgtgaagattaaaggggaaaataaaggaaagcacttggccaggcgcagtggctcacgcctgtaatcccagcagtttgggaggccgaggaggctggatcacttgaggtcaggagttcaagaccagcctagccaacatggtgaaaccccgtctctactaacaatacaaaaaaaaaaaatagctgggcgtggtggtgcatgcctgtagtcccagctactcagcaggctgaggtaggagaatcgcttgagcctgcaccatcatcgaagggccctttgagaactgaatgacataatgtgataagaagcaaggtgctcagccccaagtgtggtacagaagtgattggtcaatgtttccgctgtggttatttgtttatttagtcagcatgttagggggttgcccatatgtcggctctggcttggatcttggggataaagtggtaagtgaagggctcgcagtctaggctgaaggccacagttagaaaccagaatcctgagtggttccctccgctgcagggactctgtcatggctctgtgcccaatgcagcacctttgcctggcacagggtggagtttctgctggtagaataaacagccacgtgttcactgaaagaggtaaatctcaggctcacaggaaagcacgtggcagggatacctgccctgctgtgggtgggctgcgcatgggatgggggttggtggatggtctggaatgttctgtttacctggcacatagttttaccgtgtgggcaatggtgcaacataagattgacggaagcggaagctggggaatgaaaagcctcaggccaggccatggatcttagcgcttatcctgagggggatgggagccgttacaagacaaaaaataggggaggccctggtcagatttgaatttgaggttgctgtttctggagcagagtacgaggtggacctagagcagggattctcagctttggcactcgtcacaccttgggctggaccattctgtgttgtagatgccgtcctgtgggcagcacccctggccccacccattagatgctagtaactccctctccccgacttgtcaccacccaaaatatctccagacattgccacatgccccctgcagggcacaatcacccccttgagaaccactgatttgagaatgtttgagaacagggcaaggtgaccttagatgtggtgggggagggatccaggagtgattttggacaggcatggggggcttggaggattttttggagttggaaacgacacgagggcagagggtgagggaggtctctagagcctcactcagctttcggcgttgaggtgcttgctggttaggggtgctggacagtgagacaggaggagcaggtgaggatggggcagggtggtgctgatgagctaagtttggggtgcagggtgttgaggatgagcacccctgaggaggcttccagtggacttaactaaagatccctgagtgatctca

SEQ ID NO: 63043 - DNA, 2105 bp, Homo sapiens
tatcagatgaagactttgaagcaactattataaccatgctccacgaagtaagggtgaaccctcttgaaaagaatgataaggtagaaaatgtcagcagatcaacagagaaatagaagatattagaattacgtggaaattttagaactgaaaaagtacaatcactgaaacaaaatatttgctggatgaactcaatagcagaatggaggtgacagaggaaggtgttagtgggctcgaagacagatccagagaaattatgcaacagagagtgaaaaaaatcggggaaagaaaagggtggggagacctatggagaaatatcaaaaaggtttaatgttcatgtcacatggattccagaacatttatgtcacatgaatcccagaaggaaagaagaaaaaacagtggggagcattggcatggagacaggcgactcaccccagacaacccctgagttccttaccagattgctgggctcctggcttaaccaaaccactcttgttcttcccttctcagaaaacattagcaattcatgaggaagctgtgtggcaccatggtcaaagtcagccagagctggcttctgtgtgactgtgggcaagttgctttaccacgctgaacctcggtttttttcttgtctgaacaatggggacagtaatacttctatttatcatgaaccacctgtatgttgattttctcatttaatctttcaacaaacatataagttatgatctattttatgatcatttttcagctggggaaactcgaagcttagggacgggaagtgcaatgagtatagccaactgcagagtgagagaacagttcacccaaaactgccctcacttcagataccagctgtaagttctgaggtctctaggactacctcccttcagaccagttggttacaatttcagggcccctgtgacctccctcaggttcaataatttgctagaaagactactagaactcaggaaagtgctacttatgactacagttttattacagcaaaagggtgcaaattaaaatcagccaagggaggagacgcatagggcagagtccaggaggggtcaaactctgagactctagtcatctgtccgccttgtgagtcacaaacagcattacctctactcagtcactgtgtgtgacaatgcaaacagtatagccagccagagaagcttgtcacgcctttggcatccagagattttactgagcctcaatcacatactgctcaggtggctgatcttcagtctctatcccctcccagaggtctgggtaagacctttcatgatcagtttcaccataagtctgaattgatactatgtgatcctagagccccaatcataaatcacattgctaggctagccaagagtcaaagcccctaggcaaacaaagatactcttcttaggcagaacattccagggacctagagatcagtccctaggagccaaagacaaaggctaggcctctttttgggtaagattactttttcactgtttaggtagtaactagcaaccgtgcaaagtcatccagctggtgagtggttgagctgagcttccaacttaaagctgcttggttccaaagcccttttcactcactcttaaccacgacattgatgttcctgtgaatcaactgggggtcttgttaaaatgtggtttctgattccataagcctgaggaggcacctgagcatctgtattctaataagttccaggtgacacctgtgctggtctgagacccacacttttgaggcaggaggtgggacttggacactggaccaaattgagggctagctaaaacagggatgggggaaaacagctttccataagacacacccaacagtgcgccatctcagtttaccattgccatggcaacacctggaagttaccgtccctttccacggcaatgacccgacaacccaaaagttaccactcttttcctagaaatttctgcataatccaccctttaatctacatgtaattaaacgtaggtataaaggtgattacaaaactgccctgagctgctactcagcacactgcctatggggtagcactgctctgcaggagcagtcacagagctgtcacactgctgcttcaataaagctgttttcttctaccctac

SEQ ID NO: 63044 - DNA, 1236 bp, Homo sapiens
gacttttaagaggtgtctgggttataagagctcttccctcatacatggatcaaagatgttatcacaagagtagctcaggtatggcaggagtgggttcatcccctctttaaaaagctctgtctctctctctctgtgactcatctctcttttaccctctcactatccaccatatgatgactcagcaagaaagccctcaccagatgccaacaccttgatcttggccttccctgtctctagaactgtgaaccaataaattctgttcattataaattaccagtctcaggtgttctagtatagcagcacaaaacagactaagatagacacttttaaattccaagcagcacccaggaacatgacagcaggagcccccaaatttcagcttgcaagatgatagggagtagggagaaaatatccaaactttcttccacatttatatcttttatcaacctttaataatgtccaatgtgggtgtgtgtgttttataacagaaataatatattagtacagtgagtcgtacctgcacatcacttataaacatgtaataaatatatcccatttataaataagtaagtgtgcatgctctgggatatgcaccagtacactagttttgaggcaacagatctacccgaggaggcatcctgtaggttgaagctgagcctgagctgtgctcatattctgagtcagaccttggcagactttcagctccagtgccagcaggcaaggcaagctgtgtgggcacaagttaagttatttctcacaagcacagcagcaggtgttccagaaagacttggaagccaaacagacacattccagtccctgtgagtgccagccacatgaggtgtcagggcacctggcagagcatttctggagaggaataagggagtgcaggggcaggggatgtgggtgatgccaaggaaagccttgcactagatcaatgacaacaatagcaaatgttgctgtcatttattgagcacctactacttgccagcatctatgccaagttttagaaacaaattacttcatttaatccttgtgaggtaggtactctacttatcccccattttacagaggaggcaactgaggttcagagaggcaaagtgacttgtctaaggacacagaaagtgggggagaaagactgtggtttttagaaatattgattctccaaaagagcgatgagatcccaatgaaaacactaggggtttttaaacattgaattctgagcaagccacacagtag

SEQ ID NO: 63045 - DNA, 1832 bp, Homo sapiens
atcctcctctaattatttttaaatccactaagtccactaaattcatttcccaacccactaatggtttgcaacctgcagcctgaaaaattactggactaaactatgccaaattgtcagcacttaaaaattttctaagcacctactatgagtcagctgtgaaatctggctgatggtctcaagagaaatgagacagggcccctggcttcagagattttgcattctaggacaggagtgtggaagagacagagaaagagatgactcgtcatttgagcatctatgatataccaaactctttgccaggcacttacacatctgatgtcactggttttcagaccaattctatgaattaggtcagtgttcctcaaactcttatgtgcataagagtcacctggggatcttgtgaaaatgcagattcctgttcagcaggtctggaccagggcctgagagcctgcatttctaagaagttcccaggtgatccctatgctgctggtctagggaacacattttgagtgactaggagtcatgtgttttaagacttgtttttgtaatccaggtgcagtgacactcacctgtagtcccagctactcaggaggctgaagcaggagcatcacttgagcccagaagtttgagtcgagcctaggcaacatagagagacctcatctctttaaaaaaatgtttttaataagaaaataaaaataaaactatttattgactcattcctacataacaagcaccatactcggcactcagaatgtaataatgaagccacaacttgaacgcagagctctctgatttcaaacttatgctcatacccaaagaagtgggaacaattgttctcaatacacaggaacggaaacaataggagatggcgctgggagggagggtagagaccaggtcaggaccagtctccagggccaggctgggggactggtgggcactttagctgtcatggagggcatgatttgatgcagtctgactggtggtcagggtaagctgatgccgcccttctgagttccttgaggccaaaaagcctatgagtcacacggcaagtcacttccaatacatgccccatgaggcagcactttccgcagtagccttgaactattcgctctgtagcttccaaatgagtctttgggggcaggtttgccaaatagcacagcgggtccaacccaccaaaggcctccatagcctgtgatctgtcagtctcagattcttgcccctcagcaagacacttggcttaacaatcaaagccaccgtggctctgaaatgctcaaatatttattccactcactgtttgcaatttgctttgtgtgatttctaaagctggagtgcttccaaccacaaggaacagcttggcaagaccactgctgactgcaaagagactcagtgcccttcagcagatacaaatgagcaccaaccttgttccatttcctgcaataggcattaggagcatggggagatttgaaaatgtgatacagaggccccaatgtcattatatgggctgtgtgtccctctctgctcagaagtggctcagagaaaatccaaatggccagtaaccatggccagctccataataagatacagggaaccaaaacatcagcaggatgacatgattcttccttcagaaatgtaaaagatagaaaacatttggtgttggaggtgttgtagtgaaatagacaccttcatatactgttattgggaaggctgatttgagaaactttggaagcaatttgggagtttttgttgggagtctggacatgttcaatggtttctgacccaataattttacttccaagagcctatcactaaagagacaaacacaggacttgatg

SEQ ID NO: 63046 - DNA, 988 bp, Homo sapiens
atttcttcattgcacctttcactctcttaaagttatctcatttatgtgtttacttgtttaaggcttgcctcccccattccgatgtacactctgtaaaccagggacacttttgaccttgttcctggctgtatgtaaccttagcgtcaggcgcacagaaactatatacatatctgctgtcttctgtaaatataaaacctcaagtccggagatccctagacactgggagcgatcaagggccgggagtgtgccttgtggacgaatgaggaagtgggaaggccgtcctgagaagatcggggaaccctgggaaggaaaagtagaagtccgagctctcgggaggaccgaggggcgcgaacgtgggggtctcacctgccgaatggccgccagcgtgttctcgggcgcgtcgtggctgccgccacggtgggcgatggcagaaatgcggtcccggggcttgagcacctgcagggccctgcaagagggcaccggctcaaagctgaagacgcgcagtagaacgaagaggctgccggtgaggaggcaggcattgaccgggctccgcgtcaccagcagcagcactagcagcaggaaggagaaagggcccaggaggccgccctggtcctcccacagccacatgccggcgcccgcaccggcacggacgggagtcccggacccgccgggctcctggggcagtagaacgagaagcgagggggagggtccaaggcaccggcagcagcaggaaccctctgaggggaccagcgccgcacaatggcggcagcagacacatccagagagggagtcggccgcccagccaatcagggatcgggattcgcagcgccagtgggcggagccgctccatggcaacgggggagggcccaggccccaggccccaggctcacgttccaaatctaaggtgggttagggttttccgaggtctgaacttcaacctgggcgttcagactcctaggcgagaaaaggagggataagaaccatccta

SEQ ID NO: 63047 - DNA, 1145 bp, Homo sapiens
caaggaagactacgtttcccggcgtgcagcgtgctggccgtaagcattacgtcctccatcgcgggcgcgcaatgcacctcggggatggtagtgttctggtggcccaacggttttaacagcccgggaatcaaccaccggaagtgccggccctgagaggtggagtcggggtggcagcggcggcggttgccaggagcccgcgttgcagcctgagatccgtaatatggcggggaggaggaggagaaggcggcggcggaccgagctgcgctctgtcagtaccatttgagccattcgcttcctgacaaggcccgtggcgaggggagaggagctgaaggggccgtgggggatcaggtgtgtgcatgaggagggggcttgagccttgacgggtccgggctgagaggtggtctggcgaggcgaaattggcgccctgagaagctgagggcgggctctgtgctgggctcccgggcctcgagccccctggaaaggcgccggctgttgggaggcgggaccccgggggcagccagcaccgggcgctgaggtgatgctccgatgctggccccgcctggagggccctcggtttggagtcttaaatcggaggagctggaggaggtgggcatggggcgctggggagagggcagggggccgtccctggtgaataaaactcgggccagagccggagaaccccatcgtggtgatcaaattgtttgggccgtttttcttctccctcccacggtgctggagagggaggcttccccggggtgtgcattggccatttatgagcccctgtttccacaaccaaggccctaggagcgctgcttacttcgcctttgccactctggggcataaacttgaggataataaagtaatcgattgcccctggagctgctagatggttcccaccctttgattctattctggttacgatccaagctccctacccccagtttaggcaaatggcagccatctcgagattgatttgacggggagaggtctagggacagggaaatgaggaagccgttgtccccttttctatatttttcagtttcatttgaaacctacggggaaccaagcactgtcgctgccctccaggaattcatactctactgctaaaaatcgtcatcatcattatcctcttaataagaaaagca

SEQ ID NO: 63048 - DNA, 473 bp, Homo sapiens
ctggaaacaatgctgtctcaagcggactcactccatacttcaaattcaaatagttctggtaaatatttaaaaatccttttacatttgggaaagtgatcctacggtaagatatttatttggcacactataagattatatctcctgttttcaaatgattccatgtccaaccctctttgccagctgcttagtaaccagtgaaaaatgacatgataggagatcaaagacttgtgagcagatgtttgtgaacaaagattacctttgccaggaaaagatcaggaaatttggcttagagcccagtctgatcattcatgcagcaggtgatatacttcaagtgaaaacagtttgctctctcctgagtgatcttgaattacctctaattccctagtccctttaaatagcttatcttcatatctcaattatcctgagatgctgtttgtgttgaaaagatccacctggtatgtaagctttaaagt

SEQ ID NO: 63049 - DNA, 1911 bp, Homo sapiens
ttcgctcttgtagcccaggctggagtgcaatggcgcaatctcggctcactgcaacctcatcctcccgggttggagcaattctcctgcctcagcctcccgagtagctgggattacaggcgcccgccaccatacccaactagtttttgtattttttagtagagacggggtttcaccatgttggccaggctggtcccgaactcctgacatcaggtgaaccacccacctcggcctcccgaagttctgggatcataggcctgagccaccgctcccggcctaaaataatttttaaaaacgttctgtggtcgaaatggatatccaccttcctagaaacactgctttgccaagttggacgaaatgcgaaccctaatttccccacgtgcattagctgtagtcaatcatattagatctagggcagccctcggttgctagtcgtgggaagggcattctgcaagtgtctaaaaccgcccgcaaagcagtgggtaaagcagcggcctagagggggcatggctgtcccacgccaaacagcgtattagccgcaaaaccaggtactggctgaacctcagtttgcgtcttcgctccgccgccttctggagtcctttctgcccctagaggacgcaggtgagctaagcagcagtcatgccctttaccatcatgacgcccgcaggcgggaccacccggcactgtagacagctgccctttacaatcatgactcatagaaactacggcactctggccgtggccgacgttgctcctccgaagcatggcgccggcgggagttgtaacccgggctgtccggagcggggagctgcccctcacaagcatggcgtcagctgaaaatgaagcctgtgctgtgcggagcgtcgcctgcccctcacaagcatggcgtctgcagaaggtgctgtgcggccgctgcggggcggccagctgcccttcacaaacatggcggccgaggggtgcggggagtggcggggtaaggatgggaagccgagcagacggccccagaacaagcggtcatgtgactgggaagatggccgtctttccttggtaaggaagcagcggcgggtgggctttggagaggggctgtccttacttgtgatggggtcggcctgggtctgagagtgtgaattcctctctgtcgggttctggtggtcgaccggccacccccaagttgtcttgaccgtagaatccctggccgctaccgcggtccagcggagcaatctgaagccagactggcgggttcttggttctctccccgtctgctgcctctctgcgccttccacgggcccctgtccattcattccctaaagaaaacttgagtttccaggcttccgcgtccccagaagttggcgcgggttctggggtcgctggatgagggtaatggtggactcagcttttaaagtctggacgagtcgggagatctggctgttggtcagtttcctcagctcctctgttcacctggagacttgcttttctcatctgtaaaatggccgccattcatcctatcctaggcacagccctcagacttattccttggcctcaaggagctgacagtataatggggcagacgcacagtagagggatgtctaaagaaggcattcggatgaggcaccaagaagggagtgattatccccaccagggggctaggggaaggcttcagagaggaggagttaaattgggtcttggaggatgaataggagtccaccatagggagggcgtggcgtgtgcctggttggcaggcccgtaggtcccttgtggttggagtagctaggaatgagtgactgaagcttcagggttcagcaggtggtatgtgtgtgagtgaagaacttgaggaagttgtgttgttgatgatagtgggatttggggacggggaatctctcctgcatctcagaaagcgagataatttactttctc

SEQ ID NO: 63050 - DNA, 1010 bp, Homo sapiens
agtcatttctggtcacgtccaaatctgatttttagggcaagctgcaatccaagaagttgaagactttgatttcttccctcctctcatccctcaaaaaactcactcttctctgctaagaaatctaagctcacataatggctgattcattagagccttgggctccaaggataatgaaccagaaaggagatggatctttctttttcctcataggtgaaaacgctagaatacatcaagaagcaaagcaaacaaccagacatgactcatctgacggagctggccctcagactccctctgcaaacaaggacctgacccccgggcccatccccaggctcagggactctggtgccaaatccagaaagatctgctctgctgccctgaactcttacggcaatttaggtttctcatttttcttttctttttacatatgtacaaattgttttaagctttggcctctatccaggttattctgacaatgaagaaatgggagttgtcagagcattaaaatgcaatcttcactaagaagcagtctctgtgttgtctttgcacaagtggccttcggtctactcagcccgatctgatgggcctttttagcaagagagaaacaagaatgcaagtaacatctttcttctctggaaggtgtttgttttttcatagtttagaaataaggactttaaaagtggactgcttttcaaagtgccactgttccagacccattccattccagactttgtaccttaaagttagagcacacccaaagtctggaactgtgttacctgaacccctatggaggatttataaaaggcagaaatagcactccattaactctttttcctatcaaaagcagctcttgattggacttagaatctgtgttggtggatcaaaggagaaagcgaggtcaaatttgagattctctgtggcttcagtatacagtaactgaataaatgtcctgaaggagcatttatgttcatgactgttcatttaattacttctgactgtcttcctccagaaga

SEQ ID NO: 63051 - DNA, 1628 bp, Homo sapiens
ggggactattgtattggcatttaaataagtgggcagagataaaggagcttgcaaagaagaaggtgcaaaccttgaaatagtgtagtcaggagagccaagacgacttcagaataggggagcagtcaagagagccaagacgacttcagaataggggagcagtcaagagagccaagacgacttcagaataggggagtggccaagagatctggtaagaacaaagaatccaccgggaggttgcgggtcaactcttaatccccttctctccccatctcttgccatttagaaaagtatagcatcctcctctttagccctgcgaccaaatgcattcactctttcaaggagaaaggaaaagaacgttacagtgcatctcctgcaaacgcaaacgctttctccaaaaccgcttttaaattccagggacagccttgtgaagatctttgtgaatacccgacctcgcaagctccagagactacaataattcacttgccctaggttccaaagccagcaagtggaaaacggagactggaattccgcccacaggactccaaagcctgtgcagcaacaccccactcccccggcaggatcaccagcaggacgcgcgggagccaggaagtaagatccgtacctccaaggctcccatgggcccaagcctccgcatcaacagactgggagggattacgtggggtcccagggccggctctgaggcgggaaaactttctggaggcggcggcctcaggccggagcgggcgcacaccgactggaggggtcggattcagggatgtgggtggaccgcatttccccatcttccccgccgcgcacttcctctggtgcaatctccacaccccgcgccggcccgcctgcaacgcgccctggcactcaccggtgggcgaaatttccccgcctccacgtgagagccagctccgccgtgacccggaagtccacttcgagtcgccggcccaccctctcgggttccggcttcttccgggtcgcggccttccggcgaacgcggttaccgtggaaaccgcggccatggcggcaccgcggcaaatccccagccacatagtgcgcctcaagcccagctgctctacagactcgtcgttcacccggacgccggtgcccaccgtgtctctcgcgtcccgcgagctgcctgtctcgtcgtggcaggtcaccgagccgtcaagcaagaatctgtgggagcagatctgcaagggtaggaaacctgggctggccgagaggggcgggacccgggcggccggacgggggccgcgtttggggagcgcccactgtgcgcctgtcggctgacgggcggggccgccgggcagcggctccgcgggcccgggctccgcattttacgcatggggaaactgaggctcggagaggctggcccgaggttacgcagcgcggactccaatcgcgatccgtagtgaggttaaaggcaagggaacggcgagggaaagctgaataaagagaaccatgcggtgtggaccattggttcttaaacctcggttagtgaaccgaaaggaattgctggggcgggggccggggtggggatcttgttataaacggaggttcccaggccccgcccacagagcttcaaattgggatgcagggaatctgcactttttaaaaga

SEQ ID NO: 63052 - DNA, 5734 bp, Homo sapiens
agtgctattatcatcatcaactggcatctggttggcatgcagaatctcaggccccatccagacctcctgaatcaaaatctgcatctttacatggttcccaggagagtctttgcatgctgaagtttgagaagcagccctatgggtgacagcctagtagggtgccatgatctgggttttaatcctggcttgccaacaatgtgaccttcagtacatcacttaattttcctaagcctcagtttcctttcttgtaaaatggggataataatattgctgctgtcacagggtcatatgtgagggcataaatgaaatggtgcaggttgcacagtgcttggcacatggttaagggctcataagtattagctctgtattggctgggtctgatccatgcattttctccctaagaatatattcctgatcatttcctgatgatgttccttaaatgagtattttttttaattccctgtcaaagaaaatcctgttttgttttttttaaaaaaacatccttgagctcatcaagaaaacttttgtctgtgcccagcatgattccagccataccccagaatgaaggcgcctggtttccatggtctgtttctaggcccagttctcagggcaattttcagggccacccggcaggccaaaataggccacagcactataaatagtggatttgggctgcttcgggcctgacttctcaggtcaggcccttcccttccccctgcctgctcctgtagttgtttaaacatactctgggttagagctgcaagtgtattttccttaatatgcccagaaaatgtcttgccaacttgccaggctatcagcaaaactccctttttatttgctcagtcacaatgtacccccagtatgtgacgaaaactgataaaccacactccaggtttcactcagtggttcacacagggttcactgcagtgaactggctccagggctcagggatttgagaagcctgagtgccaccctgcctctcttgccatgtgaccttgtatgagtatttcacttctcagagcctcattttccttatctgtacgtgaggctgataataataaggaattctagttcctagggtggttgtgtggagtaaatgagaaacctgtatattagcaggactggttatatattaatttgcagggcccagaggaaaatgaaaatgcggggctccttgttcaaagtgattaagaatttctagatagtgtcagcagagcataaaataagtgtgaggcccttgtaagcatgagtcctgtgcagttgcacagggcagtgcccatgaagccaggcctgcatgtgagccacctagtaccctgcctggggttagcaccagccaaatctccaactttcctagggtcattttttttagacagagttttcactcttgttgtccaggctggagtgcaatggcgcaatcttggctctctgcaacctctgcctcctgggtttaagtgattctcttgcctcagcctcccaagtagcctggattacaggcatgcgccaccacggccagctaattttctgtatttagtagagacggggtttcaccatgttggtcaggctggtctcgaactcctgacctcaggtgatccacctgcctcagcctcccacagtgctgggattacaggcgtaagccaccacacccagccacatccttttcttttaagggctaaccagtttccctccagggcaaagtttaagggtaaattgcgcagctgcaatctagtcccttctgctgagtaacaaaccactctaatatttagtgacttaaaaccacagcagttgattgtttttcatgacgtgtgttagctgggtagttcctctactggtctcacctagactcgatcatgtagctacattcagctggtgacctggctgggctggaatgtccaagctggcctcacatgtctggcaggtggtgctggctgctggctggggcaccacagttctcctccatgtggcttctcatcctccagtaaaccacatcagcttccttaaattgtagcagatacaatccaggggacaaaaacaaaaacttcaagccttctggaagttgcacaacacagcacttcagttactgtctatctgtcaaagccagtcatgagccttgcctagattcaagagagaggtgatagactccctcattcaatgagaagcacgacaatgttttcaaggggatagggacccaggaagatgtgattcaatggggcacagtgcagcggttctccgactttagcccacatcataattatccagagggcctgttaacacacagccgatgggccccacccccagaaaactggagtcagtaggagtggagtggggcctgagaacttgtgtttcaaacaagttctcaggtgatgcagatgctgccagtctacggatccgactttgagagctggcagaggagttaagtgtccacacgtgagggcagtggtgctcaaccttgactgtacattagaaacaccagggcggcgataacaatcctgaagccagcagttaaatcagaagctgtggtggtacgactcagccttcagtgggttttttttagagcacccccaagagagtccagtgggcagccaagctaagaactgctactttagagttaggccatgtaggttcaagtgctggctacagtatgcacaagtttaggcaagttattctacctctccttgactcggtttcctctttgaaaatagggatgttcggccaggcgcggtggctcatgcctgtaatcccagcactttgggaggccgaggcgggcggatcacgaggtcaggagattgagaccatcctggctaacacggtgaaaccctgtctatactaaaaaatacaaaaaattagccgggtgtggtggcgggtgcctgtagtcccagctactcaggaggctgaggcaggagaatggtgtcaacccaggaggtggagcttgcagtgagccgagatcgtgccactgcactccagcctgggtgacagagtgagactccgtctcaaaaaaaaaaaaagaaaaagaaaatagagatggtagccaggtatggtggttcacacctgtaatcccagcactttgggaggccaaggcgggcggatcacctgaggtcaggagtttgagactagcctggccaacatggcgaaaccctctactaaaaatacaaaaagctaggcacagtggtgggcgcctgtaatcccagctactcagaaggctgaggcaggagaatcacttgaacctgggaggcggaagttgtagtgagccaagatcgtgccactgcacttcagcctgggtgacagagcaagactccagcaaaaaaaaaaaaaagaaagaaaatggggatggcaatagtttctaatttgtatggttgttctgagaattaaaagttaatatgtataaaagtcttaaaatagtgctggcactattatgtaatgaaagtactacgtaaaagtcagctcttgaatacgtattagtggtaaagaagagatcaaggcattgaaggcattgtacggtctgggtacagtggctcacgcctgtaatcccaacactttgggaggcagaagctagtggattgcttgagttcaggagcttgagaccagcctggggaacatggcaaaacctggtctctacaaaaaatataaaaatcagccaggtgtagtggtgcatgcccgtggtcccagctactcgggagaatggcttgagcccaggaggttgaagccgcagtgagcccagatcatgccactgcactcaagcctgggtgacagagcgagaccctgtctcaaaacaacaacaatgcattgtacaatgatatggtctctagcatagcaaactttgctgtagtttaaccctgtaaatcattggaaagtttatcaaataccttaaatgcttttgcaacttattcattccctggttatttgggtaaacaagtacagcgaacagttggatgaactttatctgaactattatcactgagctgttgggggaaattccgtcttttccaaatctgtactgcgatatagtcttattattaaagggactttaacaaaaaataggtgtggcttcctgggaggcctctttatatctggcactgcaaagacgaccccaccaaaaagcagctgctcttcatgagtcacagagatagtgccttgctgactatacattaatgacctgagcagtcctttttgactcagattttgtggatttgaaataatcaacgtgccattcatgtgagcaagaactgaaagttgtacagatgttaggatgctaagtcttgtaacattaagttcattcttaacattctgtttattagaacagtgttccccaaacttttcagatcattagaatcacctaggtttcttcctgaacatgctgaaaccttggttctacctcacacatactcaatcagtacctacagggaaagggtctgggattctgttttgaacaagtaccttcagtgatctcagtgtcatcaggtaaatttaggaaatagccttaattttttttttttttttttttgagacagagtctcactctgttgcccagactagagtacagtggtgcaaactcggctcactgcagtctctgcctcccgggttcaagcaattcttctgccttagcctccccagtggctgggattacaggcgtgcaccaccacacccactgatttttgtagttttagtagagatggagtttcaccatgttggccaagctggtcttgaactgctgacctcaagtgatccgcccacctgggcctcccaaagtgctggaattacaagcatgagccactatgcctggccatggaaatagcattaaattaatatttatgtaatacatatagacagatggaagaggcaatagggaagctgggggctataggttctaatgaccactcaagagcgggtgtttgtaaactatagcccacagagcaaatctagcctactgcctgttttataaagttttgttaaaatacaatatgcctattttaaaaacatgttttctatgggtgcttttgtactataatgtcagagttggcattattatgacagagaccatatgatgcacaaagccgaaaatatttactatctgatcttttacaaaaaaacagtttactgacccctggataagagatatgatttcagatgtgggcaaacttggaactaatagttatgagctcataataaaaaataaaccaacaagaaaggaggggagtcagtagatacaatcaactggaaaatccaaatccccaagagtggcaatttgagactataaaataagtataagattataaagatttgctagaaaaaatatataaatcttgctgaaagaaaaaggcaattcattgcagaaaaaggtagggggggaaattcagatttgaaaaaacttaagtgcatcctctagaaatgaaagcaattgaatcaatgtactaaagcagtgcttctcaaacttcagtgagcatcacagtcacctgcagagtttggtaaaacacagattcctgggccccactctgttaaatgggtcttgggtgaagcccatgaatttgcatttctaataagctcccaggtgatgctgatatttctgatccatggaccatattttaggtatgagttaaacagcagatagacacagctggagaagtaattagtcaactggaagacagatctgggagatagaatgcagtagagagatagggataggaaatgtggaaaagcagttaagagacaaggacagaatgagaaggtccaacctaagtct

SEQ ID NO: 63053 - DNA, 917 bp, Homo sapiens
ccatgtactaatagcaattgtaagattcaacctcagagctgaatccagattattctcactacttcagcaattgatttaagaaattactaacagtgagagcttgctatgtgtaatgacactggtttagcactttgcatgtattatctcagcttattttcacaccaacccaatgaaaaaatatttttattttccccattttacagatgagaaaattgaggctcagggagtttaaggaacctgcccaaggctccttagtttgtaatttgtggagctgagattcagcctcaggctatcggatccagggttggcttttaaaaccaatatggtaccctgtactagcttccatcagggtaatctataattaggagaatctgatggtgtcatgggcatttttttaaaaaaactgacataaataatgtataccctatttatgttcccgtcttgaaggagcaaatagagactccacacagtacttttattttaaaaataaaagtagaaagctcttagtaagggaggctttgtttggcaatgaaattgtttatgtgttaaacattaaactgcattccatggtatttgctgattggcacaactactgccattgaaattgattccctaatcatgatgataatgactgggattagcccagttcaatgggtgcgtgctttccccagggctcacaaaagccttctctagagatccaggcttccgtggtaatgaactaacaaggctgctgtattctctatgggtaaatagcagtcctcacttcaaaatgaaggaaattaaggaaaagatgaaagggtctctggccagacagagcaaaatcacgctaaactggtcagcagaaccctatgaacaactgcaggcttccagaatgatgaggaaatggatgtttctgtttttgttgttgttgttgttga

SEQ ID NO: 63054 - DNA, 1090 bp, Homo sapiens
atttttgtatttttagtagagacggggtttcaccatgttggctaggctggtctcgaactcctgacctcaggtgatccacctgcctcggcctcttaaagtgctggaattacaggcgtgagccatcatgcccagccttgtagaagtacctctataggattaattcctagaagtggaattgctgggtcaaaggacacccacatattaaatttagacagtgatcaccatactgtcatccaaaaatgttatattaatttatacttaatgctaccaacccactgtgggacttttgatggatgatgtcatctttgtgctacattttctctacttgtaaaatgagaattcttatgccttagtaataattctaaatgaggtcattgttttgataggaccatggctccttcagaagaaatatatctgtaaatctaaggtgtcattttcattttcatttttttctttcatagttcctcaaaacttagttccttctccattttaacctgaaaaataaataatttgattaagagacatctagtgacttcatgccttggcactgccttcaccaattctatttttaggactcaccagtgtctggggatgtttggatgacatcaacttttacacatatcttttcatttaaaatttgcaaaagtctgcacagctatgacatgacagaagcctcccactgcaatgcctgaagatccctactgttctgagattaaaaaataaaagatgatttcctttcttaatgatttgccctaaaagttcaagatcctgtattgaagtttatgcgaatgaccacttccaacttcatgagcttcatctctgatgtgatctcggctcactgcaacctccgcctcccgggttcaagtgattctcctgcctcagcctcccgagtagctgggactacaggcgcacgccaccacgcctggctaatttttgtatttttagtagagatggggtttcaccatgttggccaggatgctcttgatctcttgactttgtgatccgcccgccctggcctcccaaagtgctgagattacaggcgttagccaccgtgcctggctgatgcggaatgcttttgaaggatatagat

SEQ ID NO: 63055 - DNA, 3571 bp, Homo sapiens
tttcttgaaataacatattaatccagtaaagattctgagtttatctttctaacaaaactgcctgtcttgctgcctgtgcccccaaatggcggctccttcctcctggaatctccttcccttcccaactcagctgacccctttccaggcttagagcagggagcagatagcaaactgttcactccacagtcttagataccaaactggccgggagggcttccaaacgacagatgccaatttgcattctatttacatgtcatttgcatgcagtttaactcaaagcctggatcctccgcaagcccgagtccccaccgaagaaacttctgaattaagaaggttccttggctgaagtgccggggtttttgtgccagatccctcccccacttctcttgtctttgcggggtcccccagggctttctgggctctgttcaggtgccccccggcctggtgcagttgggcggccaatgtggcgcgtgggctggggccccaggcggggacgccgctgcccgccacactccaggggcctttgtccgcgctccaaggagccgcccccttagcgaacgggggacggaaagggaggactggctaggcctgggtgtgacagagcaaggacggaggagtgaacccgctgcacgggggagatttctggggcaaggtcgttggccccttcccaggctgttcaaccggctgcccggggccaaggcgggtgcgggctcctcccgcgcgctcccttttcggcctaagcgctagggaccccgggatgtgtggggtccttgtggggctggaagcctgtgtcccccaaggagaggggaccgagaacaggtctagtccttatctccagcctagccgcctcttccagaggtccaagtgccccctgtctggaagggaaacgccactgccccccccgccattgtatgcagccgccccctcctccccacccctccccgtcattcgtccccagcccaggtctcagctctgccatctcccaccgccgtgtccccccctccccttgctgagtaatgcgcactcaagccggctgcgggcttgacccccagcccccgcgacaggtgcggctgttcacccccaaagtccagcccttgtgcccccggctgcgtctgccctgtccacagtcagcccccaacgcggccccaggaccagcccgcagctcctcacacatgacgagtcactaggacacggctgggctcctttaccctcccagctgcccttcacctgtggtcgcccccacaccctcctgggagacttggatctctacctggtccgggcacagtctccctccccccgtaaaggtccccagatcctcccctcccccgcccacccctctacggctctgctctcgtcgcaccgtggttcccctcgcccagattccacatctcccccagcaataaactccctggcttgggttgggggggcgcttagaaaaacacaagaagcggaccccccaattctcccaaatccacggcgggaaaagtttctggggtccccacagcgtcctccactgcatcggcgcagctcgcacttaccgacccccgcggccccgcagcgccgacgctccagctggccttcggcccgagtcacatctctgcggcgcggccgcggcccccgctccacgcacgcccgcctgcgggtccagcttcactgcagcgcctgccagagtcgctgccgcgcgaggcgccccctggcccggcccgcgctgctgcagcggccgcggccccgcccccgcccccgcccccggccggccccgcccccgggcctccgagccccacccccggtcccgccggcggttccgcgcggggctaggcgccgtctgcatgcacccccggagcccaagctcgtagcttctagcccggatctcagagacgattcccccgacctcgtgcccccaattcggggacattccccccacaacgtcagtgcgcccgtaagcagtccagacgagccgggcaactccccagggtagatccatttgcgggaacactcccctagccaatacacttaccgagggaggtatcgcgacccaggggtcccagcgcggaagccttcctgcccccaggccacgctccaaggggggttcataagcagtaacttccccgaaacacaccagcaccaggtccaggacgcagagaggatcgatcccgcccggtgcctctcgaagtcaccaacgccccggtatacacctaggcgcacacacaccgctaggcctcctccaggcaggttcctcctggacacactcttctctctcctcactgcccaactcccagatgtcgttgtccgtttacgcacactgggaccaacacccgcttccttggcccctcgaaacacacacgtccagtcggtgcacccctcacgtgggtccctacgcaggatcgccaccacccctaccgcacacatcacccacgtacgcacatgtccactgcccttcagggctcacacactcagcggcccgggccactggccgtgcgctccgcagacggtcagggcacagcccggacgcgtgtccgctgggcggccgtgggacctgcttgaaggaggggtccggggcagccgtctctgagtccccctcaccccgtcctagtcctcaggcctctccgaggtcgcattgcttcgaccaggcctgggagctgcgctccggcaccccatatggggctggttccctgggtgaccttcagaccatcaaaccctggcagtctcaggtggccccccgccaaagccagaaacagacctttgagcagcatcccttccctgcactccagattctcagggtgagatttcctttctccctccgcggtgcgccccccaatctctacccccgtcgccgcaaccatcccagccacataagaccaaaagggataggacggacccctgctcccctctcccgggggctgcaggaaggggagatgcagaacacctccttctgggaatagtggcagcccctgatctttggggaccgtggcccttccagatactcccatccctccctgccagcctcccagttccggtccggttaggccacatcccccttgggcacgcatctctgggataccttttattatattcaagggaaaatggaaaggaagaaccataatggcagtttttcgccccactcctggtttatttgcatggatcctcagagcccagaacagttccaggcacagtaggcgctcattaaatgtttgcgggacgacccaaagtgtgttcccgccagactgcgcaattggaaagtggatgggcactgtcacctggtggcagctcttggaactgacgccgagatccttttgtcaacgtgggcaagttcactttcgtgagccacatgtcctcaacgtctgcaaaatggagatctttttcatcgcacatgcctattggggttgttgtgaaggtctaacacgtgctaacatataaagtgcttcacgcagggtctggcatgtggaaaatccttaatatgagctgattaacattgcagttacggttatattccctttcccacttgttttacagaggaccctgactgtgatggtcagtttcactttgggtgatgataccacagggagcacagagt

SEQ ID NO: 63056 - DNA, 1298 bp, Homo sapiens
attgggtagaaagaacatgactaaggtgatgggtgcactaaaatctcagacctcacctctacacaattcatccctgtaaccaaaagccacttgtacccccaaagctattgaaataaacaaaaacaaaccactcaatagcatagacacgatgatcacatttatggaattgttaaaaagtgtatgcccagggcaaaagaagtctagagggaaattttccaaactattaaaattttttgttttaaaaaaattctgtggtcagaaattatggagacagagaggaagcatgagagctcatgagcgccatctggtggaacgtcctggagctaacaggccaaattgagcccctgcagttgccctgcatgtaattggacaggggactttcgcaggtaaggaaaaccaggtgtggggagggcggggataggggaggttgtggtgttcccctgagtccaccctcttgtctcgaagagacctggaactctccattaagagatctgatctggacgccttggcccctcacgttgctgggcagtggggagggactggggaagcccttttctggaagcggtatcagggagctggcacgtgaccttggcagtgcaagaggcttttctggctaaacggaggggactaaaaggcgcccaagtgtgcctttcttcctcctgataacattgtgaggctgcaggttcctcgctaccccatgactgaggaaggggggctgagccagggcagggggtcattgattgcctttcaagccagaacattttatctttttcactgccgcccacccccgtggtccatctggagcacttggagaaagtgcaaatgacctctgctgcagagggcaagttccaagtccaacagagaggtcttttgtaaagtgccgctcagaaagcagggccccgggacagctggcgagggccccgttgctggtcagcacgcctgctcctgcaatgggatcggaaagtgaatgatcgctttcattaaactcccggtcaatggaccggaagcggggactttgtgcctccctcctggatcgatgcccctccactgcctgctttgtcaccgtcatcgccttcgatatcccctgatatcccctatccatcatcaccagcatgcactggccaattgctggctgctctggtccatggggctctccccggcttcctcgtggatgtggccatgctgggctcaggattgctgattgacatagaatccgaatctgagtttctgagggcggaagctcagggcaagagaaacacttggaatgattgtccagatggtaaagcaaattttagagg

SEQ ID NO: 63057 - DNA, 2181 bp, Homo sapiens
aggtagagcttggggtgagccaagatcgcgccactgcactccagcctgggccacagagggagactccgtctcaaaacaaacaaacaaacaaaaaaaaaaacccgtcataatcttcctgttgctttttccgattagatggcgacttgaatttttagggaatacatccaccagtttgggcacacccaccaggcacgacagttgaggtctgatcttccagccactgtgagtactgagaaaacttggcagggggccactctcactggctcaatgcaccctgaccactggaagccactgtgtcagctgctgggttctggctctgcccactcttggctgcatttggggctgaagttccctgtgggaggctgttttctgagggagctgagtgtttacagccactcagccctgctctgctcagctgaagcagaaaacagagaccttttgcattactttggttcaagagcaaggtaatttggaaagaaatttttcagacgaaggtatcagctgcctctgaggcctttgctgattaaatcaagaagtgacatctgaaatggtgtcggggaatgggaaggaggcctggggattctaaattatcagctgtttaggtggctgaggaatccaggggtgggagactgaggaaaaggactggggcagagctcagttcaggagaggtgaggggcgggagaggtgaggggcgggagaggtgaggggcgggagaggtgaggggcgggagaggtgggtcagagaaaggaagtctctgaggctgcaggcctaggcctggtggccactgcagaggctggggcctatgtttttccaggaagtgaaacctgaaagtcacttttcccctttaagcctcattttctttatctttaaatggagaaaataacatttacagcatagagttgttataaagatttcatgaaataatgcctctaagcactcttaaaatgcttggtacacagtaggccttcaatagactgaagctgttatggtttttcttgttgtgccacgttattattgttggttgttattaccatattttgttattattattactaagaggaatttaatgcaaggaaactgaaactgaggtcacacgcagctcccgggccagtgcctctcaaactttaacatgcatatgactcatctgaagatcccgttaacttgcagattctaattctacatatgtagggtggggtcccatctgctggtcccaagatcacactttgagtagcaagacactaaaactgggctgggcacagtggctcacatctgtaatcccagcacttgggaggccgagttgggaggatcacttgaggccaggggttcaagccctgcctgggcaacatagtgagatcctgtttctacaaaaaaactttttaaaagttagccacacatggtggctagtgcctgtagtcccagctactaggaagcctggggtggaaggactgcttgagtttgaggctgcagtgagctatgatggcaccaccgtactctagcctgggcagcagagtgagactctgtctcaaaaacaacaataataaaaattttaaaaataataaaattaaataaaaaaattaaaaagacactaaaagcccatcatgccatacagcagccacttgtggcttttgagcacttgaagtgtggctagtccaaattgacatgtgtttgtaagggtaaagtctatttcagattgtgaggacttagtaccaaaaaaaacaaaaaataaataaaagtatgtaaaatatctctttaacaatttattcttctattgactaggaattgaaatggtcatactttggctctatctggttaaataaaatgttttattataataaatctcacctgcttctacttttcttaatggaagtactagaacattgtaaattgcacaggtggctcacgttctatttctgttggacagtgctgccctagagctgtcttcagctttgcaaggtcagttcaggattggccaaagcctttttgagggattccttttgaagtattgaggtttgagaagtgggatctgagttctgacctcagacccagatacccacaagtcagtgagaggtcaaaaggacagacctcggggtcagaggagagaaatgaccatcacacagcagaactgagactgaaggtggagagtttattctacaagtcagtaaggatcacagtcaccatcag

SEQ ID NO: 63058 - DNA, 684 bp, Homo sapiens
cctcccaggttcaagtgatcttcctgccccagcaccccccccagtagctgggattacaggcacatgtcaccacacctggctaatttttgtatttttagtagagacagggttttgccttgttggccaggctggaggtcttaaactcctgaccttaggtgatccacccaccccggctcccaaagtgctgggattacaggcgtgagtcaccgtgcccggctaggagaaatctttctgtgggtcccagaggaatgcatattatgggaaagatcagctaacaggcagacttaggtacttttcactggcttacatccaacataatcctaaagcacaacagttaccttttgaaagttagtgcaacattagcctgcattctcagaagcatcaagaccacaggagagattctcaaagtctggttcttggactgcttgcaactgtatcatctgagattcttgtttaaaatatagatttgtagacctaaagtcagacttaccaaatcatgattactgggaatgcagcccagagaatctgcattttagccagccattcttggccaagtgattcccctctaaaatccaaagccattaatgtataataagggaggtgtggagtcccattgatgtgctgaagaaatcatacctcaaacgtatgcctagttctgcatgccgtgagttaactgggactgtg

SEQ ID NO: 63059 - DNA, 903 bp, Homo sapiens
gtgagaagatgactgtttcaaaggctgtctgactgactggctgagctaattagaggcttactgagaggctggatggctgagaggctggctaggaggttgtttgagacgctgggtgagaaaatgactgtttcaaaggccatctgactgactggctgagttagagtcttactgagaggctggctggctgagaggcttgctgagaggcaggatggcagacagcctggctgagagctggctgcctaaaaggtcggctgagaggctgcctgagaagcttgcttgctgagaggccagctggcaggttggctggctgagaggctggcaaaaagggcagctgtgagtctggccaagaggctggcagtctggctggcagtctggctggctgagaggttgactggagggctaaatgaaagactggctgcatggccaaatggctggctgggaggcaggcagagtggcaagttgagtgaatggcttgctgagagcctggctgtgaggttgccaggctgagaggcttgctgagagtatggctggcttagtacctgggagaaagtctggatgggagggtggctggctggggaactggccaaggggccacctgggaggctggccaatgagaggccagctgggagggtagcagagaggctggatgaagggtggctgcctgagaggcttgctcgctgagagtctggctgactagctgtattaaaggttggctgtgtggtttgctgggggcctggtagaggggctggttgtgaggctgcatgacaggccttctggctgataggctggcaggctggcagtctggccaagagacttgctgggtggcttgccgagtggatggctaagaggctggttgagaggctggctggggaggccagcagagaggtggctggttggctggct

SEQ ID NO: 63060 - DNA, 785 bp, Homo sapiens
cattagactacagcataagatgtgactttgctgtaatgtttgccttttggggttgaaataaagagctttaaaaactcaagtattactccaagaaaacaaacccagcatggtttgtgtgtataatgtgagacatgactgaaggcttacagaatcagagttttggaggcagaaggggcctttcttatctccagccttccttcactttgcccccaggtgtctctgaaggcacccagtccctgggagatggaaagagtttgctcccaaagctacctataagccatagttggcaattccatttttcttggggtcttaagttttaccttaaaaattcattttaacctttcattcaactacttcatatatttttaatagaaaaataagactttaggtttcccacctacaaggaatatgtaacacaataaccccctgactttacaaatctcctttgcacagtcccaggggtgagtatattttaatgagaggaacatggaaggttgacttgctgaaaaatgtgaaattttacagataaagcaactgagatcaagagagggcaaggaactaggtcagggtcacatagcaaaacagtgacataagtgaggtttctgacaactgacttgatgaccttcctaccactggctgcttgtctctcaccacttgggagtgaatggcattcttctacctgtggaacaggaattaaaagaaattaaagaatgtgtaagcaaaaactcagttgtatgtaagaaaacccagttgccccagaggaagagaaagaggtggagtccttt

SEQ ID NO: 63061 - DNA, 1720 bp, Homo sapiens
cactagccagtcttaaagtattctcttttttatctagctcagcagcatcaaataatgtgcccatgtccgagtccccaagctagtagaggatgagccgtgaatttaaattccctctgtattacccttcttcatttaatccctcagtgtgcgtgtgtgtattggtccagattctaagccagtaatatgatttccaaacactaagactttaggtgatattggtaaaagtttttacgttctaaaatgtattttaagtgcagtaactagcattagtagtaaacctattatttcagaaatattattgcttcaggtaaacacattattactccaacttcacgaggctgtcatgaaaaatgtgtttctgaaagagcttcagcacaccgcctggccctcaatgagcaatccttaagtgggaggtaggccgggctcagtggctcgcgcctgtaatctcagcaccttgagaggcagagacgggaggatcgcttgagtgtagggtttaggactaccctgggccaaacagtgagaccccttatctacaatttacaaaacttagccgagagtggtggcgcgcactcatagtcccagctactctggaggctgagacaggagaagtcgaggcttccctgagctatcatcacgccactgcactccagcctcggcaacagagcgagaccctgtctcacaaaaataaaaataaaagtaatgggagctaccgtggttactgatggcaagaaaaggtgcaagcacttcaagcacaaaaccgatagcaccgaagtctgcgagcgtctcaggactagggacggaaacgccggcgaggccacgcccctacagccgtcacgccgacgacccgaggcgcgcatgcccataccagcagccatccctccacccttccctcctcccgcaaggcctggcagccggcccgcccgcccaccccgggaccggtaccttttctggcccatacatgtcgtcgccgtattcgttgaggaggctgtaggcctcctccacgcacttgcgctcgttcatattgcaggtgatgaggatgccctgtagcccgggctctagctgacggggcccgccagcgtcgcagcgccgagcgcgcttggccagcacatactgagccttgcctttgcgcttcccgccgccaggctgagtagtctgctgggcaggggccgccatggtgtgcgcaaactgagaggaaagagaaacgtttctccgctgctgttggcgtcctcgtctatcgccggcgcgaactggtgacgtcggatatgagcgacggcctcccctagccggcctcgaagcctcattccgtgctgcgccaggtcctaaggccggtctgcaatcgtgaaaggggtggagtgatacccgcccaagccccgcctcctgccccgcctcccgactgcaacctgaatccagtagaggcagcatagcagccattctggaagtggtgtcggtggctcctcaagcccttgaagctggctccagccatatagcttcttccacccaaccttggtacctgttcctccagccttccctataattctgccagctactgtggaggaaaagttaaatattaaatttgaactcaattgaacgtggacacaatggtcaagtcccgtaacaggttgcatgagccccttgaggcattcattcatccagcactgttacagataactctgtacctgtacttgagttattgaaaaacagacaatcacagaaacaagtt

SEQ ID NO: 63062 - DNA, 776 bp, Homo sapiens
aggagaatgggctgtggatcagaggaccctgtgccagatcatacaactccttgcagttcatgtaaggactcggattttacctggagtggaaaaagaagcactgaaagatttgagcaggggagtaacctgatagcgtttatgtttagtcctgccacttcgacagataaacgcaccaatgggcttgatgagatttaggccaacccataaccgcccctcaacttctttcctttcaatttcaaaactcctctatggcttcctccatctgttcttccttctgagaagtgctctctctgcccctttacagaactaaccacttcggcaactccttggacactttccttcttgttaataatttgctttctccgcccctcaaaagcttgctgtttctgtaaatcattacctgtaagaggaaccgctgggagtcctgtaaactttagcccagagcttggctcctcctccagaatgtctccaccaatcaaggaaagtgttttgggccagtcttgctcctccggattgtcagactgctcctccctcttctttagactgccacgaggaaaaagcagatgtgagaactcaaggttcagggctgctcttctaagaaacaagtctgccataatctccatctgtgttggaatctgttaactagtgagtacctcatctcccctcctgtgtaagatttcctgaactggcacatctgttttttgagcaaagataacaaacagatgaacaaaaccaacaatcaaaaatgctgtcattaaagtcttgggcagccaaag

SEQ ID NO: 63063 - DNA, 1089 bp, Homo sapiens
agtgagccgagatcgcgccactgcactccagcctgggcgacagagcgagactccgtctcaaaaaaaaaaaaaaaaaaaaaaaaaaaaacagggaccggtagttccctctgtacccaatccccaatgccaaacagaatgacattgttagacttaaggtcttaacctgcagggcaactgggattcagagtgattttagttctgttcttaagagcagccttttctcctaaagcctgccaagaaatttttgttaattcttcccaggaacataacagacaaggcccctgctctggtagaacttacatcacagtgcaaagatcagcaaactgtagcccatgggtcaaatccagccctctgcctgtttttgtatagcctttgaaccaagaatggtttttaaattttttaatggttgaaaaaataactaaaagaggaacactaattcatgacacatgaaaattaaatgaaattctagtgtcagtaccataaataaggttttattagaacacagccatgccaaaatttatttatgtattgtcaatggctgctctctcaatggcagagttaaatacctgcagcagagaccatatggcccacaaagcctcaaatatttagtgtctggcccttcacagaaaaagtttgctgacccctattctagtagagagtaatatgcttggcaccatgataagcattttgcatacagtatcccattcagtcttcaggacaaatctctgatggaggttctattagtcgctccattggtaaaatgtgaaactgaggttcagagtgattaataattcaaataaggtcatgcagttcataagaggcaaaactgggagaccatatcacatgaccatatgactcagtagccagtgtatttaaccatcatgccatagactggtgcttttcacacttgaatgtacataccagtcacctgggatcttgttaaaatgtcaacatctaccaattcagtagatctagagtggggcctgagaatgtgcatttctaacaagcttctaggtgataaagatgatgatggtggttcacaaatcacagcctctaaatcagtgattctcaaccatggctgctgcacat

SEQ ID NO: 63064 - DNA, 1802 bp, Homo sapiens
tctcagcattccacaagttacttccttcttcctttgttctcctctgcctttgcctcttttaaaaagttctatgttgctagtcagtcgggacaaatacagaatgtgaggtcccgttccagccaaaggaaaccggacacagcagtagggtggacgcgccacgttataaatgaccctgtctcctttgttcagtgtactctcctggcaaaactgctggcgagtgtaccctttctgcaggaagtaaaaatggccttactaaataaattaaatttaagtttaagttctatttctttacagcaccgaggaacgagcatttcgaacaggttgaacaccttgacagattcagtgtgtggcctgcctgagacctccaaccagtctgcagggcactgtcacgtccagtcgtttcccaaggcctaaaataggcaggcactggctcaaggccacacagtcaaggccccagggttcgtccgcctcgggctcctgtcaccctcgggtagaaggtggcccaaggctgaagaccgaggtccagggaggcgcctttccaaccgtgccagagagggcaggtcgcagacgccggggctgcggggaatagaggccctcaccgcagatgccacctgccgtgccctgctctgcggccaacgccagcgctggacccggagctacccgcccccgacccggaactccctcgagtaccgcgcgagccgcttggtcgccattcccgacactccttgcttttccaagtccagctgccggaagtcgctcgacttctacttccggtccgttcaaaaagcccgcgaggctgaggggcggttgttgttggcagctgtggctaaggaggggagaacctctgctccccgcccgtcttctcttctgcgtttcccgggctagggggcgtggggagtggttttaggcggcgaagccgctcggcagcaccttccttctttgccaggcagacgcccgttgtagccgttggggaaccgttgagaatccggtaaccgatgcggacggtaaagccgtttgggttagagcggcgcgggtgtccagtccgcggaacggggagatcgttggcaccttcgcttttttaggggaacggggatagttcggtaaactgaattgagaagcggatccgagggaggttgaaagctgtcaagcccgtgtagctctcccgctaggaggcggcacgcgggggaataggggcgctggagtttccccagctctacctcatctttctccacagccatggagccagagagggaagggaccgagagacaccccaggaaggtcagggaaagcaggcaggccccaaataagctggtcggggcagctgaggcgatgaaagccggttgggatctcgaggagagtcagcccgaggccaaggtgagcaacggggatcccgagcaggcggccctaggcggtttggagctcccggaccctcgcccaaccgccgtcgggggcactggattcgggcgggctctccgccctggcctctccgaacctgatccctgatcattaaaatgggaatgagtgtaataccaccttcctgcaacaaggctgtcattggctgtcactgggatagtgagtcggccgagtgcggtggctcatgcctgtaattccagcactttgggaggccgaggcgggcggatcacgaggtcaggagttcgagaccagccttgtcaacatggagaaatccccgtctctaccaaaaacacacacacaaaattagccaggcgtggtagtgggtgactgtaatcccacctacttgggaggctgaggcaggagaatcgctagaacccaggaaccagagg

SEQ ID NO: 63065 - DNA, 1786 bp, Homo sapiens
acctgcaaggctatatgccaaaacgttaatagtatttatctatggctagtgccattgacaaatcaggttttaacaaatgcttttctgttgtagactcgattttttttaacattcaacatatattgcttttataattggaaaataattcttaccacctgctgtcaggagaagaaaagaagagaaagataattctacttaaaattaactcttagggttgggcagttggagcagtgtttaatcttataaatgtagcttcataagatctggtcctatatgaaagtttaaatgtagcttctgtaagatctggccctatgtggaaccagaactgaagagcttgacttgggatcagacaccgcaacttgattcaagtcccttcatcaggaggaaagttccctaggtgaattgccaacttccgctgcaaggccctgagaacaacttgaaactgacagtgttgttgggttccttcctgcccagctgagctccaaagctgtgagagcttagctgctgtttacctcttgaggctcaagtcctgagagataaattaagtgtctgcctcggatatgaagaggcctgggttggagcttcacctcccacacacacctgagtattttggggcaagtcacttaacctcatttgaggctatttccacagctgtataaaataaggaaataactattttgattattgagacatttgtggaaaataacacagtaatgcactatgtgtgaattaatttccctctctgggcctgtttcctcacctttaaaataggggaaattagtacttcataaggttatgaggattaaactaggaaaagtcaagattgagtgctgaataaatgacatactattttactagggatcatctccctgtaccaagagcactccacttgctctcaagaatagccaaggccatctttttcttaggaaaaagggtaggggtggaggtttccccagggatccaactccagaactctgcagagatgggcctgcactacaaggcctctgagacttcagtctgcacactctgttctttagcctgatgctccaccttttggaagccaaagctgccaacttggcctcttgcaaaacacacattccattcataagtgcgtttgtgcatttttcctcccacacccttctaggcagccagcgcagagctgccaaggcagctgctggagaagcagcttcttatgggggaaaagcaactccaagggcttttacagaactcatggtttaggctttgaacacattactcccattttctggtctccttgaccatagggggggttgttcatttctttttgcccccctttttgtaaataacctcttccctattaaaaggaaacctattaatgaaaatttgaaaaatacagaaaaatttaaatcacaactgatcccaccatcaacagtcaatgactgccaatattttataatcgatcaactttttccatgatgatagaaattctattattcaaaagcagagttttaatagctgtgtaatattctagcattgatgtatgccataatttctaaaacagtcccttttgttgaccttggaagttgttcccaaatgatgctgccagtgatatccttgcacatacatccttgggagatatttcttttaggaaaagtgcctaagtgaaattattgggttaaagagtacgaacacatgcttttaactccagaaaggattttactgtttactagcatagatttctttcaaatttttgccatttaaaatttttcattgtatatttaatgtctgcttatttgaatacccttta

SEQ ID NO: 63066 - DNA, 2672 bp, Homo sapiens
gggtctacttgagggtagagggtggagggtggtaggagggagaggagcagaaaagataattactgggctctggacttaacacctgggtgatgaaataatatgtacaacaaacccccatgacacatgtttacctgtgtaacaaaccttgacatgtacccccaaacctaaaataaaagctaaaaaaaaaaagttaccaaaaataaataaataaaaatgctcaggatattcagaaaaaaagaaaaaactgaaaaaagtgggaaaaaaatagaaaaacaaaagaaggacagatttacccaaatacaatctttaaatggtaggataattgctagatgaaaaagaaaagtttgcactgatacataacaaactcgtcatggtggtttattaattatttatataatttaaaagtggttttttaaacaaattgctagacatttctgagccagaagcgaggtgatttctctaagatgactctggctacttaggactcttattcctaccttcaactggtttgttggaaaatccatgtacaatttagtatttataaaactttgccaactgctataataatggcagccactgaaattacgttgttaatgaagtgtggaccaggagccagaagtgtagcaggaaacagacactaaacagaagtcaacgtcagtcacccgggcctccccaggtctagggagctttcatggacctctatgatccaaactaaaagatctttgaaaaccggcagtgggacagaaggtgttttttatgaaaggctggagctttaaactttgcctaaaatacttggcttcctccaaatagtgcctggataaattgggggtcgtcttcaagaggaattctctctgaggataagctctgagtatacagtaagtttaaaatgaagagcacaatcattcctgtagttattagagattagtcatatcaaggcctgtccccttctccacccgcaaagagagcaatgacaaaaatacatgtccaaacatgccctcaaagacttgtagttttacttaggcttcaaaaatacactgaagctcttataagggcttttggtatggaaaacaaccatcctaagtaagttttttaaaagactttttatgctttaagactacagctagtaagccataagtacaactcattacaatttcaaatggcaaggggttaattcttggaagaccatggtacaagggaagcaactgtgcgagctgaattatctcaaaacaaggactgtaccatgtggagggcctggtttccagatttgtgttcctaaagactagaatgctgaaagaaacaaaaggcccaaacttacacaaaccccacatgctcacagactggcaactctaattcccaggcacgctgactcaccagggtttactgctcagctcctgctgctgagtgaggcatgggcacccagcgagataagaggatttcctggcctccatctgacccacctaccccaggccactcaccccgcccccactggacagatgcttcatcctagcagcttcctccaaatcctggcgccaaggccttcaggtagggacagaacagatggggctcccaaagaggccctaatcccattgagccaaccagccctccatgtaagagtatcttttgactacctgacacagcagaaccagctgaaacctgaaagcttttaacatgaccagcagatgaaaaaaaggagaagaaaattagtttcaacagatgatcaatcagcaaatgccagaaggttggatcgttcttccactctggtctctttctttgaaatgcccccattccattgagtgttgaggcgagtggtggtctaaacccagaagaaaatatctccagatctggtaagtatggtcccccgattactctgattactgcccagtggtctaccttcttctgtgtctacccccttctctgggaaaatacttttgctctcccagagctttccccaggctccatcacagtgcccagccccatggcccaggctggcagcacttcaagtgttttaaagttgaaggtctcccgtagactcactagctgatggctaacagctaataatagcagtcatcaattattgagcacttgatacggtgccaggcactatgctaagcacttttggggacatgaactcacatatactcatcacagcctcatttaaaaacaaggaaactgaggctgaggaaagtaaattacccatgatcacacatctggctcaagataccatgacatttacccctaggctagattgctgagcccacccccagcaaagcatctagagagaacacatgacggaccggccccaagttcaggagtgacaccacagcaaccccagagcagcaaatctcaccatcagccactggagagagaacacatggtctgtgctcggtgctcaagaaggatctcctactcgctgccatgatccaggcaagcaccatgcacccaggctcagccccaccagacgtggaaacgagaattagtccagatgccctaaacgtgtgacgtttttgtccaccagcacagttaaaagctccagctctgaaaaggacgcccaactgcgccactggctaattgtttgaccctaatggaagcctgaatttcctcaatctgcaaaatgatatctgcctgatagagctcttgaaaggattcagtgaggaactgcagattaaaggtac

SEQ ID NO: 63067 - DNA, 1702 bp, Homo sapiens
gaaatcacttctgcctctcttttcagtcagggtgttatgtccaagggtttactgaagccacagccatgcactgcactctaggaagaccaaggggctcaccaactgggaacactccagtgaaaagcctcaggctgctggtctgaactgcatcttccccacctcaacaaataaaggcatcatatttaaggtgtctagagatgcaggagcaacagccagcagcttttttgaatactgcatactacttgctttaaatacgaattcaactgcttaaaacacaaggactcatggccagtgttacacctcttgagatgttataccactgttcacttgatgacagagtgacttttaacttggagggctgaagcacataccttatcaaagagggtaagtgatacagacaataaaggtcctccatctctttacagccaccagagacaatgaactttgtttcacatgactgcgagaaaggccaacaactaaagtcctcaacggggcccccaaagccagaggtacttgctgagaaagcaaagggcagattccacctccgctggctggcagacccacacattctgcttaaccatgtgaaacagccagctcttactctgcccgcccccaggcccagttatgatatttggggtagaaagagaatagcaacaccggtgacttttctaggaggctgttttataaaaacagagcttccaattttaggcctaaaattgaaaagaaaaatagccagaattagaagtctgttttaacacaatatattgaaaattacaagtttaaacactggtagctggagacggggtatcacactaccacatgacttctcagtgagtcataaaaaatagtaccggcttgtttaacagtgatcgtccaccagtgacagaattaagaagtccgcttgtgtcaaatgatggaaaaccaaactgatacccctcttgtgtttgtttcagcagtggcagaactgacacaaatgaattgcagcaacaatctacaagacaaacactgataaaccttttttgaggctggtcaaagaggaaatgtttgaaaccctgaatatgactcatttttcagaagtcagtttaacaggagaaaaaaaaatctctaaactattaataaatcactaactgaaatatttctggattgctaacatccaatcttgattagcatacctttgtgtcaaagcaaaagccaaatgcaggcatttaacaagtcactaccctttcagttaggagaatcgctctggtggaactagatgagaacaacaaaaattaatcttcaggcatagatggatactgtcatgataataagataataaagacctccccaaaggatttctgggtatcataaattatataacaaatccacttctgccaggcagccaagattaactcctattcacccaggttatgactcggtattgccaatgggcttattgaagtggaagtctcattatccaccactgctcagcaaaaggcacagtcatctttctcattgcaaatcaatttgctgacaccaactactcactgtaagagaagtcaacctaataatcttaaaaacaactttgacacttgtttcttccaggccaaaaacatattttaagaaccagaaaagaaaatgttccgtaatttctccctcccagtaagtccttaaaccgaattttttaagtgcctaagatgacattttattataatatacttta

SEQ ID NO: 63068 - DNA, 546 bp, Homo sapiens
ctcaaaaaaaaaaatttttgttctgttaaactgctatcataattgaaaattcttttgcttaagctggttgtatcagaagtattaaatactggagatctttagaactttctgttgagtgaatcaattgaagtactgtatgaaaatagcaaatatgcaaatcagaaaggggaggagcttaggccaaactgttcagaaggaaagaaaaacaggtttccttccaaatggggaaaaggcaactggaaagatttttacctgttgcacaactttttattatctctttctgctaggccaatcaacgattgagagctgtgaacttggaaaagcaaatgctctgataaattaagcaactccagctctttgactaggaaagttttaaagtcagagttaaagattaagtcttcaattaaacatttttatttttttacttgaagttgccatgaatattcaagtttctaacatcctaaaagggctttattttaggagtgaaaagattctggataaactaaaaggttattctaccatgagaagaccgcgataagtggtgct

SEQ ID NO: 63069 - DNA, 4720 bp, Homo sapiens
catattctgtttcagcccagtgtgacatggctcaagagggccaaatcaaggagtcttgattgggcctctcaagtggacggtctggtcaaggtgaggctgaaaagcagcacaccattagagatgaatgccctcagcagaaggcaaaagtaggttacatcccttggttacgtgccagcccaaagatgccgacacagtggaattgagccccacaatggtcatttatctaatgtaatccactgagtgaacttttagtaccaacctacacctcagctgagtgttattagtcatcagaaggatcagacaagagtggaactattgcaacataaactgcctccctacaaaagacaacttgaaacttagatcctgatggtcatcttggtagatggataagggcatattattaacacttgcccagtccttaaattcatacagagctggaaacaaaggaggattcgtatactagaacacattcagagaacttattatgcagttttaaacagcagtatataagacaaaataaagaaagaggtgtgtcctcaattgaacatcctgctgaaaatctgaacacccagcttgaaatttatctgccagaaaagacccaggtgaccactgcctcttcctctcccactcagcagagtgactttattatgatagtccaacagtacctgcaaaaacagtaagtgataagaccctagttaaggcgacagaattaatcaacaagcagcatcattttctacttcctactccttctggcaatttgtttgcctacctattctgagccccatatccacctctctgaccttatctccaactctcccccgtgttcactaagctctggctattactcacccaacccatcctctttccactacctcccacctaccctgaccctttcttcccattccctggaacttgacaagcgcattccagccagtttctgcaccagctgttccctgaacctggaaggatcttccccttttctttggatggctggctccttctttatacttaaagctcaacttaagtgtcacttcctcagaaagatcctctttgactgcatctacagttaagacactttcaatcacatcactcttattttcttcagcgcttgatcaaaatctggtttactgggatatatattatgtctctctctgtccccagctcccactccgatgtaagctccatgaaagggtgaaccttttgcttgtgttcacctgtgtacacccagtgcctgaaacactggctagcacttaggagtcaataaatgtttgttgaattaatgaactgtgaactttttagtcaatggcaaactaggttctaaatcagttaaagtgagaacagtagtcattcttctgttgtatttttgtgaaacatctaaacacgctgttactggtataatcaagcattaaatattctgttttttagggcccgaaagccctgaataggacttcctagcatcagatcttcctagcactatgcatatcaagctcagttacagaaggacaggacttacgggcactttctaatcaaaggactccgaaaatgtaggcactatctcttaaagttcttcagaaaacagtttcagattctacaaaagatttccgaagaatgtatcaacaccaaaaggaaaatcataacacttcactctgatatctgtctgagaggctagaagagtgctccttgattttttttaaaccaacagcatatcaacaaagaggccttctttccattctttgcttcaaataattttttcacatccgttattggtttgtattcgcccttaaaccaaaactaaacagatcacactgtctcatttaggacccccatacacaaagaatcagctacgtaaagatgaaaatcagcacaagctgaacgtgtcactgatgatttgtgtgtcacacataaatggagaaaaacataaaagagctattgtccaattgtagaaacaaaaaagtaatatggggttttctgttctctgaagtgcatcatgaaaagtgggtggagagaaacacagaaatccagaattagcctagcaaatcattttgggaagagctgacaacatgtaaattcctcacacataaagtatttcgagcaagagaccttgattcctgggctatgatgccattcaggattccttgcaaaggctctggaattccagtattcataaaagaaaatgctcattataatcggagcgtaagaggtactcccaacgtgacagcctgtatgaagtattacaaagcttacagttaagatctgggatagaggctgaacaccaaattcaaaagaggtaaccaaggcactaagtgccataaaggaggaaaggggaagaaaaaaaaatccactattgccactcagccacagagaattaaagtggaaaccaggggtgtgcatgggggaggatgaggggtgagaagtgcggggggtgtggtggaggaacaaacaatacatttgtcaccccgtcccacttcctatagaggatacaggcaaagcctccagcctcattacctcggacacagatggttatcgtttatagcaaaggtgcacaaaaaggccttcaggtctgagccccttaattccagggctgttaatgattaaagagaacgatgggggtggggagggaaatgagggcggagggagctgggagattcacccaccacctccccctagggctcctacctcacagcgctcacccaggacagaggaccagagtctgcaccccctccagggcagctccaaccccatatccccaggccctgggttgaggggtgctggcggtggggaggcagggacagtaggtaagttttctgagccctgcggctgacacgccacaggctcccctcacagcctcttctttcagaggtaccactccagacaacgcgctgacttccactcctccctttccacccccctttctcgaaggtacccaacccccgccccttcatctctcaatgcccccccgccttttcctcaactccccccctccccaaaactcacagctgctccagaggttcctccagtcaaaccctttctggaaacgacggcggcccggcgggtccaaaccacctaccatccccgctcgcgtttccaggctccctacccccgccgccgccgcctcttcttccaccactgccaccgcctcctcttcatctgcggcccaccggcggcggccgccccgaagccccgccccctccatcgcctcctgcatcatcacttccggtaaccccgccggccgccagctccaggagggagaatgggagaggggcaaggagggaacgagtggaagattgcgtcacgacgcacataaagacgtacgaagccgtcgccaagtaagggcaaagacctagcaacccggagggagctgggctggaccatttttttttcttgttttacgggaatggagcggggaggataatgaaagcgtaaaggaaaaatagggggaggaggagctcagcttattgttggatgcggcgggagatgggtagagtcagtcagtcgagactcccccagacctggaactggtgctcccacagaggtgggcccggtggtttggtccggcctggcctactggaccagcctgtgctcggtcggccacggctctgctgggctcctggcgccgcctcctcccagcccgccgcgggctgcgcgcttctgtgggtgggggaaggcaggactgacgcagagtgagtgtaggggatggaggcgccgactccaggcgcgggagactggcggggaaggggttggctccccacgggcagggatggtttggaggttgggctgcggcgttgccgggagacgggcctgtgtgaccccagcttcgcgggggcggctcggtgtcatcgccaccggcctcggggacctgcctcacggaagtggctcgcgcgtccaagaggggaggcctggtgtggggacgctcaggtgccggcgtggggccccctcggaggctgtgaatcttttggacccccgaatgtaaatgggagatggtaggggccggtccgggggcgagaggtgtctggctggggaacgttgacccacaccaggtcccgtacaggaacggagactccctaggaccgtgagagccagcttcgtaattctcttgctcttcaaacctgagagtagggtgttgctccgttaccttccattcgtgtgcaggagagagttaagtaaatcaataaagaaggtatcagcaagtgagaaatgccccccaaagaccggatgaggtgacagaagatggggggagggcccctcgaaatcgggtaaggtcgttcaaaggaggccacggttttgcggggatccgagacaatgggttttctgggtggagagaagagccaatgagaaggacttttaggttggaaacagccagaaggccatgtggctgaagcaaacagagccagggccggagtgccctgtgatgtagttggggaagtggcatgactgtagcagcgccttttagcccaaggcaggggtttggctaatgtgtaccttaagggttttaagaagggaagtgacctgacctgatttacatttttaaaaatccgctctgcctgctggatagagaagggtggaagtagttagacctgttaggagactgttgcactgtaagacaaaggagaggtgaagatagtgttgaaagggccggccgggcgcggtggctcacgcctataaacccagtactttgggaggcctaggcgggcggatcacgaggtcaggagatcgagatcat

SEQ ID NO: 63070 - DNA, 1763 bp, Homo sapiens
tggaaatattataaggtatttcagtccagtggacaaaccctaaccagccttaagaaaacttaagagtgagggttacatcatagctgtgtctcttacgctgttctggatgaaactgatgaggattcctccccaagtaacactgagtctccagttctttatcctgacacacactgctcttgaaagcatcctagtaagggttaattagtatttaacccttcaatgctctgggatcatcagttgggaagcttgtccagataccatcgtgtgtatctcaggatgagaacatacgttatcaatgaccattctgtgtgtgtaaatttattcttctaatacatatttgtcatgttccaactatgtgccagcctaggcatgtaatgtacaagacagtcccaaatctccccctgctctccccacctcctactccctgcaacacacacatggtggaaaaagaaaggtaagtcatgcaaaattatgatagagtaggatgaacattatgacaggggtatgccagaggtgccaggagtgcacatagccgggacactgacccagccccagtgtgaaaagggcacccgtccagaagtgatggaagtcaaaaggtggaagcagcaaataggcaaagaaagggtatttcagttgtatgaagtagagaggcttcctatggcaaaaagagggacattgcacatacagaagaccatgatctcatttgggtggagtttatgattccccctccttgctaaaaaatcataaagtacttgggagagaaatttgactatactacggtcatgagttctgatgagggaaaaaattccacctaggggtaggtctttcctgaaataaatggaaaggggtgtttaacttcctggggcttgaaaatcagggtaaattcctcttgcctttgtcccatttcttatttgtactgcaacacattttctttagaaggcaaagcctcatgagagtccagcatttggaatttggacattcctgagaccagagtcatacttctataaatctcagctggggaaagggaattttcatctctgctcttaaattcctaagtgttcatgctgcaatggtctttccaaaggcagaggaactgttccagaggtggggtaaaagggcacagtggatgaggcccctcataccagcagatctttccatagtcctcctgtagaaacaccaagtgtctgggtatgccttgtacagtaagttcttggaacctccccagaccctctcactgcactttggacagtgagtggcagagtgggtgggtgtttggtgtttggtttttgtttttgttttttagactgatcgctgcccattatgagtccccattactgactccaaaatagaaaagcttgtggtcagtcaggaaaatgatcatccagcttttttggctcttgaccctgactcctgtcaactaattaggggcattaggcaagatcttgtttcaccatctgtacaagtgttggaattataagtagttatgatatacagtagtttgatatacagtgtatttaaaaagatataaatcagaccgtgttactccagcttgcataaaatctaccagtgtcttttgcgcttaagaccagaaacaaagtgcctttccaaggcctacccccaacctgtgctggattctgtggacctgtggcccctttcccaaaggctcttgttgcattcatgttcatcttttttattttcattttttgagatagagtctgactctgttgcccaggcttgagtgcagtggcgtgatcatagctcac

SEQ ID NO: 63071 - DNA, 1642 bp, Homo sapiens
gacagagcgagaccctgcctctaaaaaaaaaaacaacaacaacaaaaaaccttgctgctgattgaatatgcctgaccttggtcacttttctcaagtgtcttgcagtcaaggaagttccgtctgttaatgacagggaagtgaagcaatcattaagagatgttagttacagactccctgtacctcacaggaactgactcatgtattttcatatgaaaccatggagttttagggagagccagaaactcagaaacctgtttccttaccaggaaaaatgtcatcatctcatctgggtttttattacaataagccacaaagcatgatgttctctcttggtttttatgaattccttgtaagcatttttttctgtgcagcctcatagactcagaattggtattgaatataactttggtccttttaacctttgaattaggtgaagtagtatttgaagcttttcatcagttggctcattctttactcaagaataaacctcaagaaacgtcatcagggtcagagtaagtgctcatattggaaagagaaattctctgtaagttgaattccttgcaagtacttagaattttgaggtaaacgtgcccacttccagctccaatctgcattctttagctgctcaaattctcataatttcaggactaccctaaagcatattatctccacctcttatgcctttccctccataagttgaaaatggatcatgttcccaaaagcaagcagtgagcagcttacttcccgatcctgatgagcctgttagaggaaaacccagaactcagaatgaggtgtccagctgcctggccttgctacttactcaccaaatctgccctccttgtcttcccaccctgtcttctggttcaaggctgtacaatattcattgttctaattctgactaatcagaatcttccagtagtgggacttttttttttctagcttccctgaatttattttagatatagaaatgtaaatagttatgaaaaaaggagagggggggctgaaatactttgttttttcatttttatagagatagggtctctttatattgcccaggctggtcctgaactcctggcctcaaatgatccttccatctcagcctcccaaagtactgggattataggaatgagccactggagccagcctgaagtttttaaataagttgttggggtttgcttgtttgtttttgagatggggtctcactctgtcacccaggctggagtgcaggggctcagtcttggcttgtagtgcaatctcagcttactttagcctcccgggctcatacgatcctcccacctcagcctcccaagtagctaggactacaggcacatgccatcagccctgtccaatttttgtatttttttacaaaatgaatgttttgttaaaaacatgttaccgaggtgggtctcaaactccagagcttaagtgacctgcctgtcccagcctcccaaagtgctgggattacaggcatgagccactgcacgtggccttaaataaatttttgttggtatttttgggttttttttgttttttttgagatggagtctcactctgtcacccaggctagagtgcagtggcgcaatctcggctcactgccagctccgcctcccgggttcacgccattctcctgcctcagcctccc

SEQ ID NO: 63072 - DNA, 639 bp, Homo sapiens
atctttgtcaagggctttttctttcttcctagtccctcatgcagacataatgagtttcttgtaactttgattactcttaagagtttaataatccaaaggtatcccatgaactgctctgaatctcagtgggcaaatgggaacatggaactcttttccaacacagacagcaaatcagtggcttctgagaagcacagaggtcagaaagttgggcctctgccacaagggactcacagctgtggttctctgcattgctgttcctggaactcttctctgctccaagaggtaccataggacaggaacgcccttgaaatttccaagccacatggacccagactttgctgcgtgggtgtcatctggtgctgatgcaatcctagctcagctttgaagtccacttgcaaactcctagcagagccacgtcttgattcattttcctacctcataatgaaagagtttctccctttttcctacttggctgtttttcagaatgaactttttattcctttaattgagagtggattaccatgatttgactattttggaatttcaaaagccctttgttccccttactaatgagccaaggcagttgacagtttaagaggtgtagatcattctccagtgtcctactctgggggtttcagg

SEQ ID NO: 63073 - DNA, 579 bp, Homo sapiens
acaatgagttatgccactcagggcatctgtaaggtaaatgaattattaattggaagggactctaaatagacttcgtgccattaatcccatttgacaaaaaggactggtccgtggcaaccagagggttccagctaaccctcttctcttgcatcacctgcttctaactgccagtatttcaccaggaataggttcattgccccagggttcacaagtgaaggaaagagaggtgcagagggacaggttttggtagaaagcagagggtccagccaaactactgacacatgaaccttctccccaatgttctctttagtgcactagtgtcctggcatgtgtaccccggttcttgtttaccttgacatatgcttcaatcccaagtccaatgacttctcgcatactggccagcatcatctgctccacctgctggagccacttttccaccatgccctatggagcaagacagagagagggtgcagcagtcaaccaaagcccagagggagggagagtgggcagaacacagctttctctctggacacggctggagggatgccaaaggcttggcaccttttcaagtcaatattc

SEQ ID NO: 63074 - DNA, 676 bp, Homo sapiens
acctgtggaagttctcagagtcagcaaatgactaagccacagaacccggttatcggcctcctagcccacgtgcagatcctttcctcccccttctgctgccttttttgttaaagcagaagtgacaacgacgaaacgttcggaagatggactacagtgtcccatggcagttgggagtcagccatccagggggtccatacactgcagagggcatgctccgtgtatggacctccaggctggagaggacatgctccgtgtatgggcctccagcagcacacattgtttgttcatgtttccaaaactcaggaggagactcaagccccagccacatgctctaggagtctctatgcccctgttaggagctcccgtgctggagtttcaatccccagctggaaaccttagaaaaaccatcagaaggaaacgcaactgtttcctaatgaaagcgtttcatctctgagccagtagagggagcgcacatccaggccatccgaagctggctcagccgagacttcaatagcaccgagggctggaagaagcattcaacgcgcgatccttgaacttgaatgagcctatgcataggagcctgttaaaagccaaattcgcgggcggatcacgaggtcaggagatccagaccatcctggctaacacagtgaaaccccgtctctactaacaatacaaa

SEQ ID NO: 63075 - DNA, 1723 bp, Homo sapiens
atgcccgtaaaaaacaaatctatagagacagaaagcagactgtggtttcctgaggttgggagtggaaatgggattgacagcaaatggcatgagggatctttaagggctgatggaaactggattatgataatgggcatgcaactctataaatgtcctaaaaatcattgaattgtatgcatgaaatgggtaaatttaatgatgttatacctcaataaagctgttctttttggaaaaaacagctagtgaactagagtagctctgcattttattaagaaattatttcttacatcctgtgcctagatggccaatattacactcaagaaactaatggacatagaaaaattgaatgtacctccaaacactcaagatgaatacagcagtcttcaatagtcaacgtcatggccattccagagagaaaaggtccaagttcagtgcctcgaaccttgttgccttccgtgaaaggaagcagttgaaatgagctttgcccctggtgacactcttccttgtcactaattaaccagctctataggaaggttgctccgccaacaccttgctctgcctggagagacatctggccaagttctggtgagcaggaaaaatgtctactcgttaccaccaagctgctagtgatagttacctggaacttctaaaagaggctaccaagcgagatctaaatctttcggatgaagacggcatgactcctactctcttggcagcctaccatgggaacttggaagccctagagataatctgcagtagagggtaagttcaacccgatggtttctgttggaaacagtgttcatggtaggtttttgcagacagcagcaagaggcagggacgtcaatacaaatactttatcctctttctagattgtctaaatgattggatttttagagaaagagagaaaactatgcctagagatgctctcttttctcactgaggactggcactataggagtggctcatcccttagccacaatcagaggagagaccctgaactacggcattatctgcatggggaagagggaagatattttaattctatgcctttaaaaatgcttttcatgaaatttaaatagttttctcttttcaaagaggccattgttttacttggttttaagttgccaaccttggttggaacaaatgacatggttttagttttttttttatctatgccatcaaaatctcacagtcttttattaactttcaatcccagtgcaagctcatgatttttttattttttatttttgacacagggtcttgctcttttgaatggagttgctggctctacaaggactctttagcctatcttaactctatcacttctttggctagtggatagatacacacacacacacacacacacacacacacacacacaccccatctctttgcccagattttaatggaggagtaagctagttcctctgcttgttctgcctgttatcagagggctaggttgtgttggcaaccgtaacccaagaggggtaaagaaagagaaaaggacaaggtaaataaaggagccaagtgaatccaattgaatacccatttattcagtatttgttatgtgccagccacttatctcttaagataagagatattttgctagccactgggcacactgtgatcaacaagacagccacagtccctgtcatagtgagcagatttgagaggggaagacaagacatctatgatatttgtgtgtgtgtgtgtgtgcatgttt

SEQ ID NO: 63076 - DNA, 2140 bp, Homo sapiens
ctgcctcaacctcccaagtagctgggattgcagatgtgcaccaccacgcctggctaatttttgtatttttagtagagatggagtttcaccatgttggccaggctggtctcaaactccttagctcaagtgatctgcccaccttggcctcccaaagtgttgggattacaggcgtgagccaccgagctcagcctgttcccatgtacttctgtttccttcaatctcatagggtggaagaggacctggggcaagggacagactggccactgggagcccaccctttgttgggcttctataaggtaccccatacaactcaggtggtagggggctccccatggaagccctcctcaaagcagcaagtgggagagtagggaaggagggaatgaacagggcttaggctatactttccatctgactctttcaggttgggtctctgccatttcccttaaggttcctgtcttttaacatctttgtcccctgccccctccacctctgaagggtaccttctgaatttcatcaagatctgcaccgaactgattcattttatatgcaaatcccacctaatcctcaatggtaacaggtggtgaggaaactgaggcctacagaggtcagatcacttgcctaaggacacctgcctttgagtggcggggaagggactctgacccaggactgctcagttccagagttcatgggcttagcactaggctaaaccatgtaaataattgacctgaatgatggagcacaatgattcagctgcagagtctggtgactcattgctctttccaccaatgggtgaacctgccttgtgcgctagttggatttgtgcccagggagcaatggatcttacccaaagacttgaacacggtggtcttctcacagtgggctggtttcactcccttaatcacttctcccagctcagcaaagatctcggcctaggaaacaaacatacgctgacccaggcatgaagctaaagtctgtgcagggttggcttttgaagccagcccagggaattcctgaattggataagagataaatttgattaaaaaaaaaaaaaaaaagagagagatcctttgtacactgaatgatattagggaggaggctggccccgaaatccttttggggtggcatttgcttttgtgataccataaacacagagattcgagttggtgctcagggagctgtcctgccaagatcattgtgtcagtgaggaaatagacatgctgttatctgaacatgcatgccagcagctcccttcttgttttatgctgattataaccgtaaaatgaggccagaaggtgggcaacacagtcttatcatgttggccacattgggaaggtttccaggctgcaagaagcttccaatcccacttctttagaggacagcccagcaaaaaaataaaatccactgagcttctccttccaggaacacacatgtcaccacccataatgcccatatttttctggaatggaattaaagagggttgcaaaatgtttaggagctccttcccctacaaggaggtggggtggctgaggtctggagcagaccaaactggaagggaagttaatgaaaccctgggatccaggtgaggccagccaggtggcagccctgactggggtcagaagggcctcacccctgacagcaggacatctccagactccttcagggcagcctcctgggaatccacgtacagcacagcttctttcatgagctcatcatccagttctctccagtcaggtctgctggctccaacagctaagagacagcaaaacagaccttaagcccaggattagtgccaaaggctgctaagaagcccaaagcacaggagagaggtgaacaaaggactcgtgaacacactcagattcaaaataccccctcattccccaggccatgctctcccaatcagtaggacgaaatacttattaagaaataggccaggtgtggtggctcacacctgtaatcccagcactttgggaggctgaggcaggcagatcacttgaagccaggagtttgagactagcctggccaacatggtgaaaccctgtgtctactaaaaatacaaaaaattatccaggcgtggtggctcacacctgtagtctttgctactctggaggctgaggcatgagaattgcttaaacctgggagg

SEQ ID NO: 63077 - DNA, 2884 bp, Homo sapiens
aaggtgtcacgccccctggcaccaggacacaggagaatgcagaggctgccaccaaatgcctgcaaggccagggaggtaatgaaaatgaacaaagctggtcagagggactggattagatgtggtggagactgaggggcggggaagccagcaggcccttccgaaggggacagtcattgttcagctccagctaatcattaccacgtgtgaatgtagatccactgttaccagatatgccccagttgttttcttagaagagaaacaggaaatctatttgcatatgtcactccttgagttttagattactctatggtccaaaccaaacacatctgctggctggatccagcccctggctggctagtctttgaaaactgctataaagccttatacaaatataagacagcatttatatgccttcttccactgccgccccgttttctccctttgttccctcccgttctgttctccctcattctaatttccaaagagagttgtgtaaaaatgtccatcttgaaggttgtttgtgcggagagttctatagaacaaaagcactagcttaaggaagcttgtaaataaatcataagctggtgggaacaaaacccccgtttctcaggccactccttctcactggactatttcccctgcacaaccactgcttatgagccgggcgagttctcaaagggttgtgtgaggtcactcaggcggatggaggtgggccaggcagtaaagagagagaagcctgactcaaacaaggctctggcttggttgtgatggggctaaatgagtgagggtcgcagacaggcttgacagggtgtgggggcaggaggagggaggcatggggcagggtggaactgggcctgtccctccgctgagctgtaaactaagtaaaatctgttgttggtatttccctgttgtctgcgcttgtgacacatttttcttaaatgtatgtgttgcctctgtgaacacataaaccaattttgtccctgggccaggaaaacagaagagatgccttgactcaaaatcaagtcagcccttcctggagaatgattccaagtgagagagggatccaacataagggagattgtctgtggctggatgtgaggatggagagtccatatggtgggaaatttgggtcatctctgggagctgagaatggccccaaggaaaggggctccccccatcctccagtgtaaggaactgaatcctgccacaccatgggagcctggaagaggacccccgagcatgagatgagattgcagcccggatgttgcccaatttcttttttgtgagactttgcacagaggatccagctacccacacccagtctcctgaaccacgggaactgtgagatgataataatgtgttgttttaagctgaaaaaaaaatcaagtccatctttctgaagatgcagccttggaaacccatttcaccatgaactggttccttttgatttcccaggtccttccagaaatggtcttattgtccataaactcagccctgacttacctcttacccattccctggacccagtctgaccaccagtcccatgcagcctgagactttcaaattactttgatccattcctcaaacacgccatgttcgcttccacactcaaggcctttgcatctgctgtgccctctaccctgaatgcctttccttcagctcttggcatggctgctcttcctcctcattcaggtcacagctcaaaaaacacatcttagagagcttctcagataaccctattgaaaacacctctctctgcttctaccttccacctccaccaccagcctctatcacccagggccttgttctttccggtctcatctttagccagaacgatctagttcctctatgtgtttgtttgttgtctatctctcctcactgaaattaaccaccatgaaaccagtgaccttgactgcctggttattgtggcatccctggcatctagaatagtgcctggcacacggtagagattcagtcagcatgtatgattgaatgcgtcatcatttgacttggctctcgccggctcatctgcccacgtgtgcaaagctcttagcttctgagttcacaccatgtgcttgtcactaaaacacagggcaccaagaccatctttaaatcctctaaaatttgcctgctctgctcaccagaatccagtcttcctgttggaaggcaatcatgagtatcatttaaagcttggactctgaggatagagtgcctccgttcaaatcccagctctgccatcaagaacctctgattttgggcttggcacagtggctcacgcctgtaatcccagcactttgggaggctgaggcgggtggatcatttgaggtcaggagttcgagaccagcctggacaatgtggtgaaaccccatctctactaaaaatacaaaaaaattagctggcatggtggcgtgtgtctgtaatctcagctactcggcaggctgaggcaggagagtcacttaacatgggaggtggaggttgcagtgagctgagatcatgccactgcactccagcctgggtgacagagtgagactccatctcaaacaaacaaacaaacaaacaaacaaaaacttgtgactttggaaaagttatataatttctccatgccttggttcatccccctataaaatgtttatgataatagttcctgcctcataagttggttataagtattaaatgacattatacatagaataatgtcatttaatatacaaagaattatacaaagaattcatgacagcacctgcagtagtattagatgtagaccagctcttgctataacacccagggccatctgaaggtctacagaggccccaggcaccctcatgtctagagccccctctcctgcccctcatcctatcacacatattaaaaagcatatacatgt

SEQ ID NO: 63078 - DNA, 849 bp, Homo sapiens
gcaacggttaggcaagccgtctcttcccttctcccacccctcctcttcctgctcctcctttccccgctttccagtttctcctgcccctgaccccgaccctcctcactcaccccctgtgcttggtcaccggcaccacggtgcgcacgggctgcatgacccctccttcgggaccgctggagaagttggccagggccgtctctagaggcgggatgaggaggctggagctgcggaggtgttcctccacctcggccgcgctcaggaacgctggtacccggctcatctcgccacctgtgccttctaacctcagtctccgcaccgcgatccacgtaccctcggctgtgccctttatgagcgcgcccgctgctctgtggagccgcctgctggtcacagcccagcctccgggggcggagcaaccccgccccgccccgccagccctctcctcccccttcgcccacctcgacccctaagggtgggcgagatgggtcccttccagcaacggattccccaagatggacatcgcggtggcgtgctgggagtcaatattgtttggtccactttctcagttcctgtaatcagctgtagccacattccttgacttttgcttcctacataacccctccctattaactcgctttttgctgctgtctaggtcaccgtgcctgggaaagaatggacagggaaaacgctaacggggctcctttatttattaaattactgcctactgctaggagataaaaggagacggaggcttatttaatttttttttccttttaattctgtccccgtctagagtctcttatcctagtcttcctcccccctgtacccccagatgtctggcctttgattgct

SEQ ID NO: 63079 - DNA, 1974 bp, Homo sapiens
ttaaaggtgtttggcattttggagcaagctaaagagcaatttgatttagaagactattctgtcagatcacactggaacaagtcttcctgacctttgctaacccagagaaatcatccagtgatgatgaaaacgaggtgccatgagattccctcttaaaaaaaaaaaaaaaacagaaaaagaaaaaaaaaagaaatgccctacacgtgagtcccaataaactcatctactcatcaagctggactggtctgagtcattctttggtctgttggctcctttcccagtttggggcggaggatgttctatacagtcctggatttttccccaaccaggaagagaactccttgtcctgcagtgttcctcttgcgccctctcctgacaaagcttaacttcggagctggagcaagtcgtatccggcattgcagggaagagtgaatttggcctgtgatccaatcagaagctgcgattctaaacaggaagccacactggatgcgagaattggggtggggcgcgccaagaggagcaagcattatagaacgtggggagcatgagaaatacacggaggtggaaacgccggagtggctggcgggtaaaggcagcgggcgcagatgaagcgggctgggcgtcccacgcgcagaaccgtcccggacagaagccgcagggctgcgctggctggaaaaaggaacgcgagtacagcgcgcgtggcgcggggtctgctccaggacggaatcttttgggtggcccgcatgaggggtttgcaggaccccgggcctttgggaagttatctgctaaactccagtagaccctgaggagcagcggctcatgaatcttcttaaacttctgtcatcagcggctgggccagctgaaggtgaccatggcacacgagggagagagaagcccgcgagaggcggagaaatgtggggtcgtccaggagggtcgacaaggcaaagaacctgaagacgacccaaaagggtacctaggtggggccctttcagggacttggggcatagggtagggcgcatgggacgaggtgggtgagcgcaagggacgagatgggtgtgcgcatgggacgaggtgggtgggagcatgagacgaggtgggtggggcggtgggtgaggtctccgcccccagacgggctggcgaggaagcagggaagaagtaacgttgggctggtgaggcaacaggtggggcgcactggagctgcgggataataggtggaacaaactggggactacactcgtgggcgcacgtgcggaagagggactgaggaggttcttgcgtgctcccctcgagcaccgccgacagcttcacccgcacctcctgccttccgcaccgctgactcctaccgctccgcgcactgcgcgcccccagccctagtgcagccagctcccggccgggtccgcgcgagggccaggctgccaacctgcccgcgggcggctggtggttggggagggcgttgggaggaggagtcccgccgggtggacgcgcgcccttcagcggcggaggcggaggcggcagcggcgaggcctgagggtgcgtgctagggagtcctggcgcgtccttcttctgccggcgtccccctgcgcttgcagctgctccccgacgcccgggaggcccacccgctagccgcgatgggcgcgcagagcccaaaagggcgacccccaaacaaaactcacgcatataaatcctccagagacttcctcatccccccgccaacacacacacacccacacacacatacacacaatcaaatcaaatagaagcactgttaggaattttatattggctatgcaaagtgcttgaacgcactgactttggaggcaaatgccttgtccctagtcctgactagtccagaatttatttgctgtgacctatggcaaattgcttggtttctctaagcctccatttcctaaggcttatatctgaaaataactataagaggaaaggatgctattgtatccaactcagagggcagtc

SEQ ID NO: 63080 - DNA, 2329 bp, Homo sapiens
gtttcataaatgaaaatctctgatgtgcaacgctgaattaaccaaaaggcttacttcttttgttttgaacttagacacatttacattatttctggtgcagttaaattaaaagcactttccaaacaaacctaggaaagtattaaagttagggactcccacgaaatgttactccttaattgtggcttggataatagcaggaagaactgcagacaggaacacagtgtaactaacccttcagttctgaaatgttgctaggtctcctcgtgttataaatgatcaaataaatatccgggttaaacactgctcccagagctgagttcactcttaagagtgttgggtccaacttccctgtgctaattcaaggaaacaaggcagccaaggagtctaacttgaggtcttcattcttgggcagggccatcaatacatctaaaacattacttgtgggtaccccagctgcggtagcttccccaaaaggcagaattttcactcattctttatagaaacacgtagccagcaacttctcaggcttggggaacggggcaggcgggtcgtggtggtggggagagtagaggagggagtctggcaggtcggttctaaatgtaaactggaaactacgcatccgagcgggcaaccatcactggcaccattcgtctccgggaagaacctgtgtgtgtcaggatgcacgaaaggaatgactcccctctttgcgcccccggggttaactgcacgaccctgtcaaagtcccgccgtggagtgggatgagggtcgagaggtaaccctgtcaaagtcccgccgtggagtgggatgaggcgaggaaagactggaggtccttccagcaccaccttggaggggcagggaggctgcagttaccgccttcggaagtgatctcctcagccctcaaaaaaattaaaaccacctccgccatttactagaggccaaggcagggccgggacacgagaacgcgctccgggcggatgcgcgctccctttgtcccgcctcccagcggcccgctcattggacggagggagggcgccgggggagaaagcgacgcggccgctcgtaagtgctccggatggaaactggtgcagggggcagcggcgttccgcggccggaagggaagggggaggtgccgaggctgcgcgccggctgctcctccccacccccagcctttgccctgaagggggctggatgggcaaggcggccgcgatggctcgagctcgggcggtggcggcggtggccggaggcggcggtgcctcctcctcctcgccccggcgccggcggtgatccgagcgagcggccgcggcccccgatgagactgctggcgggctggctgtgcctgagcctggcgtccgtgtggctggcgcggaggatgtggacgctgcggagcccgctcacccgctccctgtacgtgaacatgactagcggcccgggtgggccggcggcggccgcgggcggcaggaaggagaaccaccaggtacgggctggggccggggccggggcgggggcgtggcggcccggccttcccgcgctgggcccggctattgtgcgggacggctccgcgagggggcggcccggccctcgcccctccgcctcggccccttggaaagttttccccgcgccttccccgccgggcgtcgactccgcgagccccgggcacccggccgcggccccgcgagcgccttttgttccgcagcgcaggcggggcatggcctcccgggcccgatcgtgagcggcccggagccccgcattgttcctgggtcccgggcggtgactgcggacgcccggcagcgggactggggaactttggggccagagcgtggctgggggcgcccgcctggcaccgaggcctgagactgaagagacccggccagatccattaccccgagaaacaaaacgaaaagccagcccctcttgttgtctcgttgaatcccagaacgtacaaagggtcgtgaagaaatgtaactgtacatcgcaagccattgaactctccaggctgattggggtgacatttctccctaagcacttaaaaaatgggtttgacaggttgtcgctcccatcctacggaaccttcccctcctacctagcagagatctcctttaaacttggatttagtcagcctgctagaaagattgtgtgtgatgaggaggaagattatgcaagttttacaggaagggtttttaaaacagaacgggacgggagggagttttagttatgcatcgtgagcgttacgctgtgaccgggtaggtaggcttttcattagctcagtcttgcgccacttaaacgtgtacaggttaactgtagaattaagtgagatatttcgtatatgacc

SEQ ID NO: 63081 - DNA, 702 bp, Homo sapiens
tattacccagttaggaggaatgagctcatttctgtgaacgtgagatgaccctcgaccccgtgctcctatcacacgccattagctttgtcccacatcctttcaatccgctcctctaagcgcggtcctgagctttggtcccagacgcgcagaaggaagcggcctgaatcttacccagtcctcgacgcgcccagcgtcttgactgcagaggacgaagcggccgcatctcccgacaaacaacgtgtgaagcagcggtgccgccattgggccgaactaacgcgaccgctgcgcctcaggccggatgcccagctccttccagccacagcctctgtcccggaagttgcgcgtgccagcgcaaccttcagacaatcaggggccccgtgtggggagggcgtatgctctcggcgggctagagcgccgctaaaacgcgctcttcgttctacttggaggacttgttccagccagcgtgagtgcgcgagtgtaaggagagacgggaaggatcggctccatccagccctgaggatcccaaagaaagggtggaaacaccctggatgtgctaagctgtggccaggtacactcaagtgttaattttttggagtcaaagcctccctcagtcagatcgaagaaactgaagcacttgtgactgacccagatcttcacggaggaaaggggattcgaacccggctgacccaggagcctgggctc

SEQ ID NO: 63082 - DNA, 2042 bp, Homo sapiens
gtacatttgcctatgccttgtaacgtctacaccaccagcctttctgaaactattgtgcatacgaagtcatcccaggatcttgtaaaaacaccgattcggatccaatatgggacctggagttcatacatttctaatcaactcctaaatgatattgatgctgatactgtcggtttcccaaccaagcaacgtagcaaggtacgaaactctaaagtccctaaagggcagggaccacgcctctcgcgttggcatagtgcctagctcaaggcactttctgggttaacactcgctgaggaccggagtgaacgcccccgccccaagtcgtcacgtgactgactttctccaactgccggtttcggctcacataacacacctactatccaaaacatttctattttcctaacacaaaaactatagctaagtttttatattctatgtagccccagcctaggacgtaaattccacgagaccaaaagccttgtgatgattccccgaggttgctgaccctcccggtgtgtcccgggcctgctctgggggacacagcggcgaatacgttgaacgaggcccctgtttcacggagctaaagatccagtaaggacttcacccagcgagaggcaactacgccgggcttcgatacccaatacctctgcagaaaggtggagtggcaggaatctcctgaagcctccaacgtccaggaacgcggaaacccagggcctccagtgcaggtgtcatcccggagggcgcatgcggagtcccaagagaggcgcgtcccattggacaatgctgagcggaagagcccaagatagcggggggagttgtgacaggctgctgcagacgtacttagaaaaggggtgcatactggatattcaggctaggagaagaacgcaaaaagcagtgacgtacattattctctgcatatatttacttgggaaattgtgcgtctccctattctgagtcttggaggaattggactggtccaaccttataaagagagcagtagagcgcggcagtatagagagtacctcacgaaggggacgtgggaaagtgttagcggggaacgctgggaaactcccggcctccgccaccatcttgctttcctttaatccggcagtgaccgtgtgtcagaacaatcttgaatcatgaagctactaaccagagccggctctttctcggtgagctcaggtggcgggtttgggaaagggctggggagcagtgtgtcgacaaggtgatacgaggcggaggtgtctggtctggggtctgggccttgggattcggtctgcccttcagctgaaccctgcgggccaagtgggctgcagactgggtcaggctttggaggcccagctcatgctgtgagcacaagagacctaacaccgggaaacctgaagagaggggcaggacgtgagagcggagttgaagcgagtccttggagagacttctgaaggtcactccggtactcaagtgctggagaaagagaccgtgaaacccagggggagcgggaggacggcgcacttagccccccaccttcactttatccgctgcagcctctgctccttggtttatcacggagcgtcagtttccccagcgaataaaagtataagaaaggagctaatgcagatagaacacttattacagtacctggaacttcattgttaaatactatggtgtcttagtagtctaacgttgcttttcttgatcgtatgttagacggttcctccaagacgtctctgtttgtcctcaaaagctccttaattaagtttccccttcaagcctaaattaaacatagctgtcacttggggaaaactcacacatcagggttatatcactgtgggacagtggttattaagaggggtaagggggaacacttaaaaaatcatagcgagggacagaatgcccccagggaaccggtggcgatgtttggagacatatttagttgcaacaacttgtaaggagggtgctattggcatggagaggccagggatgctgctaaacttcgccttacagcaaagaattatctagccccaagtgccagtagtagtacctgtgtt

SEQ ID NO: 63083 - DNA, 687 bp, Homo sapiens
aatgatgatgatgataacaacaacgatggagagaggttatctcccaggccaagagtgcaccgttgccattttacagaggaggaacattgacgaaggcttggtccccagggcttcttcacccgcttccttctccccagttaccttttttgtttttgtgggaggccttctgcatggtcccgggaggtcaggcagcccgggagggcctcccggagcagaggctggagtcagtcccaatgccaacagtttcgaaccttgcccgcgggcactgccctcgggatggccgccagggggcgctgcgccgccactgcccagaaattgggcggcagtgaggtcgccgcaaggcttcccgtggaccctgcaaaacgtggcgtgggcattgcacaccattgtactgtatggaaacttctgcagaggttagcaccgtgcctgacccacggtggtttcttcattccttcttttctttttctttttttaagagacgggcagggggtgggggtctcactatgttgctcaggctcaacacaactgttgcactatgggctcaagcgatctgcccgcctcagcctcccaaagtgctgggattacaggcatgagccaccgcgcttggcttcttcattcattcttggtgaacctaagaaatagggagggggagaaggcacagaggagggtgtctcaaagatgtgaggt

SEQ ID NO: 63084 - DNA, 2069 bp, Homo sapiens
gattaagtaagatcatgggattctgcaaacaccctccattgccttctcattgcactcagaacaaaatccaaggcccccaaagccctacacctagcctctgcctacctcttgtcatactactctcctgccacacaggccattttgcaattccttggacacgctgatctctttctgcccccctcccctaatgatctttgcattggctgttccctctgtctggtcttgcgccaggtcttcaaagtgcagatctttacgatcgtgatggtctcagcggaaatgcatccttccctatcgcaggtatcgctccgactcccatcacactgacctccattgaattcagggatctgcacctgaaattatctttattttacagataggttcttaatgtgtttctgtctcttcccaccagaacgtgagctccccaagagcgggcgccttgcctctgtccactccagcacctctgcacctacaacgtctgacgaagaggggttgtcgaaagctatttgctaaatggggcaatcctgggagctgacggccgcggaacgggcaatgagaatacaaggtgacagggaccgcgcggggcccggagtcgctcggcgggagtcggggcccgcctcctgctggaagacgggcagctccccactctcattccagttttgcttctgaggggctcaggaggggccgcagcctgtgcccagtcatcaacatcaacaatcttattagtgggcagaaagccaagaggtggcgtggcctgccagaagagaccgggacccgggcagggaccggagccgggccggtcgggtccgggtccagaacgtagaggcgggcggtgcggggaggggcccagggcggccggccgagccgggaggacggagctggggcgcggcggctggggagccgggaccggcctcgccaacgccgcggcttcgcttccgggtgaggggcgggcgggccgagcagttccggggcgggcggcggttccgtctgtgcgggccgcgccgcggctgctggtcccgggcgcgcggagggcgcgagcggcgcgcgggggccgagggggcgcgaggcagcggcgcggggactccgggccccggcggcggcccatggggcgggaggcgtgaggccgctgcctgtccggggctcggggggtggggggagcggggcggggagatggataaactgaccatcatctcaggatgtctctttctggccgccgatatcttcgccatcgccagcatcgccaacccggactggatcaacaccggggagtctgcgggtgagccgctggcgcgccgggccgggcgggggattggctgagggcgacgcgagagaggggagacccggactgaggagaggacggggtggagggtcccggccggaggctagcctgaggagaccgggggcggaggggagacccgggccgcggaggaaagggatggaggagaggaagccgccgggcgccagcgggacccccgggctgaggggagaggcgccccaggccgggtgaaaagtggccgaggagacctgggctgggctggcaagtcccggaccggggaggaggggagcagccctccgatgtgagggatcgcagaggaatgagcttcgttctggattaaaaaaaaaaaaaaaaaagtcaaggtgggagacgggaggaaactgaggctcctgcaagggaattagaaaccaggcggagaggctagggctgagagtgaggcagcctgcggggcagtgcgggagccactagagagctggtgggcgaggggaggccgagagggatcaggtccgaccccagaccctccaccaccagaggaagctgcggccgggggcgagcccgggctgcgggcgctgaccccaccaggcagggtgaatggtgggtgctgggagagctggtggggttggtgggagtggggggcgccggattggagcccctctgcaccgccgcccccgcccatcccctgcccgcttggcaatgtttgagaagcttgtggcttcggattttccctttgaagtgtgtatgtggttataattctgctttattttaggcccgggagctataatactactaataataa

SEQ ID NO: 63085 - DNA, 606 bp, Homo sapiens
agaagaaagcaaggatagaatgagtataactctttaaaatttggaggcaaaattggctgtgagttgccatggagataggagcaatggatgtccaaggtctgaggaaatagaaactgttcgaaataattgcagagaaagcttgccaacggtgataagtaggtttgtctagcagcactgatgcgtcgtggaagttgatggtcatgaacatacagtgtgataacctatctgccctcttgaccttttctagtagtgctatgtcattttggtactaaggtaggtgaattttccaagtgttcttggaaataaggaaacatcaagaataatgtaaaagcctcatatacaataatgaataataaagaataatgtgaaggcttcattcaaggttggggtttgccagatacattgcaacaaaatgacagagcagccaaggtatttaggatagtggccaaagtattgtaatgatggcttatggagtgtcagctggataaagagtgaaaatgaataaaaactaatggattgttcagtcgaatagcagatggtacaatggtacatggccagtagaataggggacccaataaaattgaagaccagtcagagtgggagtga

SEQ ID NO: 63086 - DNA, 654 bp, Homo sapiens
ttttgtgaggaagagttttcattttcttcaggtctaaagattggcaggtgttcagggaagtgaaagccttggtgaggggtatcatttcctattctgctacctcctacctacttcataggaaaatctggtaaacctcagataagggactgtggtgcttgacatctatctcataagggttcaagatctacaggtagatcccagcctatgcactggggatcctcagtttaaaacactaaaattacaagttgctcaagcagacctgtttattaagtaatagaaaatgattaaatcattagtcctttccctggaactgtaacaacttcaaagatcacaaaggtactttgacatgaaagaactctgtaacatcagttgttaaacaaacctatctcaaactttattttattaatcactttggacatgatttatagaggacaggatttggttacctaaaagggcaaacattttgagattgtgttgtccttgaatttaaaaagcattaataatatttcttcattggccttttgagcctatttccagtaaattttttttaaagagctttattgagatgtaattcacataatactaaaattcatccatttaaagtatacaaataaagtatttaaagtatacaaatcagtggcttttagtatcttc

SEQ ID NO: 63087 - DNA, 669 bp, Homo sapiens
gacctcaggtgatccgcccacctcggcctcccaaagagctgggattacaggcatgagccaccgcgcccagcctgagaattgcattcttaaagacattaatctgtttgtaatttaggatgtcttatagtgatttggtggtgagacatacgggaaggggtggtaaagagtgcaattgttggacctgtgctttttacgtgaaatagcggaaatgagtattactttacaaactggttttggaaatgattcattcattaaagaaagcaaataaaaatagcaataaaactaggacataataactggttgttaaatgaactctatgtcctttgaaaaggagatgattaaggaagaaaatatgtaaataacttgggtacacaagctgctatttgaaattctgctgagtaaaaatgataggaggagttaaactgttcaggaatttagctcttgcttaaagtattcgtgtagcaagtctctgttttttttaaattacagtgtttgaagatcctcttcttgaattaacagaatcaaagtgaaattccattttttaaatcactcctaaactgtctttagtgtgtggctttaaaatataattctatgtaatatactagagaaattctcaagaaaatctaggactaggatttcaatataattttaaaaggaagtaaggtgggc

SEQ ID NO: 63088 - DNA, 1012 bp, Homo sapiens
aaaaaaaaaaaattacttccagtccactctcgttttattgtctctgatgccctgctaagttaaaaaggtcaaaaaaaaatcgtgatctccattttatgatgaaaaattgagcactaggaaaattatttgtccaaggccacaccatactggaattggcttcagactccatgttcagtgctctttaacaaggggagtcagagggggagagtggagaatgggccacagaaagaagtagtcacctatggcttctcctttgagccatccggatcagtggaggagagaataagatgatactgacaatctcttgagttgtgacagtatgccaggcactgtgctttatctcatttaactgagttgtagacaacattgtcctctccatttagagaggaggaaatgagacacacagtgaaataacctgcccgtgatcactcacttaaatggtagagctgggatttgaacccagacctcagtgatttcaagcttaaccattagcttgtgaaaatgcatcaggaatcacatccacataaaatagctgccagggtgcagctgaattgtggtcaggcagggacttggctcctctccctcttgtttaacttggggatttccttgttcagctcaggggcaatgtccttaactgtggaagttccttggctgtggctcgggtaccctctgctggtcaatctgtgacacatcaaccagccctccagtttgactttatagccttttatgcatttaacataaatgttaccaggcactgtgctgagcaacggaggcaagaagacatagtccttgcccttagggagctcctagttcaaaggggaagacagcccactaaccaggcaactcaacactgtaattagagccattcttgggaaaatcgcgagaaactccagtgcacacagaaggggcgcctcagccaactctgaggaagtcagagaaagcttcccagaggtgacatctagagacatctaggtgtattagggaccctgcttatctagcgtaactcaactcc

SEQ ID NO: 63089 - DNA, 3383 bp, Homo sapiens
cctttgcttcttagggaccaaggagttaaatagggtgcgaattcagcggggctggagggggcgacgcaaaggcggcaccctccaataaaaatgaacatgtaaggaagaaaggaagacctctctaatgagggcatcgcaggagcaagacgctgcactcgggtccttttaaatcactatgtaatggaggggaaatccctgccctctcttttccctttccgtaaacaacgaagtagaggatgtcctcctcccacgaggcccgccctcggatgccccgcctgtccccgcaggtgcgcagcgtggccgtgacgcacaccttccagatagccaaggcccgcgcccagctcggctacgcgccggataagtttaggttcgccgacgccgtggagctatacgtgcagtccacgacccggcggccccgcggctccacggcgcggaccctcctgcgcctgctgctcaggctgctgctgttcctcggcttgctcgccctggccctgcacttcctaggcctgcagcctctgcacgccgccgtggagcgcctgtgaccgtccgccgtccgccgcccgctagggtcggccccgctgcaccctcgcccacgcccggctccctgggcttgtaccagcccctgccccgccttctgggtttgagcgcgcctccgctccgccccttgaatcctggtcacgcccccgagccgctctccagacctagcccggaccgccgacttctggccacgcccctatctactcccagaccttgccttgcgcccttcctgtgttttggccccgcccctgtcctgtcccgccccgccctccgaagtgggcacgctcctgctccgccccctgaatcctggccacgtccctggtcggcccagacgcgtagccccgagtctctttccatgttttgaccacgcccttgacccgcccttcaaattgggcacgccttcttccccgctcactgatttcctggcctagcccctgagcagacctccagacctagccccgcccccgttttataaccccgcccctgcttcacggcttgggcacgcctcttccccgccccctgacttcagagcctagtcctgagccgctctccaggcctaaccccgccttcatgtcatagccacgccccttcccgcccttccatgtttgggcacgccttctgagtcctggtcacgcctctgtcccgccccctgaatctttcctacgtccatgaccctccctccaggccctggccctgccccttttttcctccctccggcctgtccggtttctgatatgggccaaggctcacagcttcctccgccttctggaccttctcctagtccctgcccagtcccggcccacccccagattctccctcattctggtttcgccccctttctggtcctccccgcgcgcttgagcccaccctttggcttctccttttgggtctgtccttgctcctgcctctggacccggtcccgcccttctcgcgtgtaattgagtcctggccccgccccctccctctctggcttcacccctttccagctccgcctcccgggtaggttctccccggaaccaggctgccgcgtcgctatgggctaacgcaggctcgggtgacgttggtatgagtttgcgccgtcggctgctgctctgtctggtaacattgcattcgatccaccccgacccaatgttctgggcttctcattcacacagatctgtgtgttgacagccagggtttggggaaaaaccgagactcaagcttctgccgagcccgacttggcctttttgggttcctgtctgaggatgacagcatagtaagcacaggttttagtaccagaaagagcatgaaaaatttaaaaaaaaaaactcttaaaataattggatgtctcgatgaagtaccaataaagctataatgggaaaaatagagtttagttggttatattttatgatttagtactgtttctatttattaattagaggtagtggtaatcaccataatctttaaagtttaaggtcacgaaacttctttatctagccctgctctccacagaaacttcgcctcctatcatcttggtatcagttatcagttgtaagtaccaagacatcagtgtgtaaatacaaccatgtatagatcataatatgcacacgtgggactggcagagaagaaaagcaccacaagcctgaggtggatgggatcgaaagggctcatcagaaccaacatggccaccgcagtgtgtgtcccactctgctgaacaaggtgagcagtttgggaaggagctaaaaaaaaatgtatgctcctctctgctaggctgaattttatgtgtgtatataatttttgaaagaataataatcctatgtctgtttaatgcttgacagtgtaaaagagctttcatctatgtgatcttatttaattcttacagctactcttaaatagggtttattactctccttttatagatgacgaaaactggggctttgtctcattccaaagagcagaggagggtgggggtttctgctctacagctgggggaatttggaggagcaccgcctaagccgccactggcctaaacacaacacgtggtaacttctactcttctacactctggccatgccaaggcttgcggttgaactctggtctcgttctctcagagccgcaaacctcggaccatttgaagctggcggtcctggggcttcctttcctctcgataacatgtttacatccaaactcacttccttcctctctttcttctccctgctaatcctgggaaatctgttcttcgagcaggaaaaacaatctcacactgctcacgttattttctagatcttttgactagtgccaaacctacttttgaaaatccaaaagccaagaatcaatttatttgttttctggatttctccaactcatctatttcctaacactctggaagcagaatgtgtaaaccctgggcatggggacaacatggatcgctatgtcaaaaaagcttttttcctttcaagcatctttatccaatggaaaaggaggtggcatccccacccaacaggaaaactgaatcactgtaagaatttttgagactgcccagaccactagcctccatgaggttctgaaagggcaagtaggaggttctagcttacttggagacgctaaagagaagcatcgcaaatgcagaaaacagaattgtcacagtgggcagcccaaggtgacatagtcgatctgaagggattatcaagacaaactcataggctttccattatgggtgctgaagctattcccagttgtaaacccaatgccaggcatctaaaacatcctcaagtctctctcatcttgaaaatatcttcccagcagggcacagtggctcacacctgtaatcccaacattttgggaggctaaggctggaggattgcttg

SEQ ID NO: 63090 - DNA, 1232 bp, Homo sapiens
ctcaggtcatgattacaaccacccccaactaaccccaggaagacccagacaggctgttgggaacttttcaagctagctcagatgctttcccctggaaatggggagatgtgttttgtttttttgttttgttttgagggagctggatgggtaggtgaaagagaggtttgtgtattgggctagacagtgaaagagcctgcactgcagtttctgccttttctcttcccttcccccttccattaaaaaaaatccattataagcaatctaaagctttaaaaaagaaatacatcagaaaggagaaaaaaggaagagaagttggcaaaggactacataaagagatggtttatggatagaaaagtgagaccttctgaggtgtggcagcggtgggattcgaacccacgccatcgaaatgactggagcctaaatccagcgccttagaccactcggccacgctacctcccgatcgtagggcttcctatgccggcatattagtgtgatgacggaggcgccccgccctcaaagtttgcgcatgctcaatatagaaccgctgtctcctgcgttgctcacggagacttggagtcacagtgctctcgcgatcagcagcagtaaacacactaggaacgcactattaaaatgaagagtgcctacatatcaaaaattaatatttttaatattaaatcctcacaagtgtgtttggatttgattttgagttttccttgggcgtgatcctgcctacagccacgtaggggcgctcccgtgctgccgcttcctcccgggtgggccgggatcttgcgtggagccccagtttgtatgttgggtccccaaggtgcagacgctctgtccagttcaaggcccctctgtagccctgagtggcctcatgtcctagcccttgccctcgcgatgtaagaatcaagagttcagggaggaaaaccattgaacgttgttgcagattctttgcatgtgtgggctcctaacatatcaaaaactattaagctttcataagctgtgcgacccattttacagaggaggaaaatagagatgctaagtaactagcctcgggtgccccagccagccggcattccacagcctcccaagacgtttgttcgtacgtgcagaggattttagtgcttttagaaaaaaaaaaaaaaagcaataaatatagagtataacctagcaaaattccatttcctatcatctcgaattattactaacattttgcatattcgcttcaattt

SEQ ID NO: 63091 - DNA, 2379 bp, Homo sapiens
aggctggagtgtagtggcgcgatctcggctcactgcaacctctgcctccagggttcaagcgattctcgtgcctcagcctccagagtagctgggactacaggcgcgcccggctgcttttttgtatttttactaaagacagggttttaccgttttggccaggctggtctcgaactcctgacctcaggtgatctgccggcctcggcctcccaaagtgctgggaagatggaatgagagaaatccctcaaaacatgtcattgttactacttttctatctagaatgtgtgaaatttctaaaatttcactaacaaagtatctggaaggacctaatattaaagtgttcacagtagctattagttttaattcgttttcttttttataccttagccactctaccactcatgccacaggtatttattaagcatctactgtgtgccacccaggccctgtgtcaagagttaggaataactaaaggagatactaattttaaaactacacaaataattgcaatcgtcatacgtgcctgtttttacaaagcagaaatcaggaaaaacaaagtatttccgataaaaaatattttaaggttatggatagagatacatacaaacaagcgatgggcttggatcactaatgattttggaaaggacaggaatacaggaactaagcgagaagcaggcgagaatggcgaggcgcggcgggagaggacggaagttggtcactccctcgaattgccccctcgctgccggatgctaggccagccttgagcaggagaaccggacactgtgtactcagcagggggagccaagacttagcgctaaccattgcacctggggctgggagccagcgccggagccaggaggcccgctaggcggctgcaggcgctgtgatggccacctgggggcggccacgtgagcgccacgccgtgcgcccgccaggccagccccgcccctgcccgcccgcttctgctcaacctagaccagccccagcttcagcctcagctcccctccttcctggatcgagcgcccgcactcccggccctgcagccacccgagtcccgctcgctgtcgcctgcacgcgagtcccccctggcacgcgctcccacatcccgggatcgtcccaacggcccctgcgcccttcctgggatcactccgactgccccgcgcgccctgggatcggtccatctaccccgcgtggccccagctgcttgcccggagcgccagctagcgctccccgctctccgctccccggcactctcggggggcccgcccgccctgcaccctggagctccgggccgcgagcctctgccaactcctctggaccctcgcggccgtgggcagcggctgccgcgcctgtctgcccgagggaggtaggtgtggaccgcggccggcaaggctgtggggggctgggagcccgcgctgcaggcctgtgcgcccgggtgcagctggcgtctggagcgtgctgggtctgggcttgggaatggggccggagaaggcatggaaggagagtgtgggggcgcttctcctctggttgttaaactctctggggctaagtgcttgctttggagaaatggggaagttgtgcggattaaaggcgatgtggatatggaaagcaattggcaagcaatgggcggtgatctggctgcaagtgacagagagtttgggggcctcccccctcggggcccctagagtgtgggcgcatcgctgccttcctgtcccctgcagggctcagagccgcatcccccacctttcccctgaactagaggcctgcgtcagcccgaattcccggaacctccaggactgtatagacgcgcccttgctgcattgttggctgcgggagtttgttggcaggcgctgctgacatgtgtgccaaggggctgggcattaataagccggtggccgcgcgggggtgggggcctcccgggtaagccccggcctagatccttttgcgcgcgcctgggggatttcggggaaccagcccagctgcgccctgagtgtgacagatgggccgcatggggaagtgagatctgcccagggggacggtcccagggagcccgacctctgggacctcggtggtgggtgcttcttcagccaggaaagcaggaaacactagggctggagtcctgggttggaattctagctcatttatgctctctggccctcggttttctcatcggtaaaatgggtacagtattagtatctaccacttagtatccttggaaagagtagatgagtatgtatatgtcaggtgcttggaacagtgcctggcacacagtgtcatagtctatggccccgggagacatctgatggccaagagccctgtggttgagggccctggacaggctgtgaagtcacagcgaattgagtcacgtagtctatcctaatg

SEQ ID NO: 63092 - DNA, 1123 bp, Homo sapiens
ctgcctcagcttcccaaagtgttgggattacaagcataagcgattgagcctggcccagagcccagattgaagacaacctttccaggctttctgctctgccttccgtggggctcttagcagacctttatgtgtgtgagtcattctccagtgtcgttctttgtttgagtcagcacctgactgcaagagtagggttgtgtctgatgcgacctccattcccttggtcctgcgtagtaggacttgataaaatgtttgactgtgtgtggacgggagttggcacttcattgcttactttctaggttatcgaaagcaggctctgttgggttagtgttgccaggggtggcttcagagggagacaacagctcagctttccaacctttgttccctcagcatcccataaacctaagtggttttttttttaacgcactgtgacctggaaacttggattgtttaaccaaaatggcccgctggcctccctccaaggaacacacccagcaggtattgggtgtggattgtgaaaggtcagattctatcgctgtcaagcccagccttctgcccaagctcccgtggagacgtggcagaaccattcagggggccgccctctccatagaatatcaggcagtcatccaaagatgtttatagagtttatgataacgtgggaaagtgcctctgctccagagttaaatctaaaaagaatacagcatgattatagctctgtgaaactcgcacgtacacatacagccaaggcctgaggggaagcacatcaccagggcagcaggaattgtctttggattggattaggagggactgtgttccttttctccttctctgtcatttctacattttctagaataagcatagggagcaaatacatgtttttaatttgttattaaggtgggaaattttatttttaaatattattttcagccaggtgcactggctcatgtctgtaatcctaggacttttggcggccgaggcaggtagatcacttgaggtcaggagttcgagaccaccctggccaacatggtgaaaccccgtctctactaaaaatacaaaaaaaaaaaaaatagccgggcatggaggtgggcacctataatcccagctactccacaggctgaggcaggag

SEQ ID NO: 63093 - DNA, 2012 bp, Homo sapiens
acccaatccgggtcgtatggattacctgtgggttaaccaggggtctccgggttaaccatccaactcagagtaaagtttctaaaaatgcgttttgctctaatacctattcggaaccaacctgggtctaaagactggagcaagtgtttattttccaaaacacggctttttaaaataattctatagggatcaccttgaacacacgttaagcaaaaaaaaaacctcagcgaaaacgcctcgcaatgtccagattaaatgcaaaagcaaaagcattaagtagctttctggcataaacatattgcagctgggtagcgtggccgagcggtctaaggcgctggattaaggctccagtctcttcgggggcgtgggttcgaatcccaccgctgccagggttgctgtctttttgtccccgctgcatacactcctggctcagttttgcgcgtgccatcagcgccccctgctgcagggcggggctcacggcctgcatgaatggcgcggcggagggggcggagccgcgtgcaccggggcggggcattgtgggtaagaggaaacgctggggccggcccgctcccccccacgtgtccgccggagtttctccaccagcaacatggccgccgcctgagaggagagccgggccgccgccgtctctgcagcccgcgggtaactgggccgttgccgccgtccgcgctcggcccccgcggagaggtgagtcccgtcttggcagtgcccgagctggggcttgagccggaccgcactcacgacgtgggcctgggctagattcccgagtaggccaaggaggcccgcgccgcgctgtgcctagcagctggaggcctctcgggactcgggcggggaggaggggcagccggctccaggccgaccccggactctgacttccttgacctgacacctgggagttggggaggccgcggccgacgctggcggcggtgactcagggtccagccgacctgccctatccgggcctgggaggcctcctacggaagaaacacctgtccgcgcgtcgggtgtagtggcggctcgcggcagggactgcgtggtgggcgtgagaaggggggcctgaccacccgcgagggagcagaaacccattggacagcgaggctcgggatcggcggcccgccccgatgggcagggagggcacctgcgcctgccggagcccccacttcgcagctgaaccggattagcctctgcccggcgaggccagggattcctcattcatttattcaggcaaccattcagtgtttaccgagccaactctgtgttccggatacagccctgaccattcggtccgaggaggtgtcagtaaacaaacaaggtcgttcctttgggttagctttagaattccttgggcttggaggcggaaagaagagatcttagcgatctccacagtttcctcatctgtgaaatagagataatagaaattcctacctcatagggttgtggtgacggctcagtagaaaccgggtgacgctcctgcttgcagcgtttgacttgtggcttagcgtcattacccgcttacgttggcagaaaacatgttgtcaagtaataacaaaccttcccagaggttacgtttattagcgtcctgtccttactccttccccgcaggggtctggaggtcggtacttagtttccctactttagggatgaaaatagggaggaataccaaacccagacaactcaggtgggtcacagatgccaagcagctgtggtgggatttgaacctgcacagttttgttctcgggtccaagctcttacccacttaaccatactgccgtttatcagaaaaccgtgcagtatagtggttaagaataagaataaggatctttgacatagcgagacccaagtttctgtcctcattccaccttggatgagttgcttatatctgaacctcagtctcgtcatttccaaattgaagatgataaatctctattgatagggctaatgagaagattaaatataaagtattctttgtactatattgagtgtcaacttcgtgccag

SEQ ID NO: 63094 - DNA, 1558 bp, Homo sapiens
caagcttctttatatcaagtataaattatcaagtattctttaggactcagaactacctttaaaaaggctaatgcataagccagacattaatttattaatatacaacaggaactgttcctgcccagtgacaagaatattcacatcctctattaggacacagctgccccacaaagggcatgtgaaaggccgattcatgaatgagagtctctggtagacatgggatcagaggagtctgatgggaggcagtggtatagtagctaagagcacaggctttggagtcagaacctggtttgaggtcttgctttgctgtttagaactgggtaacctacagcaagcacatttttctaatgtgagttctcctcatcaactacttcataaggctgtaaagataaatatgtgtgtgggagagactggactatgtcaccccaaagcatgcgtctttggcataaaaaggttcctgcctcctccctctctaccagggagaacaaaggttaaccactaacaactttagacctttatgggccagaagacagcaccagaggaatccacactaacaagctttgctaacgggcctttatcaccacttacttgccttcccacaagttctgcccctagacaaagttcttcccctttgtcttgtcacttctctaaaaaattaccattctttgttgaagatactacataagctggaattcaaagccacctctgagaatgactcatcccctgggtatctcccacacatataaatgaaatagatatgttagtaagcttgtttttctcttgttaatctgtcttttgttgcaggggtcctttccaactaagcactcatgaaggttgaggaaaaaaatatttttcctccctgacatatacaaatatataatttacaaaaacgttaatatatgtagagagctcagcatgagatctggcagatggtaaattgctcaataaggagaagctactgtcatctttatttaaagctacagttttcaaactttacatgtgctaagattcacctggaagaagatttattaaagtgtaagaacctgggtcccttcccctcaaacggctgagactggagtagagccaggattctgcatttttagcaacaaacccaggtgatattagtacaggcagtccagagatcacacttagagaaatgttgatcttggacatggaaaatcctggacgtcccctgccctgaccaatgtccttttctcttgggtctaggagacacaggcattcactggatcaatgatgactcttcagcttaatgctcaccgtctccctgcatagggctcagcttagatgcagttatccactaagattaggttatattttaactgtaccacagcagcattcatcatcataacgcttcactttggtatgttcttaacaatcattaattccctgaaattacaaactagttaccttaaccttgcttgagtgatccttcctaacttctcagtccaaacaaatactgaatttctacagatggctaatcttatccactgcattttaaaactttctattgtggaccaggtgtggtggctcatgcctg

SEQ ID NO: 63095 - DNA, 1555 bp, Homo sapiens
ccaagtgctggggattataggcatgagccactgcccccagcctactttttgttttctagagacattagtctttatatctttaaaggtatttagtccagtttctcagatgagacagcctgaagcacaaaactgttaattgacctaatcaagctccaaggtgagtcacagatcaaacagaaactcttaggtcaacaggttctcactctcactctcatcacgattctttgttatcttcatctgcagagttttaaggcaattgaaagagaggtccgcaggcttctttaaggtagagaatacaaatgttccccttgttgaggtacttaatttcttctacttgttttcacagattgcaatgagaaattagagttcaactatttgggtttttattgcctgctctgctagtgaaagcacatacaaccccaggcaagttaataccctgttttcaccaaatgaaaaaggaactatgtatggctcaacatgttccagaaaaaatgattttgtactcacagagtgtgtaatgtgtatacatagacccatatggaagctaccacactgtattaaagacaaagtataaaaacattacctaggtattacttaagtctttccttcttaaatgtgtgaagtggtaattcctcactgggaaggctcagattcaccaaagatgctcttaaccagcaatcaaagcctgagccaaggaccgggtgtggtggctcacacctgtaatctcagcactttgggacgccaaggcaggaggactgtttgaggccaagagttcgagaccagcatgggcaacatagcaagaccttgtctcttagcaggaaaaaaaaaaaaaagaaaaaaaacaaaacccaactgggctgaaacctctcccagaatccagactgtcttgagactatcaccactttcattcagttatggaactacctgtgctacttaagagtagccaggaacctcttccctgctcctgcagaaagagataccaaggacagcactctttagtagatagcaaacaaaaaagaatttgagacttgtccttatctcaaaccttatttccagtaaaacaaagcaccagcctggctcagaaacctgaagtctcgatctcctaaatatttataggctgttaaggatagaattttaacaagtcccaactacaagaaagctcctgtgaagtcacactgtataacaggatattacttcatctgttagcttaaagacaccggactttgtctttaaaaaaagttcatttcctgttgagtagcagctggcttccataaccaaaagaggccaaaagctggcagtaagcccaagaaagttttctaaataattagtggagggaatagaatattgaatgtcccttatagttttaattaaggcacaaaagaaaaggaaataatatagtttcgaagccttatacacctgttcatctctacaggattacaaaatgaattttcattaagagggtcttctctaaatcctattgaactggcctggtttaggcaactactaaaaatactgtagatttattgcaggcttgagaatttcaacatatcaatac

SEQ ID NO: 63096 - DNA, 1571 bp, Homo sapiens
ctactaaaaatacaaaaattagctgggtgtggtggcacgtgtctgtaatcccagctacttgggaggctgaggcaggaaaatggcttgaacgcgggaggcggagattgcagtgagccaagagcgtgccactgcactccagcctggggacagagcgagactccacctcaaaaaaaaaaaaaaagttttaagcagttctctccaaataagccttgctcagtaataataatgaggatgttaaaaaacggacagatgcctgcacataaaatcccactagacttgctgaataatctgtttaacaggacagacctgctcccaaacttaattcagcagcaagtgtctactgagggcctacaatgtacgaggcgctgtagtgggcacatcccatgaggcggcacctccaggcttctctagtgaacagattcctggaacattcactctatgggagtaggaatcctacctatccactcatgtggggaggtgctgtggccccagggcccaggcgaatacctggcaaagagcagataatacatttttgagaaatgaacaagttttaaaatctgttaaaagtttaggagttaacatataacttagcaaaactggggaaaggatacccttttattcacactgtagcctttattctttgacaggccatattcacaagttacaattgttggaatttcacatcttctactcgtactccatatagttggttatgacacagagggttaagtcaaagtccactgtgataacgtaacagccctttgaaaaacacagaaatgcaactggcagtaaagaggttcagatatgtgtgtgtgtgtgtgtgtgtgtgtgtgtgtgtgtgttttgagagggagtttcgttcttgtcatccaggctggagtgcaatagcacgatctcagctcactgcaactccgcctcccagtttcaagcaattctcctgcctcagcctcccgagtagctgggattacaggggcctgccaccacacccacctaattttgtatttttagtggagatggagtttcaccatgttggccaggctggtctcgaattcctggcctcaggttatatgcccgcctcggcctcccaaagtgctaggattacaggcatgagtcactgcgcccagcccagacctgtgtttttaaggttaaacttgaagagctgatgactttattttgatcagaggttaaagagaattcctcgtgtaaccctgacacgttgcacttgctgctcggtagattgaagtgttacagctgttgttcctaacaacctcccacagcgggagaatgcagcgtggactaaggcacctgatggaagagagccatgaaaacaattctgtgcgagtgcttcagtgcagttcaacaaatattaaaatcgagcttccagtatgtgccaagtattatgctagatgctggaaacacaagaaaaaagaacctgccccctctatgcccttaaagattaatgcttcttaaatacaggaaagagaaatatttagttgtgatgatacaaattaaattatagggaagtactgcagtggtacagtggttgcctcacaaatcctggagaaactatc

SEQ ID NO: 63097 - DNA, 1600 bp, Homo sapiens
caagccactttaccgttttaatctccgctttcctcatatggaaaatgggataacaaaagtgtgtaattggattgtttgtacctcaatggataaatgctgggatggacgccccgttctccatcacgtgcttatttcacactgcgtgcctgtatccaaacatctcatgtaccccacaaatatatacacctaccatgtaccctcaaacattaatttttaaaaagttactgtctcctggagttacggtgcggagcgcacagctcccgctacgccgcaaaacaactaccacctgcagcagccggccctccacgctggccatgaaaggcgctgggctagacagcctgcgacggggcggcttctcgggctatgccacttactgcgggacacactggctcacccgggtctgcctcggaggaatgcagtgaggattaaactagctaatccacggaaagcgcttaaaacggtgcctggctcgtccctggcccccacgcgcctcggggctgatattcaactgcgcattagcaaggccgtgggccccgtgccgaggcttcctgcgggcgggatccgcgggcacggccggcccagccgccaggtgagcctgagcccttcccggcacctgcatcctccgccgccacaaaaagcaactttttaacagtttcgcagcgggggcctcccgggccaggccgccgcccgcccgcggggcgcccccgccctcaccttgctggaggtcctggtggtcgtaccacggctcgtcctccttcatctcaaactcctctaccaggttttccgccagcatctcggctgggtcttctaggggcagcggcccccgccgccgtcccgcctcagccgctgccccgggctcttccccggcccctccgccctcagccagagccgccctcgggcgggacgcgccgccgcccagactccgctgcgccgcctcagccccgttcccgccggcggccgccgaccggccggctgcctcgactcgcctcgcgcctaccgacggccccaacggccgggcattacggtgcgaacgcctggagccggagtctcacgcagccgccagtcttcacgccgccgccgggcccaacgtggcactttggcagaaccctccccggccggggatgcgattcaaacccccggcggcgcctcaaccaatcgcgagcgggctgctggccgagcggcagggacttcgtccaatcgcctctctccaaagaccggcggctcgcccggtatcgagggcaagcagccaatggtgggtccggaataaacaaagaaggcggggaaagagtgaaggggtgcggccgaaagcccgtcccctgatctgcgctgtgaggctcctaggagggcgttctgggtttcgggctggggagctggcagaggcgcgtcttacccctgtggtgggtgtcccgaggccggcgcgtctgtggacaggcaacgcaggccggagggcctaggactccggcctctgagaggcgggcggttgtccaggggagtccttcgtgccggcgggaagcgcaagggtgccggaagcctgaggtccgccgcccggccaccccttctcgcatcttgactctgagatttgctccgggtccggcgggga

SEQ ID NO: 63098 - DNA, 1909 bp, Homo sapiens
gcccacaaggttgaggttgcagtgagccatgatcacaccaatgcactccagcctgggcaacagagtgagaccctgtctcaatcaatccatacatacatacatacaaacaaacaaacaaaacagaaaaacaaaagatggagaggagaacactggagacatttaaagacttcattatatgctcagccacgctgtctagtgaaaaagcactggattgggcatgcaggttctggtccggcctgtcatcaaccagccctgcaaacctgaacaagtcacatgccttttctgagcctctttcaaataagggagttggactagacctatgaggtcccctctaccagcactaacattctgcaaatctaccaggtaaaaggggtcggtggtatattccacaaatagtccagcaaaaatgttcctggcacattttccttctaatgaatttaatgaccatgttgtttttctgccggtgaacaagcaagtaaaattcactctcttcagcaaactgaggtcaacagcaaacttgtaattatttcaccaatttaaaccacatgcaaaaggagccagacagtgctggaagctctaaagatgcaaccagatttgccctggacaccaccgaagcctcgctccctccctttctgcctttccctcatcctgaagagaagaaagagccaatgggcttttcagagtaggaaagaatatgaacattttatcaacatgccagtacttggcctgcaaaaatatgagatatttgccatattagggcaacactgctggctgtatttgttttactgtggtaacttcccaaatgaggccacatgaggccaaagtacaaaacacctttattattccagggattacacagtagcttccagaagctactatctagggaaagcaatttagctacggagtcatctttccttaataaatcttaagtaaggaatgtttttccaaataaaataataatagtaaattgagtaaaagctatatgcaaaaacatgtcaagtccaaacaggtcaaaagtatttttggtcaatttcaacataactgcttatcaaacatttaccccaaaaagggatgcggcatgggcacaactttcctttctcttctctaaacaaggtaagagactctggtccagccgtaatgagaaaacaaaacgtattgagcatctattacgtacagaacattgtactagcaagatatccactcttatcatcacaatgggaaggggttttctagcgtcactgctcaagttttcaaagcctctttgactatctcaaacactgcgaggacgctccactgcccacatacacatccacaggaatgatttaagaagggttaagtaattataccttatgaacaaagctacaagaaggtcttggtgtaaagtcacagcttcttttaaaattatatacacaattaaatgaaacatgaaaagtttctatatacattttagtctttggggccttgatttttttccctaaactctaaatgcaactggttttaaatctctatccaaccatacttggcaaagaactgtaaaaaattctaagagaacagaaagcaatacttttgtggctcatgtgtaactggtcttagcagacttattacctgatcagtggggatctttgtttccatagacactgcttcccgaagtctggcgacagtcccagacagaggtacggccacaccaatcctcatgcagtgagaacatttgccttgatacactacagtgacatagagaggcctgtacagatcaaagtcagatcttctcattagtcacttatttcaactaaaatatagaagatgcaaaataaacctgagacgaaatcaacaaaaaactaaagctaacccacactgttactcggaagcccaaatggaaaaatttcacttggctctaagcagaactgtcaaa

SEQ ID NO: 63099 - DNA, 2311 bp, Homo sapiens
caggcttcctgcacccccactgctctctatggtgcagccagccactaaatgtctattccccaaaaccacacgccctttcatgcaactccaccacttccttgccctgcaaatttctattcatctttcagaacactgctcaggagccacctttttggtaatgctttccttgttccttgatgcctgctatacacaggatggtccttgagccaaaagcactggcatcaccagggagcttgttagaaatgcagaatcttgggcaccgctccagctctaccgaatctcaatttcctttgtagcaagatccccaggtgaattatgtgcacactgacgcatgagaagcgctgtctcagggaacttcctagatcctactcgactcagctcttcatagctccctgggaggtaaacccctcctttactcatctcctctgtgaagacaggaaaacccaaatgcccaccctccagcctccgtgacagccaattgacatggttatagccaatgaaatatcagcagaagcctgctgagggggcttctggaagaatttttatttccctaatgacttcctgccgtcctgggtagaatgccaggtgcagtggctgccatcactggacaaccatgaggtgacaaacctaagaacaaaaagccaatgatagctaaaaagacaacaggtggaaatacagaaatggtctgaatccttgttgggcccaacgagccactgaaccatagaaccatccacctccggaatcactgtgtgtgccaattgccaattgcaacgttttcattgcttaaggcactatcattagggattttcctttcttgggctgaaggcattcctaactgattaagtaagccttcaataaatgggaggtgaatgaatgaatgtagagtgaaacctactaaaggttcaggagattacttttaaaaagccaggcctctaagaatctgttcatgtctgccaaagcatgcctataaatcagtctctgtacttctagaattattgacccatttctgttcacagcttaatggataaaaaagtgaacacaaactcataaaaagcaatggaaatgttcacatacaaagatgctgtagaaactgattttcacattttggaaaagaggagaaaaccaaacttaaatactaggctctgacctcgaaaagtttacaaatgctgtggctacttacaggcaattgtaagcaaagaggggcagtgtggggtggggggcggggggtggacctacagtagtcagttctcctgatcattctccctttctaattttgagatctcagctgggcacggtggctcacgcctgtaatctcagcacttggggaggccgaggcaggtggatcaaaaattaactgggcatgtagcgggcgcctgtagtcccagctacctgggaggctgagacaggagaattgcttgattgaacacaggaggcagaggttgcagtgggccgagatcaggccactgccctccagcctgggcgacagagtgagactccatctcaaaaataataataataataataattttgagatcactgacatagatctttttttccagtccctatctcagtcaagtacttccattcaaattgccaagatcaaacagcaacgatttttttccaagaaaaacagcattgagcagcataagatgtaagtaaaaagtattaaacggggagagatgcacactggccatgtagttcgtcagcaagaaagcaggaccttaacaaagcagatcctcagctagatgaccttttcatattttaacaaaatcatctccttttacttaaatgttgttataaagaagctttatagcaccaatgggaaaccagtaccttttgccatgaattgaagacaaatggaaacccaataaaaacataaccttattaaattctagctactgttacctgccaatgcttctagacttgaagcttgttctgtttaaaaaaaaaaaaaaaaatgggtggggggtgaacaagaggtattaaaaacaggctaacatcaagctgagacttcgtcctgggcaagattaggataggaaaaaaaaaaaggaattaaccttctccctgtgtgacttcacgctgtttttgttttgttttgtttttacagatagagtttcctgttgcccaggctggagtgcaatggcacgatctcggctcactgcaacgtccgcctcccaggttcaagcaattctcctgcctcagcctcctgagtagccaggataacaggcatgaaccaccacgcccgtctaattttgtatttttagtagagatggggtttctccatgttggtcaggctggtctcgaacccccg

SEQ ID NO: 63100 - DNA, 2660 bp, Homo sapiens
gtcccagctattaaatactctggaaggtgaggcgggaggattgcttgagcccaggagtttgaggctatgtgagcactgcactccagcctgggcaacagagcaagaccctgtctctaaaaataaaataaaaataaaaagtagcctgtcagcacatcaatcacagcagcaggtttttctttcttcaaaccactatctgatattatctcgttaacttcttcaagtctttaataacaaaaataatagcagcaaatacacatgatatggaagtattttacttatcaggttgaaccctataaaagtgccaatctgtaaataaaaaacggttaaatatgggtaattccacagtgttcgatttaatatattaacttgtttgcagctcacaaccaccttacaaagtaggtcccccagatgaagaaactgtaagaacagagaggctgcttaacttacccgacgtcacattgctagtaagtggcagaaccaggatttgaacccatgctcaacactcccaccccacaaaaatgcaagttccatgaaggcggatagtcttgttcattgcaacgtcactcccattgcctattatcacagagtatgggcacgtatgtagtaagttctcaataaatacatgtttgagtgagtgagtgagtgaataaatgaatgaatgaatgaatctccttaaaatcactggtcgactgcccagaccactcggagcaaccaatgcagaagcctgccgggccaagaggaaccgagggaaggaagacctgggcgggcaggtgccccaggggctcggggtgcagtgggggcgcggcggcgcgcgggctcaccttgaagtcgcggctgtgctgcggggtgtactccagggtccagagggcccgcaccaggtgcgccagctgctcagtgacctcgccctggccctgcgcgccgcggcccgcaggctgctccgggtcaggcgagggctcgggccgccccgcccggtactggcccagcgccaggtactcggcgaagagctcggtgttgctgaggcactgcagcgtggcgttcatgaagcacgtgttgccgtggttgcggagccccgccacgccgggcaccggctcggcggcgcaagcgggcggcgcgggagaggcgggcggcggcgggcacggcggcggcgtgggcgcggcggccggcccgggcgggaagcagctgcggaggccgccgcggtctggggcggcgccctcagagctaaggtgcgagagcgtggacagcgtcttgagaacgcggctcatgaagctgcccaccgagcgtgcagaggagggcgaggagggcgaggaaggcgcggccggcccggacgccccggggccccccgcgccgccgccgccagcgcggccgctccgaaacagccgcttgctgaaggagcgcttctccttcccgctcgccgccgccggcggcccggacccaggcgccgttaccttggacatggcggcggccgcagacactcatcaccgcgcccgcccgcccggcccgcggccccgccacggccgccgccgcatcccgcagcgccgcgcctcaccgggcccgggggctcgacgccccacacacctcaaagcgcagccgagccagcgagcgagcggcggccggcggggccagcgggcgcgcgcgcggtccgcccagctgagccgctcacgtgacgtgcctcccggcgccgcccgcccggcgctgaagccgcctcggccgccatgttcactgtgggacggtagctgcctctccagccggacgcgatgcctggaggctgcgggcgcggtcctgctgcgtgaagcccgagggaggccatgtctagtgtgggcgccgtcccggcttggaggaaaaggctgggctcccgttggatggtggatccccggggtgggtctctgtctttgctggtcagatggcagaggcgggaacgtgcaggaatcaggatgctgtcagttaccagaccgtgcaagagctggtggacatggccctgacaggtcctgggcaagtcagccctgtctggctcccaagggacgttgcagatacctaccctctgggtgccagcggagcgcagtcacagaccctggcacgtcccagcgggcttttcttcctggctgcaccttggagtcccagcgaaacgctgttatcataactactttccttttcattccagcctttaaaactcctccgggctctcccatcattcatcattccattcattcattcactcactcattcattcagcagttactggggatattgcaaagaattaaacctattaaattagaatcaaatgtcatatccccagcggattaaattagcacggtttctacctgccctcttgcagcttacattcctactgggtgtttacaatagctgttgtgttccacacattatgccaagcatgcaatattttctttaatctttaattcaccgtctttgagattggtacagttcttatctgattcaaacccaagttttatttacaacccctatacttgacctctaaaccaaaggtcacgaatccacaaatatcacaggtcacaaacccacaaatgagtgaagaatcctggtgtttgaatcatcatattgactttcaagtgacttgggtctcagtgttgggggaaatataaggaatgatggggactatagcagacttcaaattaacatctttc

SEQ ID NO: 63101 - DNA, 1511 bp, Homo sapiens
cagaaactggagttgttttatcttatattctggaaggtgcctcaacaaagacatgttaagaactggttaaaacttctagcatttaaaaagatccatcttgtcttccagtgcctatggataataataaaaagggaatcccagagatctgctattgaattatttagagaagagctactgcaataagatccactcttttaagttccaaaaggaaacttcaggccagatgtggtggctcacaggtataatcacagtactttgggaggccaagactggaaaacccattatgcccaggaatttgaatttgagaccagcctggcaacacagtgagatcccatctctacaattttttttttaaacagaatttgtggggcgcggtggctcgcgcctgtagtcctagcgactcgagaggcgagaggatcgcttgagtgcaggagttcgaggctgcagtgagctatgatcgagccactgtagagagaccctgtttcaaaagaaaaaacaaagagaaagaaagaaaagaaaaaggaaacttatagcccagccagaggaggaaaaacaacacccaaaattagcaagtgttcaagacagcccggcacccagctgagactcccgctgacgtgatcaggagttcggggcttgctcttttgccgagggtatttgctgtccatgcgtgccccgcccacctgagtgcctcacgcaagttcggtgacctctgcccagccgagagcaggggagggtcccgcggccagggccccgagcggctcaccctccacggcgtggttcacctcttggatgaacagctgcagcttcatcaccagggtggctgcgtggccatccgccttcccggacgccgcctccttggagccggccctgaaggccgcattgatccactccttcacgtcgaagtcgtctgccaggaacttggagaagtccatggcggaactgcctcaggcctggcgtccagaacttaagagttggctccgggcggcaacggggatgcagaagcgagcgagcctgcgagagcaccgaggctagcctccgaggcgaaccccagaaacgccaggacgggtaacttgcccctttgcgcttccccgctcagcgcactcagtttgcggctgggaatgaccctcgccgcccgccgttcttcttccggaagtcgttggccgttaccatagtgactgcaggcgtccggagcgctgagcagaggtgggtgtgggaaaacgccccggactgagagctcccggcaccgacaaatatcccatgtctgctaacatttgccgaggactaaactatatgcttactataaagccctgacatacattagcgcatttacgcggtggctcgcgcctgtaatcccagctctttaggaagctgacgcgggagaatcgcttgaggccaggagttctaggacagcctgggcaacagtggagcgcagtgggcagcaatggagtgcaattgaacgatctctgctcactacagcctcaaattcctgggcaattgaacgatctcagctc

SEQ ID NO: 63102 - DNA, 1043 bp, Homo sapiens
ggtcatatttttgtctgtctcgaatcttttcctttcaggacaggccccttcccctgtgactgtggggtgcctgttaatcagtagggccccacttcccttgaaaagggatggatgttatctcacattggccaagtgtctcatatcccaggatacaagttcctggtccaaggtatggaagtaacaccaacaagcccaatcagagccctttcctgggtaatcaatatatgtgcttcatgcccggtgagagtttctgagataaagagggttaaggaccatgcaaccctggagctgtgggtagccactttcctgtttgtggagaaactgtcagaatggtgccaaagaaaagcagagtcaagagatacagattcttaaggcattgtttaagaacctatttggattcactcatatctgaagtcagatattcaggaatccccagtcaggtaagccattacattcccactttatcttcagttagtttgagtgaagattctttccttgacactcgacaggtaagtcccagaaaagaacctggcactcaaaaacgacagccattactgagaaatccccaacagatgactcacctttggcacagccacttgaaacatgatatcccagacaggctggggagccgtgctcatcatggtcaagagcagcacctgtacctctgggtgcccaggggctcccgtctgggagaagtggagcagaattctgaatccattccggtcatacacaatgagaggcggcaggctgcctggtataaagggcacaagcagaaggtttaacaccactacaaaccccccggacagccaggctggaaagagatgtacatgttatccccagatgctgttgcttctccatgcagaacatgtccaggactgaattcctctgcactaccataatccaagtcctcatgactctagctggactcctatgaccctccaaactgacctttccccaccatccaaccatcatacacacaccaccagttattaaaaatcacatttttgaggaagatacgatcattattaaaataatgcatgaac

SEQ ID NO: 63103 - DNA, 1072 bp, Homo sapiens
tcaaaaacaaaaaaaaaaaacaaccacccttccaactcccctctggccatctggtcctggcctgcccagcctctctgatgagaaaccgtactggttctgacagagcagctcttttaggctctggaaatgaggcgttgcttctcggggcagtacttctgacattattatcctcctggcccgagtgtccactctgttcctctcagtgccctatccatattcttccagacccatctgaatttccagctcctgcagaaaacttcctcccgctgcgccaaccccactgcttctccctctgattactcaacacagcacagtccgagttgaatttttcctgactgcagtcacatttatgtcacgtggaagtcatgtgtctagatagggagggtcaacggacaggtaatcaccatcttcctgcccactgactccattctaagtgaagagagaacacaagggcgagggaaggatcagtgattgattcctatattctcctccccacccccgcaaagctctctcccatgttccgtatcttaaaatcctatctacccttgagtcccaagtcacattccaccctaaagacttctctgacctttttatctcccgtccccataaaacaaaagctgtctcctcctcctctgaacagatattttatctgccccttctccgatagggatctccagctacacccattagtcacatgtacttggactcgctgagcctcagtttcctcaactataaaataaagaaaatagggccaggtgctgcagctcatgcctatgatcccagcactctgggaagccaaggcaggaggaccgcttgagcctaggaggttgagaccagcctgagcaacataacgagacccaatctccacagaaatttttaaaaaaaattagtcagaaggctgggcgcagtggctcatgccttaatcctagcactttgggaggccgaggagggtggattgcctgaactcaggagttggaggccagcctgggcaacacggtgaaatcccgtctctaccaaaatacaaataattagctgggcgtggcagcgtgcatctataatcccagctactcag

SEQ ID NO: 63104 - DNA, 740 bp, Homo sapiens
tcccagcctgcacaaactatttcagaagacttgagcagctccaaaaaatgacccccagggggccagcagctgggtctgaccaggccacagcaaccgccgtaggtctgtttgacaccaatctgctccaaggactagctaggggccagacagggcacggccagggagaaattcaaaggatgccttctctgttttgggctatcccagactccaaggtggtttatttatagctggcacttgagcaggacagaggggtgctgagaaatagcactgctgccatgtatttcctcactaaaagcagtgtttgtatgattcatttcaagcgtgctacagggccagaggtgttaagaaaacagctgagacctccggctgtgagtgaaatggctcatccaagagtgactaattcagaagccaaaccatcccacgtcagctgccaaccaaccaccggggtcatgaccctggcaccagcagccgcctgtgctagcaaggggagccccaagactgtgaggaagtggtcaccccgaggagcagaatgcaatccttcagcagtccacgctgcagggggactccttccctgggagggacacgtggaccccaagagtccggcaatcatacaattcagcacatgtgaaaacctccaagactcagcatgggaatgtcctactcatcacctgggagtaggaccaagtggaaggaagaaacagatttactgagcacccaacttttactaagccatggcctcc

SEQ ID NO: 63105 - DNA, 1002 bp, Homo sapiens
atatatatatacgcacacacacacacacgtgtgtgtgtgtttaaaaaaaaaagtctggccaaagtaaacacaaaaggtaaaaaatttctttttgacgcggtagccagatagagatctttctcagccccaaacagactgcatgtcttgcacgactgcgtctccttaagcctcaaggtccccgcttccgtagtggggttaataatagaagccagctcggggtgggaatgaggattaagcaggactaagccgctgtgagcacagtgcctggcgcaggggaaagcgcaggtcacgtagccattggggtgggggtcggggtcctgtgctgctgctaagttggggggtgggcggagggggaggggcagagctcagaagggggccgctgccccggcggatgcttggggctcctctcgggggacccctgggcgatcttccccaccgcgccgggcccaggccccctacccggccgccggcctcccctgcggccgcccgccccgaagcaaggccccgggaggcgggaagcgaggcctcacgtgcggcgcagcggctgcgccgaaggcctgccaggctactcactgagccacagctccagcgacgctgccgggcccgggggaccctgggccgactcggttcccgccacagccgccgccaccgcggtcgccgccatcgctccagccccgacgctgcggccgcgggcgccactgcctcttcagccgctgtagcgtcctggcgctctcctctgctgactgcgcggcaggagcggtggacacgtgacggggcggggccgctggcgccacgcccaccccaggccccccctccacgcgggaccggccggaacatttcttagtccagatccctccacccagcgctggtcttctaagaccactcaccgtacggttgccagataaaatacaagacgcccagttaaatttgattttcagaagaacacgaataattcttttagcatttttattttttaagagacggggtcttgctctgtcactc

SEQ ID NO: 63106 - DNA, 1738 bp, Homo sapiens
tgcccaccttggcctcccaaagtgctgggattacaggcatgagccaccgcacctagctggaacagatattctaatcgatacattgatgatgcagtaagaaaactgtaaagtctgagccatacaaaacctacactatcctagttgggtttttttgttttttgttttgagatggagtctcgctctgtcacccaggctggagtgcagcggcgtgatcttggctcactgtagcctctgcctcccaggctcccaagtagctgggattacaggtgcacgccaccatgcccagctaatttcagcagagatggggtttcaccacgttggccaagctggtctcgaattcctgacctcaggtgatctgcctacctcagcctcccaaagtgctgggattacaggcgtgagccaccgtgcctggcttctagttgtattaatctgtctttttacattggcttctgttttctaaatgttgttctccaagctgtcatatgtttggattacagaacaacttgtaagatgaatacttgttttaaatgtgcattattgaatatgttctgtccaagtgcggtggctcactcctgtaatcccagcatttcgggaggacaaggcaggagaactgcttgagcccaggagttcaaaaccaacctgggtaacgagaccttgtctctactagaaatttaagaaaaaaaaagaattagccgggcatggtgggtacatgtgtgtagttccacccacttgggagactgaagcaggattgcttgagcccaggaagtcaaggctgtggtgagtcatgattgcatcgctccagcctgggtgacacagcaagaccctgtctggaaaaaaaagtcctaagggaagctaactgtcagctttattaagaaggattgctttgtacctaccacctaatgtaaaataaaaccaagtaatacattctcaacagttatggcccccctccttttttttttttttttttttttgagacagggtctcattctgtctcccaggctggagtgcagtggcacaatctcagctcactgcaacctccatctccctagttcagctgattctcctgcctcagcctcctaagtagctgagattatgggcacacaccaccaagcccagctaatttttgtactttaatatagatagggtttcaccacgttgcccaggctgcagttgtgtcctttttttgctcataagagctagtactgtttaaggcccaaagtaatagtttttacagatcttttagtttcaactaagcttttacaatagaaaggacttgtattgcattgagtttataaacttttggtttgtgaaatccatacttgatctgttcttttccaaccaaatgtctaggcttgacttttccaccccaatgacatttcactttattaaatattagcagatatactttgataaccaacacagcttgtatgaaaactgagcaagtgtccatcatgacccatagggttctgggtagttgttaccttactgtttagtccacaaaaaataacgacttagataagctgtctgatttgctttcgcttattaaacacgttcaccatgagatgatgtgtgtaacatcagataccgttaaattagactaggatttaatacaaatcctgaaagcttaaaataaataaataaataaatggctgcaaggattccacaacagggcatgactataatttaacaaaaaaaaaaaatctgttggccaggcatggtggctcatgcctataatccc

SEQ ID NO: 63107 - DNA, 2162 bp, Homo sapiens
aagtgatccacttgacctcaagtgatgcacccacctctgcctcccaaagtgctgggattacaagcgtgagccaccgcgcctggcctccagaaggttccttctataggcttcacatagcgtgctccttcttgtcatttggatctcagctcaaatgttacctgctcagtaaagccttctggagcgtccttcttaatccccagtctcctatcctgtttcacttcccgcatggcacatgtgactctaaaattacacttattttttataagtgtctgcggcagccactagaatgcagacttccacagagcaaggcccctacctttctcaatgatcactgtatcccagcgtctacaacacctgttacacaggttgtcatcaatgcacatgtatggaatgcatgaaaaaaagatcgaaagagatgggatggcacaaaaaacacaagaaactcctggcaatttgaattatttccgctcctgcacctcagtttccgcctctgtaaaatgggctcgcgctgccttaaccctcctccgcccgcccactctgacaccaccggaaaggattcattcgggaacattcgtggggcggagacgggacagggggcctcggcctgtagcgtcacgtccgccagggttacctgtggggctgggagcgaaccgcactcgcaccgcaaccccggcatcagtgcccaggttggcctcgcgccgtcctacggggcggccagaggccgccgaaggcctctcgcgctgcagcagtctcctcaggagcgccgccatgtgggatggaatagcacacgtgggcttctccctgcgtcacttccggggactgcttccagccaatcggcctccgccacagccagcgcagccttgccccttaaagtcacaggccccctagcgcgaaatcccacgcccccctggacggctgcggccgcactcgccaccagggggcagaggccagagaaagggctatttcccggacccgcccccttcagcttgggaaagcgaaagcgtggcaggggccggacctgggagcggaggaggcgggtctccatagaaacctccacctgtttccggccgggctgtgagagattaggggctgctgcgggggccaatctcagccagctcgcctcttcccagcggcctctgcgggagcggtgggtgttgtacacaatcatcatggcggcggccggggccccggatggtgagtgcggcgggggtggcgggcgccgggccggggctgaggttgcggtcgctcctctgggggatgcggcccggcccgggagggagaaccgcggctcgggaacggaggtccggcggcgcccggacagcgtccgttcccaagcccagcccgcggcgagcgcccaccccctaacccccttgcaggcatggaggaacctggcatggacacggaggccgagactgtggctactgaggctcccgcgcggcccgtcaactgcctggaggctgaagccgcggcgggggcggcggccgaggactccggcgccgcacgaggcagcctgcagccggccccggcccagccccctggggaccccgcagcccaggcctcggtcagcaacggcgaagacgcgggcggcggcgcgggcagggagctggtggacttgaagatcatctggaataagaccaagcatgacgtgaagttccccctggacagcacaggctccgagctgaaacagaagatccactcgattacaggtaattcctgtggcgctgacagccagtcttccccaccccgcctcctgatggcccttgcaccctactaggcacctggtggctttccttgcatcaggtccccccatccttacagcagtcttctgaaggatacttggatgcccattactcagctggggaaagagactcaagtttatagagctagtaagttgcagagctgggattaaagccgaagtctgacgtttaggccccagtttctcattgatgttgctctaacatctctaattaaaaaatcacctaaggcgcttgttttacagcttctgggccctttcccaggagattctgattcagtgggtctgggatgtagccaggaatttatttttagcaaatatcttaggtaattcttctaagtgaagtttaggaaacgctgctattgactttgatgctggttcttcacagtcgattctgtttcttaatttt

SEQ ID NO: 63108 - DNA, 1546 bp, Homo sapiens
ccaatatgatgaaaccccgtctccactaaaaatacaaaacttagccgggcatggtggcgggcgcctgtagtcccaaatactcgggggggctgagggaggagaattgcttgaacctgagaggcggaggttgccgttagccggaggttgcagtgagctgagatcacgccactgcattacagcctgggtgacagagcgagactctgtctcaaaaacaacaacaacaacaccgaaatcactgcctcccggcgtttcagcctcacgcagatttcatcagctcaagctatatactacaggtacagtcgttccttggtatttgcgcagattggttccaggacccccgactatacccaaatccccgcacactcacgtcccgcagtcagccttgcagaatccgcttataggaagagcctgccctccttatacgcggggcggcacatcccgtaaatactggtcgcgtttggttgaaaaaaaatccgcatataagtggacccgcgcaattcaaatccttattggtcaaaggtcacttggcttgtttcctagaattacttccaggagtcctggacacaggcagaaggtgctgcagggaagagtaaggacagaactgcagagagaaaaccgctctggagaaggctgtaggccagtgtggctgcctctttgcatgctgctttcactacaatacggtgaccgctattttgagaccgtacgaggtgctctagccgcattaactcatctaatcctcattgctactccgcaaggtagagaccaggatcccaattttgcaggtgagtgtgagccaggctaggagacttgtccaaagtttcggtaagcggcagcccagcagtgctggactcgagtcagtgctcttgctcgttattacgaggtcacccggcctcccgtcaggggtcaactaaacacctttaggcagcggggctgcggagcgagccggctgccccccgggtcacccctgcctgcagctggcgcgccccggatgcccggcccccacccccaccgggcccaatccctgacccttgccaagcggcagcaaagtcaccacgagtcacctgcgcgagcactaaggccggctgcaaagtcccgagcctcgtctgggtccccgcggagcagagagcggtgctgagaggccgggccacggccagcatccggacccggggcagcggcgcaaaggccgcgggcaggcggctgacataggctgaaaggacacgagacgccatggctacgccaacccaggatgcactgcgccgccgcctccggaccagggttcctttccggcggcgcgcaggcgacgcacacggcagcgctgtcgggcaccgccggcggtggcggcccctggcggctcctggaggcactgcgccctcggagcccatccaggttcggggacgaacaactgcttggtgtcacaactaaactgtgcagacgtcgccgtctttccctaaacgacacggcacgagaaacctactttcattttttatctgaaagttctgaaatacatctgtttaaacgtttggggccgggtgcggtggctgacgcc

SEQ ID NO: 63109 - DNA, 1850 bp, Homo sapiens
cgggaggctgaggcaggagagtcgcttgatcccaggaagcggaggttgcagtgagccgagatcgcgccactgcaccccagcatgggtggcagagtgagactctgtctcaaaaaagaagaaaaacagaaaaggaagaaaaaagaaacaaaacgagggcacttccaaactacaacatactgtctagaacttaaaaaagaaagcaaggtagataaacatgtcctgacaggaaagctaaacggaacctgcagaaccattcagatcataccatttatgaacattcccttctccaaaaaatatacataggattcctttttggtggttagggatacgcccctcctccaccacccacattaacacacgaaaggacctggaagtaccagacttaaaagatttacttgaggccgtccggggggagaagtaaagattgagggtgtgggaggggggaggagcaagggtgtcgatacagctttatctacaaactgttacacattgtattaatgcgctgctactgtaatgaaatttgttctttaaacgccaccacgtgagcaccacgctatttccacattttcattttctgtgccccctcagccctaagaggagggggtggtcagatgatactgctgccctcggactgccgaggacacaaagccaggcctaaaaccctgggaaagcggggtcagagtcctgcgtccgcccttcccgcacccccggcaccttttccttctcctcacagctgaggggcttcccgggaggctcgtccatcgggcaggcgacagaacgaaaagagcagccgtcgccgaccccaggcctgccgacaccgggacccagttggccctgggccggggaggcgccccaggaaggaatggggagcccgggatcgcaccctcagtgcgcgatcagctgacccacgcgggccaagcgcgccctaaactccggccaattaaatccaccattcggcctgcgcacgcgcagccgtagacggccgagcagtggagcgaggccgcctaaaggagagccgcgctgtcgatgagtcccagtgggccacctggagcggaagtggaggagcggccggaagtagccggaatctctgaaagactgaccgactgactctgacaggatccggggctgagggaaggaggcggcggccatggagttgggcgagctgctctacaacaagtctgagtacatcgagacggtgcgcgggtccagatatgtatcctcctctttccaaccctgcgtccctttgaggcctggtcggcgttcccaacctgcccctaccccaccaacccctgtccctttggccattagtcccggattatctagcgatgccccgtgtaccgtctggctttgctgtttactccgcgcttggccagttgaggccttttgtatttattcctgattttctcataggggtaaagtgccttcgggaggataggacaagtcccatcctgttcatacgaattacagctcggacttcgggcccttttacactgccttttgtatctgttaacttgcgctaaaaacgattcggttctttttttttgaggaagggggttggggggcggagactctgtcgcccagtcctgagggccgcggcgcgatctctgctcactgcaacctccgcctcccgggttcaagcgattctcctgcctcagcgtctcgagtagctgggattacaggcgcccgccaccacgcccggctaatttttgtattttttggtagagacggggtttcaccgtgttggccaggcaggtccctaactcttgacctcaggtgatcgacccgcctcggcctcccaaagtgctggcattacaggcgtgagccaccgcaccctgccgatttggttcttt

SEQ ID NO: 63110 - DNA, 1041 bp, Homo sapiens
ttcaccatgttggccaggctggtcttaactcctgacctcaggtgatccacctgcctcggcctcccaaagtgctgcgattacaggcgtgagccactgtgcccggccagtgtcaccattttaaaacagactccatcttaaaactagcaaggcacattccctgctggtcacggctcatggtcataagatgtttacaactgaagaaacagcttagtaatgcctgcaaggacaaactcctccaacaacaaaatgtccagatgtcccgatctctcataacaatatatgattttacaaccattatagtcatgctttttgatatacttacgcactaaaatgccaaggataattttctttaaatcaacaaggtaataaatttgttatgctgccagcctactagcacatagacacagcttagcttttacatagataagaccctatattagaagagtttaaaataaagacagtgcattcgtcctgttgctttctgaggatgccctactctgcaatgaagtagctttcaatacactatctcttctcactgtactctgagactcatccttaattctttcctgtgccagatccaagaaccttatcttgaggtctggatggggatccctttgtcagcaacaggaaggagggatgactaagaaggacacaggggaatttttatatgtcactatacatttgccaaaatccacagaatgcacaacacaaaaggtaacccctaatatgaactgtggactttagttaataatgtatcaatactgactcatcaatcctaacaaatatatgacatcaatgcaaaatgttaacaatagtggaaactgtatgaggggagaggggcatatgggaaccctatactttccactcaatttttctgtgaacctgaaactgctctaaaaaagagtatattatgtaccgacaaaaaataaacattaaaaaaaattaaaataaggctgggcacggtgactcacgcctgtaatcccagcactttgggaggccgaggcaggtggatcacttgaggtcaggagtttgagaccagcc

SEQ ID NO: 63111 - DNA, 2842 bp, Homo sapiens
gagcccccacagccagggatccaacccagacaacgtggctgctgagcctggcaatgttgttatgcgatcagccctgtgcctagcacatagtaagagctcaataaatctgtatggtgctggtggctgttatcagttcttggcagcggctgctccacgatttccacttgtcaagagtatagggtagccagtttattggaagcagcagctagggagcgcttgcatagcaaccatagttttctgcgtagcaaccataatgctcacttaaattgggaggcttagaggagctgacggggcctgtggggaagggggagttagccggccacccctaggcaagccactttgcagtggaaactgcacgcagcccctgcaaggcgagctctccccaccgagcctccctgtgagccggtcctcctgacgcgcaacccccctcccttttgaagcagatggttcttcccgttgtccctgctctttcagtttccgcgctttggagtcacaaagcgcggggtcacgtgggcgggccgtgcgctttgtgacgtcagccgccccgcctctcggcccgcctatccgcgcacgccagccccgcctcgcgcgcgccgcccgtgcaatccctgcttaagagaccccgcagtggggcgctcgtccgaagccaggccgcgtccgccatagtacctggcttggaggtgtcgccgccgctcggtgagagcccccgagcggcagggggccaacacaaaaagggagccggagaagccctagccgctgcccagcagcttgcgggcgtgttctcgcggttccgggcctcaaggcgacggaaacgaaaggcgagcgaagcgcggaggatccggcgagaagaagcgtcagggagcctcggcggtgtccccggggtccgccgaagccacccggccgccggctggggcccggggtggtgaggaagtgctccgaggcctcgccgaggcctagcgccggctttgtgtccgaggcggcggcggcggcggggggaggcggagccgggggcggcctgcgggaaggcctctcctccgccgaccgcgcgttttcggcctaggccgtggggccgctcgtggcctccggggagcaggcgccaggggtttgtgtgcggtgggggcctgggcctgggcctggggaagctgacgccggtcgtccggaagccaggaggaggcgtgaggccgctcgtggactccgggcctaggccctctcccctcaaccttctcccggggcctgggtcaccccaatccacggagagagagacccgccgggaggtgcggccgcgctatggacccctgaccccgtggggtcgctcggactcttaacgtgtggactgaccgctactgactgcaccgccaatccccccgtctctgccggccccttagcatgagcgagggggacccagccgggtgacattgtgcccgttggcggattctcgatttcccctcttccccgtcctcgtcctcctcctcccccatgaagtgattctgagtatcggggggtctctggattattgttctgacgaacccctgcttgtggttggggggtatttaatctgaggccttagggtccttcggtgtctttgagtgttttgtgtgtacatattttgctcttaaagtttataaatatacgtatattgagagtgtccacgtctcctcgctgaaccttaggaatcccttggcaccatgtcctgtgtgcattataaattttcctctaaactcaactatgataccgtcacctttgatgggctccacatctccctctgcgacttaaagaagcagattatggggagagagaagctgaaagctgccgactgcgacctgcagatcaccaatgcgcagacgaaagaaggtaagggccgcttggtcttaagatatttggtggctggagagagatactagctagaaggtgcctggcaggaagctaaccgccattatgtctctagtggggactgttcgttctagtactttggatacaactttcattgatagccaaggtttgcagcagttggccttggagtttcactggtttattttatttctgcatacttgggtcatctgtaacaggctaacccaaaacgtggaagcctgattattcttctcgctgttttttaaaatgagggagggaggagagggggatagctatctagactctttgagtgcttgtcttagggcgttttctaacttattttccatcaggagggcaggagagcctgtgcaaagcttgtttgttcaatcagcaaaaaaaaaaacaaaaaaaaaaccaaaaaaacaattttctaacctaacaacattgtggagtttgatggcaaattttatgtcctgccttcctccctcctcgcatttatttatttggagttgcttgcctgtgttgtggataagggatctgaactttaatatttttgaggatttaatcagtattggaattgtttttggatcttgaaatgttctgatgtcaccgctcttgtcttgtgtgtcaattccagaattagtaatacggcaattaagtagttaaactgttagttcatcacattactcttaagctttatcaattcggtgaagatcaaaagtactgattttttttaaagtagtagttgctagattttacgtgactgttgatactaaggtactgaaaaataggctgctaccatagagtacaaataagccactgataagaatcgttagattctttctccttttcaaaagtattttgataatattgggaacttaacagtagataaatgtgacaagcagtctttcctgactctgaacttgttttggtttctttttctcagatcagtaatgctgatgtgtattttttagcagttcggtgttctaaaagt

SEQ ID NO: 63112 - DNA, 1481 bp, Homo sapiens
gtgcgtgcatctgtagtcccagctacttgaggggctgaggtgggaggatcacttgagtctgggaggcagaggttgccgtgagccaagataatgccactgcacttcagcctgggcaacagagcaaaaccctgtcttaaaaaatatatattttgcatattgattcatgttaaaaatatgcagaatcattactattgatttgtattatgaaatgttttcatttcaatgtaaattcttatacttttccagctaggtcacaggtttttctttctttagagcttggaatttatctcatttcatatacactatgatattgctgagaaaacttaagtcacactgccatgtttatctttgattattaaatatttggcaagcattccctttgtttcaagaaaatcttgaattggaattgacagtacagtaaatctttgtaaaactcttccatgactcaaccaatgaacattggcgaagacccaagatcaccccattcattgccttctatttctttcaaaaatcccatgcactggtggtgattcacagcatttgtatgtatacactgaacagttttaacaactgtacccatgacactttccatggagcctgcttccaaaagcagcacaaatattttcagtatttatcatacagtgggatgaagcaataagggaaacatcagtctcttgttttgaaactccaataaaaccagatttttgaccaaacatagctggaggaccatctggcatgatagaaactaattttttcatatctaagtgaaatttttttggtcagatgtaaaagatgtttttaaaatctatgctacactttggtaagccatgaattgacaaggttttttcataaatttggaagacctttttgaataaatatacccaggctattagttgggtggtatctcatggcatgactcagctaaattgtgcaattttccaaaatttgaatccatttagctttaatacgttctttcattctatgggcaattgtttggtggcttaattgcagattattcactttctgtaaaatctttatttttatttatttattcatttattttgagacagagtttccctctatttcccaggctggagtgtggtggtgcggattgaccccactccagttttgacctcctgggctcagtgatcctcccacctcagcctcctccccagtagctgggactacaggggtgcaccaccacactcagccatttttttctatttttcgtagagacaggggttcaccatgttgcccaggatgatctcacactccggtgctcaagcaatctgcccaccttggcctcccaaagtgctgggattacaggtgtgagccaccacgccagcctaaaatatctttttagtcttttcctcataattttctaacaaaatttttacaacttaaataatttttttaccatctttccattaaaaattgtgtacatgtgtatacgcgcatgcatgcaagaatcctagtcattt

SEQ ID NO: 63113 - DNA, 1532 bp, Homo sapiens
actttactcagtgaataagtgcaatttacaaagccttcatgatctgggccagtccctcggctctacccgacttcccccactgggcttcagtgcctctgaactacttaagcagtctgaaactggcatcacgcttgcctccatttttatcaccaaggccatgctttccacctggcattggccaccggaacaattagactcagcagagatgcagtctgctctagggcctacttcttaccctgcctttcccgccccctctgagaagaggtaattattcacccttaattaaggccagccatgaccttagatgggaaagaacatggaacatttgatgtcattgaattactcagtgagaaagtcattcttcctttggttgctttgcagcacttctgattaaaaaggaaaaagtttcattttgtgctagtgtgcctttaacacctctctgagccttgccaacctccctttgaacagagtgagcctgagtctctgaaagttcaacaggaaaagggtattagctggaatgcgacgacacaattagtctcgttgtttttatttttatgggttttttttttcatggcaagtgatgctaatttcacattttccacagtgcgatccagatttcttcaaaccacatttatttgaccaatgaaagggggatcaatttaaagagaaataaagccttaaataaataacaatgtgagtggtactcaggactaaaatagagaggggaaacttgagggatgagtttgggaaaatcctgaaatagatcatctgtacaatctcttctaataaaaatcctggcggggcattcacacttataatcccagcagtttgggagactgagttgggtggactgcttcagcccaggaattcgagaccagcctgagcaacatagtctctacaaaaaatttaaatattagctgagtgtggcagcgtgcccctgtagtcccagctactcaggaggctgaggtgggaggatcacttgagcccaggaggcagaggctgcagtgagctcagattgcaacactgcactccagcctgggcaacaagcaagactctgtctcaaaaaaaaaaaaatcctatagctcccataggattccctggttgtttgttgagtcatgcctttgttggacactagattcacagtctatgagggcagtgactgtgtctgggcagtgactgtgtcttctcagcctttgctcccagctccttacaaaagtgctggcaaattcaagcactccagtaccattcgtgggagaggactgagtcgccagtgattcatcatcctgtcctcagctgaattgtgtaatccccatggtgctggcaggaggaggaataacagtacttgttttagtagtaagagtagtaatagtaatagtagcaccaacagtaatagaagtagttgttatagtaataatagcaaccatttactgggttcattatatgagccaagtattaggcttaatgctatatgcatccactcattttgttctcgttatgaccctatgaggcagctacttttttttttttttttt

SEQ ID NO: 63114 - DNA, 2264 bp, Homo sapiens
ctgtaattttagcactttgggaaactgagacgggaggatcactcaaaggccaggaggagttcaagaccagcctgggcaacatagtgagaccctgtgtctgaatttttctttttttttttgagacagagtctcactctgttgcccaggctggagtgcagtggtgcgatcttggctcactgcaatctctgcttcccaagtttaagcaattctcctgcctcagcttcccaagtagctgggactacagacgcatgccaccatgcccggctaatttttgtatttttagtagagacaggtttcaccatgttggccaggctggtcttacgaactcctaacctcagatgagcctccccccttgacctctcaaagttttgggattataggcatgagccaccgtgcccagcctatgtctgaatattaaataaataagtaagtggtgctccagggggttccctcacactcttctctttctcttgctgcacccctgaaccctaatgacctatggatcttcgtggtagaggtgccatattggctgtgctcagtaactaggctcaaagtgctgaccgctgtgcctgtctggctgtcttagccagtgagatgctgtccttaggcaatagcctacctatatgtttcagccgatccctgaccccacacctctagacattctccactagccagcatgttgaacatcttttctcttgcttctttatagcaaaccacttgttccctgccaccccatgttccgccatggctaccacgtgggctgacgccttcacagacatgtttctctcgctctttggaattgtctgtcactgacccaatgcaataaggctgcccaatgtgctctggtcatcccaggctgaattaatcaaagtataaggcccagaaccagggaggtggacttgggtcagccctagcccgggaagaacattcagttctgggaggaagggtgccaaaaggcagttaagttcagaggcaattatccagagagcacgaggctcaaagccaaaatgtatgagtaacattgaaagaattgaggttgtgtggactgaagcagagatgactcaggcggagactattcccaaatgaggctgcaggggactgcagggggagcttcaggagctggggctcactgccactaagaattcactcctctgctggcatctggctcttcaatgctcccaagcctctctgagtctgagttccctctcccacccaccttactaacttttttttctttttttttttttttgagacggagtctcgctctgtcgcccaggctggagtgcaatggccatgatctcagctcactgcaacctccatcttctgggttcaagcaattctcctgcctcagcctcccgagtagctgggactacaggcgcatgccaccatgcctggctaatttttgtatttttaatagagatggggtttcaccatgttggtcaggctagtctgaactcctgacctcaggcgatctgcccgtctcagcctcccaaagtgctcggattacaggcgtgagccacagtgcccagccacttactaacttgtctaacctcctggcttccgaaacccatggccctgctatcccttctgtcattttcacaaatgattctgcctctttcctcaggaaattgaggccaataagaaaaacattctctgcaccatcaactaattggtatctgaacccatcctttcctccttccttctggtcttatggaagagagactggactccttccaaggttaattcttccacatggactttggagtccatccatcaactttgttcctatttcttccacatctcacactcctataaagaagcctaagtctttcctgtactgaaaaaaaacaaaaacaaaaaaaacacgcctctcaataaccccactgattgcctcctcttctatatgcagggaccatgtgtcttctctttcacatttcacatgtaaactctattttcttttcttttcttttttcttttttttttttttttttgaggcagtgtccacatttcgcgtgtaaactcttttttcttttcttttttcttttttctttttttttttttgaggcagggtttcgctctgtcacccaggctggagtgcaatggcacaatctttcctcactgcagcctctgcctctggagctcaagtgatcttcccagctcagcctcccgagtagctgggacttcaggcacatgccaccatgcccagctaatttttgtattttttgtagagatgagatcttgccatgttgcctaagcttgtcttg

SEQ ID NO: 63115 - DNA, 1283 bp, Homo sapiens
gataaaaacatatttaagtttaaaaatagcatcttgtttaatgttgcacactagaagcattttccattaaagtcaggaacagggtaagagaaataatatttccacttatttaatattattctaggtatataaagataaaaaatacaaattttaagaattacaaagtggagacaacataatgactatttgcaggtaatatgattgcatatctagccaatccaagagtactcctggaaagtctctcataaacaatgagttaagtcagtaatgtagttggttacacaatcaacagcacttctatgtttcagggaaaaagctaggaaacaaaatggaagaaaaccttgtacttaaaatagcaccaacgctcacacttacaacatcagcaacaacaaaaatgtaggaaaatgaaagaagaaataaatgaaaatacacactttgttcatcaattagaagatttcatgatgtaaagatgcacattctccctaaattaaacttaacctttaattttatatcaataaaaatacattatgaggtttttttggaagtagcctcattgagtctaaagttcaaatggaaaaataaacaagtgaggctagccaggaaaattttgaaaaaggaaagtaataaaaaagaattaaccctcctaggtattgaagcacattataaagctacatttatatttttaaaagtttagtacttggccgggcgcagtggctcacgcctataatcccagcactttgggaggccgaggtgggtggatcacgaggtcaggagatcgagactatcctgtctaacacggtgaaaccccatctccactaaaaatacaaaaaataaaattagccgggcgtagtggcgggcgcctgaagcaggagaatggcgtgaacccaggagacggagcttgcagtgagcccagatcgcgctactgcactccagcctgggtgacagagcgagactctgtctcaaaaaaaaaaaaaaaaaaaaagtttcgtacttgtgcatgaaaagaaaagcagattaatgaagcagattagaatctagaaatagacccaaatacatttgagaagctactaaatggtaaaaccatatttgaaatcagagagaaaaaaataaaattaggcagtgcagtaattgctgttagagtaattggctagccatttgaaaaacttaagttaaagctggatgcctgtctgattccttacgccaaataaattccagacagataaacgatgtatttatttatttatctatttttatttatgtatttatttatttatttatttatt

SEQ ID NO: 63116 - DNA, 2314 bp, Homo sapiens
ctacatatatacatatcttagtctatctacatgtatgtatcttactgtgtctacactaagatgtttcttactgtgtgagctacgttggaacctgctttttcatttattctattgcaaccatttcctccatgccgggattattcctccacatcatttttacagtgtcctaatacatgccagtagctgtttttgaagccatctagtagcgctggacattttggctgtttgcaatttttcaccatcatcaataccacagcttagtatctcgaaggtgaaatatttgcagatacccagaattatttcctgagcagaaaatccgtgcaggcggaactgctgagtcaaaggtcggtggataaaaatcgcttttaagcctcacaacccgcctcaggtatgcattctttacctgaggaggaacagagaagcagagaggttaaataactggcccaaggtcaaaaataattagaagtggctgaattcaaaagccgcgcgggctcatcaggctgcagttggggtaaaatttgcgttttaggcaattttttttttttttttttttggcgtgtgtcagtgggggaggggccgggcggcgggtaggaaacttgtgtcgcagcaaagaaggaggaggaggggagggactcccctcctcggtcagaccggagccggccgcaccgaaaaaggttggactcgggactccgcaggcccccccagccactccgcggggcgcctcggaggctgtgacctccagggaggtccggctgggtgcagcgtgacacgccggggcggttgccaaggacctgcccaatctgcgggtccagttgctagggcctccatcttgggggccagtggccgtggcgcccccggaaggggttgccgagtggggcattcacttccggtctggggcctgcggcggcggcggtgtcggcggcggcggcggcggcggcggcggcggcggcagcgggtcggtgtagaaaatggcgctggtgcagcggctcgggcctctccccgcggcgctgcggagggcttgaggctcgcgagcctccttcgccgcgccccacttgctcgtgcactttacacacatgaggtgagcggaacaagggcctccctccgggcgggaggagccgcgggcgctgccgcagggcccgcaacccgcggcggcggcagcagaggcggcggcgccgggcgtccccgagacttcgggcctcggcgggagggcgcaggctgcgttgctgcggaggccgagcgggcggcccgggggagcctcgctgcgccgcgccgcgggggccaggccggggttgcgcctcgcccgcgccgcgggaccgcagtccgggctgcagccccgcagctttgtgagtccccctccccccgtcctctcccctcccccatccggccccggcgcgagcctctgccgcagcagctccgttttcacgcgcatctcgtttttgtgtgtgtgtttttgttttgtttttgtttttgtttttttgtttcagagaattggaagctaaagctaccaaagacgtagaaagaaatcttagcaggtaagatgggcgagctttccgtctcccgccccacgataatcgtatatttctactccgattcgccttttctgggttgagaagttcccccgtgacattttcttccgcacccggagagcagacattcgggagaagcggcctgggggaatactggagggattgcggggagatgcgtaattacgcgtgtgtttctttctttaaaaaaaaaaaaaaaaagcgcaaagcaattcttgtaaacttagttaaagcattctcacccttttagaatttaattaggggacttgtgcattaattactattgtaaatggttgcaggcattgtgtgactcatgattgaggcggcccttatggcgggctgtcaaactgttttggcttccccgttattactttgtagctcaaattgttgcttttataaaaagatactatgtgttcgcattcccccccgccccccccccccccccatacattgtagtcaggcggattctgttgcattggacacagttttgtccttgaactttaccaagcataagctgcgttttgttttccttcgaaactccatttctgtccatgttcggtgtgtgctctttttatcagctggtaaaataattaaaaatcttttctccagaagaggttatcgttcctgttgggccctgctgcttttgcatcaccgtgaagggagaatttttttttttttttaaacgatgtctttatggaatggaaatatttagcttcattgagctgtaattgcttaagcatcaaggaattgtactgtatttaactcctttt

SEQ ID NO: 63117 - DNA, 1384 bp, Homo sapiens
gtagtttgctcttgatgattgcgggttttaggtttacattggggtttttaacactcacatttcaaatcgtctgaatattttgcaccgcgtagaattgttccaaattgctggcctattgagtttcataagatactaatctgttcaggtgatcgttaaagaatgtgttcagatggtgaaggataggcatcattggtttacccagtaagggattctctgttactcaaaataattatgggatcatttaaaggaaattaagtctgacatcactgactatttgtggtatatttacataaattttgtcaaaatctagtaaggaaatgttaagatatgaaaccattaaagaaaacaggttgagccattaaggtgtaatatcagcagaacagagcttagaggtctgtttctccttccatttttgttttatcaggtaactatatcagtataattcctatgaaggtgctctagtacttaattaaaaattgtctgtgccacaggtataattttaatattaggtagaactcgagtctgggttggctatttatcagagtttgaattccagctctgctacttgcaatatgaccttgactcttggcaagtcacttagcctctctgtccaatctataaaacgagcggcgtgggccagccagttgctgaggtctgttaggccctttgggttacataaaaggagtaaagtgctgtccgtgttcacagagggcatgtacagtctagtagaaagactatcataaatgcataaataacagtagtactaggtagatgacgtaggaatcaaaagataccatcccattcatgtgcttgagaatattcagtcggtcagaaggcatgaaaggaaaaacaaatatcaaagagattgtaaggcagtgtgtactaaggatccaatgagaggggagcatttcttgcaggttaaaagtgttctgaggaaggagagaggtgattaggtgggcagatgcttccttcatctccatctctagctgtgtttcctttttcacaaaaaagaatgtatctgtctttacccatagtgctctctccaggaaatcaaggcattgtattcattgagtaaccattttttgagcattttcgatatttcaactgtgggactgggcactaagccagggaagaatgtaagtagttaaatttattgattgcttactatgtgcctggcacacttttcctaagattttacatggactcatctgatccttgaaaaaccctgtgaggtaggtagtattgttatctccgttttacagatggagaatttgatgtataaagaggttaagtaacttggaggagaccatatcactggtaattggagtaactttttaggcttcgaacttgcaaaatttgaaaatttcttttggtaggcgggacc

SEQ ID NO: 63118 - DNA, 2153 bp, Homo sapiens
tgcctgtaatcccagctacttgtgagggtgagggaggagaatcgcttgaacctgggaggcgagggttgcagtgagccgaaattgcgccattgcactccagcctagcctgggcacaaaagcaaaactctgtctcaaataaataatcaatcattctaaccttaagcaaaattggaaaaatgttgcaactaatacctgtatctctttacctagttttagtgattattaatattttgccacatttgttctatcgtgacattgcacaccaaagtatggcagtaggtatctcacagaataagggcattctacctgacagcaatcaaatgatcacccacaggaagtttaactttacaattctgtctggtccctattcagattttcccaattttctcaaaattttttttaaagttgtatttgttctttcactcaattgctgtatcctgggttgcatttagttgtgtctgaagtttctcttacattaggagcattttcctgcccttttctgcttctctcttgacaatgacattttgaaatagtccagtctagttgtttttgcagactgaaatttgcattttttgggtcttgtctgtatgattaggttcaggttgaccctttttggcaggagtatcccataggtgatgatgtgtttgtcttcagtattccctccccacagcattttgaagtaaattaaccgaaaggttatccaatattcttacttctacactgacttggtgtttctttcattttaggaaatgccaaacaattggtttaaaccgagatgtaattttaaatatttgaggttacagtaattacaggtctttgtatttaaatcgatcagccataatgattactgcttttatgaagatttatgccaaaggtagctcccttactgtgggacataaaagttgcttgttttcagctttgaccagtgatgaactgataaccctggtaggaaaatgaaacattggggctgggcttgtaatacgctttcttaaaagaatgccccattgaaattagagtggcacggtgccaccagaccaagggttctcatcccgatgccacagagggaccacaggtgttatgaagtggtttgcaaaattgaatgtatgccaaaataaaataataaaaataaaaataaaaccccacaacaaaagcagatatggtctttagtgctcattagatctcaaagggtcattactcctcaaagattaagaaactgcttctttatgaggaggttgtcagaggagctgaatagtatcaataagaggaagatgtttgagattcaaaaggaagtaatattcgactaaggcatagcttctttccatcttaaaaaaaagccacccatgaaaataaatatagtttaaatttcctatttaagatgtcttattttaaaaatgatttgcatactctgtgtgtttgagttggctatgaaggagaaatcctagcatttccactcttgtaactagggaaaagcattttgaatttttagcagtagtatattatgtgatgatgactcagctgacttcccgtttcaaatggaatgttcaaaacagattgaaacctggttgaagaattttatactttgaaccttacaagatattttctgcaaacagtgactgattggattttgtataataacaaacaagattaagccaactcagttgttttgctgttcttattagtggttttcagtcagggagcacttattgagcagtttgctgcaataatattgaatatttttagagttatgacgtctgtgttttgttgactttggtcccttctttctcccattcttttgaagtttccctaaaacatgtgtgcacagacgggagagaatggtagttaagtgtgtgctgattttaaatgtccttttaaatatcatttattccttgataattgactgtataactgatgtaagagaaatatgttttatatgttattccacttgtgaatctctttgcaatgtgaggcatatagtgaaaatcttacaaagatagggtcataaaatgtgcattctctacactgctgcaggttaatcgtcctcgagccacgtttctgaggcctgtcagtcactatttcttagaaacctttgttggctccttcccagtgactctggaattaaagcccagactcttgttttttgctcagcttatcaa

SEQ ID NO: 63119 - DNA, 1172 bp, Homo sapiens
tgctatgtccatctaattcttcctattttgtgtagagatgagggtctcactgagttacccagactggcctctaactcctggcctcaagagatcctcctgcctcagcttcccaaagctctgagatgatagcatgagcccctgcactccacctctcctattctttatagcactgagggtaaaaatgaaaaacctgacagagaaacaatcggaggtgacaagccaagggtcgagcaggccacatctggccctcaaggatgcgtaatcatgaaactttgcagaacttctctagaacaatcagaagttctgaccccattgggcctgtcttcccccacgtggagctgggtcgtggctgtcctcttcagctgggacacatgctctcgggtcagcctcagctccacctgcccggcttcactcactaccacgcctcttctgtagacaccctgcacatggctaaggctccccagacattcccaagaagtcaggactggaccccaggttggcgaagcagtgcaccctcggtggcaccccactgcctttcctggtgctgtggcctctgctgcagatcacagattcatggccttctgtctgtccctcttctccaatcccagctgttccttctgtaaatctgtcccccagggcaggtccctcccccaaaggccccattcatactggtgttggtcagtcacccagtgtttgctcacccaggccaccctttatccagtcaagccaccctccactgctcctgcaggactctagagccaggtggcctgggctgaaatcttgctgtgtcacttacaacccgggtgatcctgggccgatgactcatctcctctacctctgttacctcgtcagtaagatagagataacaggacctaacttcgagggttgttggaaagaccaagtgagtaaaggcatgttgtgcccttagagcctggcacgtgttcatcactgctattatttctggctactcggtgccaggacaggggcctcagctgagggccccccagagcctggcaggcccagtgaaggagtgagatggggaggccacgactcctccccagtcagcagctgtcctgtggccatgggggcctggtgaggccagatcttcaggttgttctagaaaagtgagtattctagaattatgtttcaagcctcttggtttgcaaatacta

SEQ ID NO: 63120 - DNA, 2233 bp, Homo sapiens
aatttaaaatattcacagagagaaatcaaaggactttctaattaggcagttatggggtttggaggataaaataaaagcgaggcccagcacagtagctcatgcctgtaatcccaacactttgagaggccaaggcgggagaactgcttgagcccaggagttcaagaccagcctgggcaacagatgagacctcatctctactacgaaaaaaacaaacaaacaattagccaggcttggtggcgcaagcctgtagtcccagctacttaaaggttgaggtcgaaggatggcttgagcccaggaggttaatgttgcaatgggccgggatcgtgccactacactccagcacggacaacagagtgagaccctgtcttgaaaataaaaaataacaaggaatataagaaagccccccagtttccagcctgcataaaagggtggatggaattcagagagtcaacacagaaggaagaactgatcatgcatgctagaatagacatctaagagaggaagttttttgcttggttgaaaatggcttagaagtcactggcataaacacatcagttagaagccataagaacagaggaggtggcccagagaatatgacttggagaataagagaagcagagaacttaatgaaacaatgtgaaaagggtaagcagagcagaagaaggcaacagaaggacaaggagctccaggaagcagaaccagtaggctgggtctggttccgagggacagagctttgaggcaagtgtggaagcataggtgtatgcaaacttccattcctatgacagacatgattgcagaatcctcactgttgtgcaagagtggaaaaaccctgctgccagggtgccccataaaagtctgtaggaaacataaaagggtaacacagatcatctgcatactattaatagttctcacttttgagacacctggtgacaatacaccaaatcatagcttccctgtgtgtcaccgaaactgtcacttcaatgttgcatggggtctaaggtttaccgcatgctcataagctggggacttgtaaaagcaaggatggaactccctcatgaacaaaggctgctgtgctccactggctctacctaggaactgaacgctctgaacaagtggaccttggaaaagacaccggatggctctcctagagtccatccctcttcctctctatactagtatcctgatttttctcagggatctaccctggccttgataaagtctatgagctaggagtaggaccacagcccatgctctaggtctgggccaaactaacttaaaccaatcggcacatcccatctcctcaccccacctcaccccctatccatggtaactagggtggaacagaaacagtcaaaaacggggaatgtaactccacacaaatcaatgcaatggaacgcgctttcaatctgccaagagcttggaaaaagcagctttctcactccatcaagaaaaactactggggccaagtatggtggctcatgcctgtaattccagcactttggaaggcccaggtgggaggactgcttgaggccaggagttctacatcagcctaggtaacaaagcaagatccccatctctacaaaaaaatttaaaaaattagccaggcatggtggtgtgtactgtggtctcagctgcttgggagactgaagcaggaggatctcttgagcccaggagtttgaggctgcagtgagctgtgactgtactaccacactacagcctgggtcatggagtgagaccctgtcaggaaagaaaagaaaagaaagagaagagaagggaaaggaaaggggaaaggggaaagggaagggaagcaaaaagaaaagaaaaaagaaaaagaggcgagaggggaggggaggggaactactgggagagaggctctctactcccactggccacactcaaggaacaagcagcccatagaagctgccaatagccaacttgccatcatgaggatgcctgtctagggacaaagcagacactgagggcacaggagagagaaggaaagaaactgggtttttcattacattactaaaatgttagataaaccctgacctcaagtccatcccaacctctggacttttcagttagcaaaccaatacattacttctacttcaatgtcaatttaagacaggctttccgctttctgccagcaaaagatgcataaccgacacagccattctcttatcaatgacacatgatcgtggagcttttaaaagcacctggagaagattccgtg

SEQ ID NO: 63121 - DNA, 1268 bp, Homo sapiens
gaactgtgggtctgagtcacatctgatactcacgtgtctcctctcggcatcggtgccatgctggccctggaaacatgccaccaagcgcttatgggaatggtggcatattgaccgcaccgtgtccaggcgtctctcaatctgacaaggcagagacaaaagagaacaaattcatcctctttcttttgtggtgtctgcatgctggtaggaaaagcatggctgaatctacatgcagggaaaagggatgatcttggctacaccttgctatcacactgagtggcgccagtcagtttacacactacagcaccagaaaagcaccaggttggaccaggcagaaatgaaaatgaatgatccgggcccagacccactgccaactggaaaaaaccagagatgccaaagagctctctccagttcatggcaactgagccttccacacaatgtacatcagacagaagcagcaaaataaacgttccacaatttaactgcaagatctgtgttttcaaaattattccttattgggtttggggtgtgtgtgtgtgtgttttaaataaacctctaaagcagaatggacagtcagcaataagaaacactgacttaggggacccacgcatcataagcagcttcccaaaatactattgctagaatatggctgtttatggcaaagagagccgctttttacaggaaggaatgccaaaaatgtgtattctgatgactcatgaagaatgagagcaggccctttgggatgctttctattttaaagataaatcaacaaattcaaaacagaatacatttgaccccaaaccattttacgcatcgagatggtctgtgcctctttctcaaaagggcagcgtttcttcagatccaagcccatagccccaggactcagggctggcaggcaatgggagatttaggagcagattccacattaccttccccaaatcttgcaatgaccagattttcaaacattagaaaactaatccacattcatttgccaccagagaaaagcaaaaaatgaacaaattccatgatttaattttgattccaatttccactagaatgtaaactccacaaggacagaagcctggatctgttttgttcactgatttctcccagtgcctgggacgttatctttcacagaaacagaaggtgctcatttaatattcgttgagagggcccatgtctactgagttcctgtgcaaggtattcaagaatcaacagcaaataaatgctggttctgccccgctgggatgcacagccccctggggaaatgc

SEQ ID NO: 63122 - DNA, 1642 bp, Homo sapiens
atcagaagggggcattccgagctggcggagtctcaactgtcagaccataataatttttattttattattattattattattatttgagacagagtctcattctgttgcccagactggactgcagtggtgtgatctcagctcactgcaacctccacctcccggattcaagcgattctcgtgccttagcctcccgagtagctggaattataggcacgtgccacttcgcccagctaatttttgtatttttagaagagacagggttttgccatgttggccaggctggtcccgaactcctgacctcaagtaatccgcccaccttggcctcccaaagtgctgggattacatgcgtgagccaccgcgcctggcgtgaaggaaatttttaaaagagaaagaaaaagtatgtttcagctctgaacagtgaagggagtcaggggaaggctgtcaatgaaccggaaattcagaacagggattgtatgatcttggccgggaaccaatgcaagagcaggaaaagctcttgggccagaaagtaaatgagacccctagaatgacctcgaaatgctgctaagctcagagtagtgccaactgtgggcaagggaaagaagcgcacagctcctccagtctacacttaaggcaatggcacgttagccagaacagggcattgccatgggggattctaacacttgtcatcatggcactgtcccagtcaacctggagatgcctacagggtggctcactcaccagtttctgcaggaaactggaatgctgacctgactcaaatacttcccagggccagaggatcagggcctagagacaaagccaaggccccagcttccagaggcagccaattttcaactctatgaaaaggttccaccagcaacaggccaacatatgctaccctagaccttgcttggcaagcaaggtgccaggcattgctgaagagccaaacacaggtagtcataccagttagggaagggaagcagggccccagctgaccatgaggtcaaagaaccagactcaaaaagaaacctgacagtcagcctagcaagaacacacctggcatgagatcgtcatagtttcaccattagacgcccccattcctctcgccaatgcctcatccctcctttagcaaaatgccaccagggaatgggtaacttttgcctttcttccctagccaaaacccccaaatctggacagggccctgtatacctctcacagaatccacctcaactctaaaatgacttccttctgtaagtacgagtatacacagagaagtctcaaggcctattaaaattttcacaagttcaaaaaaagagattcaacctgagaatcagaacaaatatgtcctttttcagagcaaattattttttaaaaaataacagaagaagagaagaacttgctctacaatcccaatgtgggctataagcagatgtgggaaagttagtaatagctcagaggtatgctagagccaactcagaccaaccaaccatgtgcatcttctcccaactccttgctcagtaacctcacactggtacttgaaatcaaaaacataaacaactgcaaacaattcaaataggagcttggcagttgttaaacagttatgagcacagtgctgcaacagccacaaagaaaataaagcaaacat

SEQ ID NO: 63123 - DNA, 1196 bp, Homo sapiens
attggaaaaaaacaaaataataatatttggtaacacatgaaaattttatgaaattcacatttcagtgtattacagaagtttcactggaacacagccaggctcatgcatttgtgtgctatctatggctgcttttgagcttcaacagcagaactgagttgttgcgaaagacatcaccgtatgacctgcagagctcaaaatatttgttatccagccatttacagaaaatgctggccaaccccaggtctctattagtaactcttgcaggatgtggtgcaaaccttgatagctaactttttagaatcactttgaggatgggtgaggctgggctggaggtgtattttctcttcctcgacattctgcctcataggcaagcagcagctgccaaaatgaacaggggtggctgcctctgataattcagtccaaatgcggaggcacagcccagtgctggtgacactggtgacaggaagaaatcagaagttatgtccctcctgcacctacgcacctccatccactcacctcctcaaaaacactgaagtattttaatcactgtttgctttctggtctctactgataaacatatttcgggacaagacctaaataaacacagttctctacccaagagttcagcaacaataaacatttcaggcttgcagaccatactgtctctatgtaatgactcagcttgccactgcagcacaaaagctgccacagacattgtataaatgaacggacctggctgtgccccaataaacctttatttatggacactgaaatgtgaattttgcctaattatcgtacgtcatgaactactgttcctcttttaatgttttcaagtatttaaaaatgccaaaaccattctgagcctgcagcagccgcatttagcccacagaccagagtttgctgacccctgatctatgtacaagtgaagtccattttcccatgaaacttcaatcctttttaatcacttcccaaatccaaattcttcttactcagaagggggatttctacgttttcccaacttgcatttcagaggttgagagacgctggcttttcaagacttttgccaaattgctccttttcaatcctttcagccattctggggccttgagagcaggggctcatctttctaccaccaagagcacccccaacccaaggatggcaaatatgtggccgaggcgccaacactagcatcaaac

SEQ ID NO: 63124 - DNA, 2203 bp, Homo sapiens
acaatttcacatgagagatcactgttctgctggcttttacacttgcacactgactgatacgtcaattaaaatgaaaaaatgaagcatggagagaatttttaatgagctcattttcaatgctagttaccaggaaatatctgacgcatttttgagaaataagacagactgtgactaatctaccaaggatctgaatattgtatgtagggtaacaacataaacattactgcatgcaacatgatttgtattcacagtgaaattacagagcccacccagggctaggcagtggatttcattctgctgggaatctgattttgtgcaacactgtcacctcccgttacaagtgtttacaaaatccacctgagcctctgagcccagtttggatgcaatagtttgatttcatagtgagctggaggactactgaatgagtttttactgttttatctcattagattagctgtcgtcttagatttctgggaaggaatctaaaatctacttaattggatttttaaaataaacgactctctgaaactttaaaaatgaagcaatttgttatacctgccacaaagcagtttaaaagccgtaagagagtttacagaactctaaagggatgttattgggaaaaaattgttcccatgcctaacactgaaaagaaaaaggatacttaacggggggaaatgattcaacagaaaatattttggcaatgacgtgggaaaaatagatctaatagttctatactctgcattatttccccaaatgatggtattttgcccatgtatttacagcttctctaggacagggttataacatttaatttttactttaaatgacaataaaagccttctcaatcttaacttaatcttgataatattatttgaattccagtgactaagatgaacagttacattttaccctaaattgaattgaggtttatcgttttcctgcacatgtaagcttacccacgcagcgttttgttcggtcagttggctttttcccctctggcacatgaaatggaatctatttgctatccctgctctaaccacgtggcctgtctcaaagctccaccaccgattcttgcttatagcaaaatctgaaagaaatctcccttctgccaccaaccacctcaacggcctctcaggcattccaagtgccttattccccagcctgctccagtcactcatggtacctgcttggacctggaggcagctgagtttgagattttaaaactcatttaagcaggcaaaaatatgtgagaaatattttgcaaaatattgcaatgcagacagtacatccacatagagctactgcctaagggaaaggagctcaggaggagtccagtttactgctctggtgaggcagccagaggctaggaggagctgaaaagccacacaaaaagtctaaagcaaaagtgcccaaggccaggccacacaatgtcaggggctccctccacacctgggctctgactcagtgctgtgactgatggctgctggggaggtgcacagcgtctgaagacaggttgtgcaggctcccttccaaactaggtcagcacatttggactttgacaagctcatccccataaaaacaggttgtaaatgttaagttctcagtccaacttacaaggactcatttagctcacagattatctaagagacagccctggcaggggcctattgagttttctgagccactcagaaaaatagtaaaaataaaaactagtggaaaaagatctaggaggtaacagtggttcttaaccagagctacacatgacagtcctggaggctctgaaaataatacaggtgatgccacttatatgaaatggccagaaaacgggaatctatagaggcagaaagtagatgagtggttggctttgggggtggggggaatggggattaactgtaaagaagtatgaaggctctcatttggggtgacaaaaatgttctacaattgggttgtggtgatggttacacaactctgtaaatttactacaaatcattgagttctacacttaaaatgagacattttttgaaatatgtcagacacagaaagatatataccacatgttctcattcatatgtgggagccaaaaaaaataacgtcataaaagtagagagtagaattgtggttattagaggctgggaagcatagggtggaggagagatagggagaggttaatggatagggataaataattatagctagatgggag

SEQ ID NO: 63125 - DNA, 2294 bp, Homo sapiens
ttgcagtgagctgagattgcaccactgcactccagcatgggcaatagagtgagactctgtctcaaaaaaaaaaaaaaaaagtaacgggcaaaaacatgtacccatacagggcaatttttattatccctgtttcgtgggtgtgcaggcagacacccattaagtgaattacacaatgtgaaccagtctttgaaccttcagaaagagtaccttcgaggccatggaccaaagttaaatttctcttaaatttgcaagctatgttctgaccctaactccgccacaaactaaccatagcatctaaaaatacatcccttaacctttctgccccttactttatttatatttgcatcaacattctcacaggacttttaagagactagaacaaaatagcaaaggagggaacattttgaaaccttccaaactgggctttgcaaacgtaggactgtaactccaaaaatgacaaatgttgcacggtttaaacaggcatctagtgctgaaaatctgaataatggtggctcctctggaattctacaataaacacacgtcacagatgtggcccaggaagttccatgcttagcgtggtgcacaaaatgaagaaaaaatagtcacctggaaagtcagggcgaggcagtttttgagggatgatggtagattctgggtggggaacaccctaaatctccacttgcccttttctaaggtcaaagaaaggagtgcctgatggatgaaaggacactgtaaataccttaaaacagaaatctgattgctttttaatgaggtgttttgtcaaaaaagctattcaggataagtaagccttaactgagtggagctacacagcccatcaacaaattcaaccacaggctggtgtcatgcatactttgcactaacttttcatttggttagtcactgaacaaatattttcgggttcccttccatgagccatcatgagtaagatagggcccctgctctgccagagctcaaggactatcaaggaaaataagccattatactccagtgcaaggacggttccaacagggaagtgcagggtccctgggagttgtcactatcaccacagcccacatttattgagctcatatcacatgctcagcactgttccaggtgctttgcaagaactgaactctacgggataagtattattacccccgtgttacagaggaagaaactgatgcacccagggaacttaagcgattgcccagggtttcccacctaggctctgaatctcggcaatattacttcagggaccctgttcttaaccacctaatacacactttacttgtattaacccacctaatcctcaagacaaccatgagactgataccactattataacctgtattagtctgttctcacattgctaataaagacatacccacgtctctgtaatttacaaaggaaagagatttaattgactcagttccgcagggctggggaggcctcaggaaacttacaatcatggtggaaggggaagcaaacacgtccttcttcaaatggcatcagcaaggagaaatgccgagcaaaagggggaaaagtcacttataaaaccatgagatctcatgagaactcactcagtattactagaacagcataagggtaatggcccgataattaaattacctcccatgggatcccttccacgacacgtggggattatgggaactacaattcaagatgagatttgagtggggacacagccaaaccatgtcatacccattttagagatttagaaacctaggcacagagaagcacattaaattgttgcgggttacagacatgacaggaggggcctgaatgcagacctgggatatcagaaagatatcctgaaactggtgatggcttctgagacctactggatgagttggaaacccagaggctggatagtacaagagcacccaggtcagggagaagagagggaagagagagcagggaggagcagaggcaggtgacatggctgggggagaaccccaccccatttaagctcaggtacacgggatctgctgaagattgtgagcaaacttatttgctgaatacataagtgactaaatgaaagttttcagtatctgggccttgtactgagtaggagccagcggcaatccaccaccagggtgggcaggagagccaagggccagcccaattctaggccatcaggtgtgcgaaccaaactgaaggactgcggaaaacacggaaaggaactctgccggactctgggccttcaaatgagtaccaggcagcaaatgtaaaaaaaaaaatcttcagaaaggctgttacatgcatttaaacaa

SEQ ID NO: 63126 - DNA, 974 bp, Homo sapiens
gttccagaccagcctggccaacatggtgaaactctgtctctactaaaaattaaaaaaaaaaaaaaattagccggacatggtggtgtgcgcctgtagtcccagctactcaggaggctgagacaggagaatcgcttgaacccgggagacagaggttgcagtgagccgagatcatgccactgcactccagactgagtgacagagagggactccgtctcaaaaaaaaaaaaaaaaagaaaaagataatcaaagaggcagaatttccagtctcctcacctgactgagatgatggaggaaaaagaatgggactgacaggtgactagggagggtgtgagggcatttaatgccctagggcaggggtcacatgcttcttatgaagtgccagaggataaataccataggcgttgcaggccatatgggtcactgttgcaactattcaaccctgccactgtagtgagtggctgtgttccagtaaactttttcacaaagcaagcggtgggctggatttaccctgcaggccaaagtctcgtgactcacagactagaagatagagggaaatgaagccaatttgaggaagaagttcatgggttcaattttatcaggccatgtcagcagagatttttcaagagagagatgatagcatcattctagggataaagagaccccagggctggaggcataaaactgtcaccatgaggtgatagttatggggctgagatcacccaggggaacggtctgagaagaaaggagatcgaggacatttctctgtcgcaatataacagtgaatacccaatgttacttcagatcactatggccctggaaaggaatgaacattacaatctaacctcttttaactcctactttttaaaaagagggctcctatttttgaagtggggctttcagtcccttttccaagataaataagtttaaagtttcaaatttacagatgaaaatttcctaatggctagaaaataagg

SEQ ID NO: 63127 - DNA, 540 bp, Homo sapiens
atcttgacctaaaaacacccagaatcctgattctggggccaaccaaccacctacttccaagcagtaacaattctaggcactctccagcctccgtttatcttccttagtcctttctgattacttaagcagaaaacacatacacacacacatctaggaaatcaacagcaaggaagcaacaggtttcccagttaaaaacagatgttctgactttgggtgcataattgccacacccttaatagttctgtaatagcttcagcttccactggcatctagcaataaagatttttaaagacagtcaaaggtcaggcccagaattacagctccagcatgaatcaccatctactctatccacttcatgttttcccatactcgggcccacaccaccaaggcgatctagtaagaactcaaataccagaattaacaatgtctactgcaccctggccatggggtaggaaccacagcagaccctgggaatcaaaggagacacagcaaggactctcaaggtatttatctgatggagaacacacacaagaggcagtc

SEQ ID NO: 63128 - DNA, 2184 bp, Homo sapiens
tcttggcacttactaaatactagttccacaatgcacgttgctcagaacactaacaagggtacgaaactcacaagaaattatcatgtgcttgtaaactgttccttgaaacatcagccgccattaccacacgtctaccttcctctcagcattatttctttaattttcctgcaaataacagaaaagtaggtttgtctgggctttaggggcagcgattaaccctgaaaataagagttaattctcaccacaataatacggtagggaatcgaaaaaattaaacaaggaaactaagcaaaaagatggaggaaatgaaacagtaaaaagcaaatttagaaaactcgagaggaagtaaaagtattttcatacactcaaaaaaaagaagtgtcccacgtgcttcagccaaaccaaactccccttaactgttaaaaacagaaaatcaaaagaagagctgtgagaaattcatactttcgtatctctttgctgaataaacactaaatcggtacagtacagccagctgccctgaaagaccttgaaatattagccccagataatacagcacatgacagtcacctccagaaactctcaaaaaccacaaatcatttcttgttctgacaacctgatctaccaactctggtctagcctgccatttaataatcaataacgtttcttgttaagcacttcaaccgtagcaaaggaagataaagaagcatttgtttccaaacctaaggtgagactttttaaattggcgcaaggcgtctccataatccttttccgccaattcctaatttctaaatgtcaagaactggcagcagcagtccagttcctaggagccctggttttgagacagcaccacctccgaattccctcaaagggcgttctgaactcactgagcaaatccggctggctttcatgtccctctagccatttcttgccgccatgcacttacaggagaaggactcgcaaacagcgggagcaccgggaaagcctgggactgccgccccccacagcacagcgctcggcacagcgttagggacagaagtcaccgttgttgagcccagggcagcgatcccagctggctcggcccccgggaagggaggagaaggaccgggtctactccccgagggcgatgctcccggggcagggacaatgggcaggggaccccgcggtgtggcggaggaggcggcggccctcccctgcaggtctcgggagcccggcggcgctgagagacaggcgggccgcctggagcgcggcgctcgggcctcagcgcggcgcagcccccgggcccgtgccccgctggtctcgggcaggggctgcggcccagctcagagccgccggaccgcggaggagccgtcccgcccccgcgccctccgccctccgcccccagccccggtgcgacccccgtgctgcccggcgcactcgcctgcccacggtctggttagccagctgcttcatgcggttgaactgcttcttcatggcggcggtggcggcggcggcccgcggggctcgggccgggcagggcgggggacagcctggcagctactacatcgcttcccggcccaaacggcggcgcggcggtggctccccgggccggcggccccgccctcgcctcgtcacttccagtggcaccgcccgcccgccctctaggtctggccgagccgagctgagcccgagtagagccgagtcgaaccgagccgaggctaacagtgccttacctgacacgggcgaagagctagaaggccccgggcgagaagaccactaggcctcctccgcctggcctccccgaccccaacgctgcccggtcaccctctcgtttatttcaacgtatgaaaagctgtttctagcagggcgcagtggttcaacgttgtaatctcagcactttgggaggccgagggggcagatcacttgagctcgggagttcgagagcagcctggccaacacggtgaaatcctgtctctactaacaatacaaatttagctgggcgtggtggtggacgcctgtaatcccagctactcaggaggctgaagcaggagaacggcttttacccgaaaggcagaggttgcagtgagccgagatggcgccactgcactccagcctgggcaacagagtgagagaccctgtctcgaaaaaaaaaaaaaaaaaaaaaattaaagtcaatgtgtgttttccttaacacacgtgctcacacac

SEQ ID NO: 63129 - DNA, 1989 bp, Homo sapiens
agagttttctttctctctgggactcggaagactgggaactctcccagtggactgtctctctttggacctgcccaaagagtgaaacccctggatgtagccaaatctgcagccacactactcttggactcttgtgattacttaggagacaactaattcctatctttgcttgaagaagttttaggttttctttatggccaagagacctaatcaatacaagtagtatttgaaagcagtgtttaaagacggatgacaaagtctctgctcagatttttcatctctgggtagcttttgttacctccctccatctaatgacagctaggttttgttcagtgcattagctatccctccataagcacacatcttccgtatataaattatttttgtttgcctatgtttcttttcaagcattcaagcagtaccaaaggaacatggagaagtagctgtctccaaatccaagaggaagaagactttttaaactggcacaaggtgtctcccagttctaaatttctaaatgtcaagaacttgcagcagcagtcaagttcctaggaatactggtttctgagactgcaccacctccgaattccctcgcaggcgttctgaaattcactaagcaaatccgactggctttcatatatccctttatttcttgctaccatgcacttaaaggactcccaacagcgggtcaacccggaaagtctgacaatgctgccccccacagcacagcgctcggcacagcgttagggacagaagtcatcggagttttagcacagggcagcggtcccaggctggctgtgtcctccggaagagaggagaagcatcgggtgtagtcctcgcagggcaatgctcgccggggtagggacaatgggcagggggcacccgaggggttgctacagaggaggcagcggcccgtcccagatggtcgccaaggaccagggggcgattgagcggcagcgggcgtcccgctggcctcgggctgggctgtggttcggtccagagccgaccggcccatagtcaggtcggccacctgctgatgaggttgaactgcttcttcaaggcagcggcggcggcagcccgcggggcgccgcctggcaggtagggctacacccagacggctcctacatggttcacagctgaggtgaccggtggctgcgacggctgctgtagctacccgggccattgacctcgctctctcgcgtcacttccggcgcgccgtccacccgccctcttggccgaccgttcggggccgaggccagtcgagccgagtccagctggaccgatcggagccgagcccagacgagcccgatctggcaaagatcgcgaggaccagggcgcagagcaaagtggcctctgcgtgactttgccccagcccttggtacctcaggttcagcgacgccatccacctgccctctggcagatggtggctgagaggtccttgaaacaggcagaacatattagctataatagtcaaatatttaccacattgaaatttagtgggattctcatgtattttaagggtcccctccactcttccaaattccaagtcacgtggttttcgtctccatcagatcactcgtggtgtggatcttcagggaagttatggggaaagggagaccagcagcctgccccgtgggtggccatcctcctccccacgggagtgccaggcaatctccccagtgctggggtcctctcctggtaagttcattttgtttagggtccagctggggccattgaaccccttgaccaaatatgcaagcaacactgcgaagcaaagcccagggttgtcagtttggggttttccatcgagagagaagttgaacaacaaatgccattccctgtccattttatttttttcatcatcagtgactaggccactgactgccagggatgtgcatttcttaggggtcagaagaacagagagcagcagcagcgcaacagtgccacaggaaacatcactacccttgctagaacaattactgttaggacacaggc

SEQ ID NO: 63130 - DNA, 824 bp, Homo sapiens
atgcctaacttttggcccacaatattaatgtccaagagcttttacacttccacaactcttctcctgactttgtcaaaagatgcagtctagttggcagtgaactttctctggctgggatatggctcaaagactaccccagcattgtctcttgcattaaggtatcatttagcctgagatggctaagcttgcaatctccagactccacgctgtcataaactttcagatcctcaaccaggaacttacatggaatgagctggccctggaggtcagctggaagatggccaaattcctctgaatcaccagctattttgaatcaaaggctcatccaacaacaaaagtgtataaacccatctgcctccgccttcttccagtcacccccagtctcactgtccagacctgtgggattaacaccgtatagtacttgctgttaacacttactatccactaacacccgtggaatgtggacactgctaagctgggagatgatgcttgtgcaatagtttgtattacccttttggcaaaggaccactccaagaaaatggtgtatttcatcccatcagcattccccctggcaaagctctccacccttagtcattcccctcttgtcatttctactgtggctatcaatgagatcttgtgcctccattagaatactgagctagcatttgatatttgacctcactccaaggtgtgtattctgggtttctgttgttgattttctttttaaaaaaatgagtgcaattcaaagttcttaaagtatatctgtttcctgcttccaacaactgacagataacaaaatggaatatacaaagacatttttaatt

SEQ ID NO: 63131 - DNA, 2095 bp, Homo sapiens
aattatagctataaaatttcatcaccagcaagaaaccaggcgacttccccagtacatcttgaatttatacatatattttgtactagatttagtacaaaataaatccaaaacatcttgaatatgcctcataatgaaacagacacacgtgaacccactcccacgtgagaaactgaggatgtgtctatgtgctccttccctgcctctccctccccctcttgtgtgctaccctcccggctccctaaagatcaccaatatcctgattcttttttatttttttttctcatgtcttgccttctctgtacagtattttaccatatatgtacgtttctctaaacaacattagttttacttggtttgaactttacaaaagtgttgttagacttccttctttcactgaacatcgtgtttctgagattcagccattgatgctgctacctggtagctctagttcatttatgatcgctgctacatggcttcctattgtattacttttccacacactacttccctcactacatttcttttctttctttcttttatttatttgtttatttatttttttgagacggagtctcgctctgtcgctcaggacggaatgcagtggcgccacatgggcttactgcaacctccgcctcccgggttcaagcgattctcctgcctcagcctcctgagtagccaggactaaggcggccgccaccacgcccggctaatttttgtacttttagtaacaacggtgtttcaccatgttggccaggctggtctcgaactcctgacctcaggtgatcggcccgcctcggcttcccacagtggtgggattacaggagtgagccactacgcccgcccccctcactacatttcgaaggcaattttgggggcaaagccctcagcacagtcgctggcagagtcagcacacaacaaaattttgtaaaattgaatgacactgagcccggactgaatgtaacaacttacacatgttgcttctggctggattctctgccctttgcccgaacgctgaggattctgctagctgttccgccctgagttaattatagctataaaatttcgcgaccagcaagcagaaaccgggcgacttctccagacacctaagactacgcttcccagaaaggattgcgatactctcctactgtttagtttctttttcctatcgtcaaatttccgggttatgtgggcggtgccaaaataattatccaatgagcaacttcgtaggctgagcgggcaggagaattgctcaatgagcgactcggaagaggagccaataagcggagaggttgctggggtagccggcgtgggcggcgtcactgagccgcgccagctgagccaggtagggccctaccctcttctgttgctttctccctgtggctcgcgccgtcccccgccgcccgtcgaccccgcttccatgtccctggcggacacagctcccaggaacctccacgcccatggccactaggcagagggaatcctctatcacctcctgctgttccacctcgagctgcgacgcagacgacgagggcgtgcgcggcacctgcgaagatgcttccctgtgcaagaggtgcctgtcgggcgcggggttcggggccggcatctggggcgcgggcctaggtgggaggtgggcctgcatctgaagaatacgctcaaggctggcagggatgcagcccccgcctcgcacgaccctcgcttcccacctgtgaagtgcacggagcagggcttcatttatttaacgaatcgtttctgagcttttgctgtgagccaggcagggggccagcctgggtatcgtcgatgggagcaggcccctgagccagacagacgaggccttgggcttcttggagctaaacgctgctggaaagacagacatgaagcaaatagtagctccagcctcgatgggttacgaggatgagaggtgtaggttctctctcttttgtaggttgcattctttagggggttggtgtgatccctgttgtgcacctgaaactcaggatgacgaggggaaataacccacccagagccaagtaatatctctttgcagagccagtaccgcactaagtctccactgttaagggtgtggtggtggggatgg

SEQ ID NO: 63132 - DNA, 1483 bp, Homo sapiens
aatttttatatttatgcaactttgatttcaagtgttttcaatttaatgttataacattagcatttccccctggcaattaaaaatgctcaatgagcataattgtaatggctttataatattgtattatgtcactatggctgaattaatatttccatatttttggaaatgtaggttatttgtaatacttttaagtgaactctagttctcacaaaggaacaatatattgagcattttaatgtcaggaatttactttgtccccactgacccgtgactgctttgggacatcagtgcttgtctgtgtgtgtggaagatccgtatctgcctttgctcaaagttcagcacataaagggtagatttttggcgttaactgcagacagtccataaactgttataatgttttcttaatcattttaaaaccacccataaacacagtcttacccaaccttttgtttccttgcgaaacctcattttatgtagcaggagggcggtgctacagtggtcagcagtgtggctggtgcccctgagccggtcactgggggtcctctaggggcctctgctcctggccaccagagtctcctaatggtgtctgtgtgtctctcccctcagggctgaaggagataacttattaatctgtcgaaggcttatgccgagccagaagccgaagccacttgccctcctggaggagacctgcaagctccctgagcggtgggcgggcctcgtccgcaggtctcatcccacactcttgagaagccttggtcactacagtggtcgcacatgttcctcttcctgttcctgttgacatgtcgttgtttaaataaatctcacttgccaccagtcgcctgtggttggacctctgctggctgccgctgctcgttccgtgccccatggcttgggcgggccagggttcacctctgtgttagctaaagccaaggaccccaagtctgctttgaccttggcttactccctgtgagtcacacccggcccatgaccttgagtccattttaggatctactccctcacatgctgtttgttgcagcacatgacattgtgcctcactccctgacccttgtcctccaccagatgtgaggctagtgctcttctcgggctcctgtctccgccctggccacactggcctgctcagttgcctccttcatcttggtcatggtggcaggctgaagaatggcccctaaagtgtccatgtcctgatccccagaacctgtgagtgtgtgttaccttctgtggcaaaggggctttgcaaatgggattaggggtttgagatgaagaggtggtcctgggttatccaggtgggcctgataggatcacggggtcctcattagagggacagacgaggcgtcagagtcagaggggcccagacaagaagcaggggcaaccaggggatgctacctagggcaatagcagcagaccctcccttggcctccagctggaactgcctgccaacaccttgatgttagcccagagaaat

SEQ ID NO: 63133 - DNA, 1815 bp, Homo sapiens
acggaggtaaaaacggccaggtcggcaggaacagggtattccaggctgattaatcaaatctatgccaggcccttgaaaaggtgaacgtatactctaagatgcaaaagcctggcctcttctccaaacaagatgtgaccgcgcaatgtggttttccagagtgcatccctcttagtgcaaagtcggaaaccgggaggctggacgactgggagaaaaatgaagcaggctgaggaaaggctgggcggaggcggacagccgggccgggagggggtgtgtccgctactcccgggtcgggcgcggagaggcgagtccccgagtgggtggggccggatgtgcaggccccgcccggcgccaggttccgggctcgggtcaccgcagcacgtccaggccgccgcgggtgccgctggggccgccggattccgagagcggcgccgggctctttcgggcccacgacggccccgaccgtcctgaggaaaccgctgccgccgaggaaaggccgcaaaaactgttccgcccggaagggagaagagctgcggggcgaagccagggctcgcagggggcagcggcaggctgctcgcgttcggcctcgtccactcggcccgcggagagcgcggggggcgctgggaaccgcagtcacgcatgcgccgcctgccaccgagcgccgcggggcccgcgcgaggcgtcctggcgggcgaggggctgggggagggggggggggccgtgcggtggactctcgcgagagcgcgcggcgcggtgactcgtcgctgagggactttaagattgtagaggggcgcggagggtcctccccggggcggagggacacagagggattctagggaacctgccgtcgcgagtcccgcttcaggcggagaatctaggcggcggcggggcctccctgaggcggaggagtcggcaccggggcctggctgccggggaaggagagcacgggagcggggactcctgtgtctggcggagggacacggcgttccggtggagggatctgttccttgtacctggtccagggttgcggtcggggatggagcggttaccccgaccctgcgggaccttcttcctctggcggaggtgcacggcgcggcgtggtgtttttctggcggaagtatctgtgcgtggccccaggcccttcccggcgcggtctcatctggggccacttgttggccctcgcgttggggaggttcatgtggtgcatcctgatgagaaggggggtcacaggggtctcggggccagggttcagccagccaggccccagcttgctctcttctggtgctgcccctgtccctgaattcatagacccggctttccctctcttgagcacctactatgtgccaggctgcgctttgcgcatgtagcagaggcaacagtgtcacctgggaagctggtttcccccaaaggaactcttgtctgtccgttgttgcagagccagcgcatgagaccaagtgtgagtatcaggcagtgcagccttcattcagtggccatggaattggagaagtgggagggtagctcgcaaatcaagctctcagctcttggaaactgagaagttacaggtaatagggagtgttgacgaaaagtaaaaccgtgcaaaatatttgaagagatttattgtgagccaaatacgagtaaccacagcctgtgatacagccctctcgaggccctgagaacatgtgcccaaggtggtcggggtgcagcttggttttatgttttaggttggcatgagacatcagtcaaatacattaaatacattggtttggtccaggaaggcgggacaacgcaaaggggtgggggtgggggcttccaggctat

SEQ ID NO: 63134 - DNA, 649 bp, Homo sapiens
cttattgttgagaataatcaaaggagtccattcagtaaggtaggggcggggagcacaatagatatattaatatatggggcaggggggaagtattgtattcctaggcagttttcataattggtgttacagatctttggttgaaatttcaggcttaccctgaactgagatctaactttctggagccctaactcttctgaggggttagccttctcttcctcctactagaaattatggatgaacagaaggcatggattaacaggcatcatttttactaaaggacacaggtctgcagaagagaagtcagcaagatccatgggtcagcaggagccatgagtcatttgcagccgtgactcagaggtggctatgagtcaccaggagccatgggtcagcaggatccatggatcagtaggaacaaggggtcaacagaaactgtgggtcaggtagaagtatgaatctgtagaaaccatgagtcagtatgagccaagattcatcagctgcacaggtcagcaagaaacatggttcagcatttttttttttcttttgagacagggtctcactttgtcacttgggatggagtgcagtggtgtgatagctcaatgcagactcgaactcctgggctcaactgattcttctggttcagcctcctgag

SEQ ID NO: 63135 - DNA, 743 bp, Homo sapiens
aacatcctgaagctccttataatagttattttaaagttctgtgtcaaaggatcccactacagatgtttgctaaatgaataaataggatacagaaaaatgcatgtattcaacatctactgtaaggcaatgggccaagtgctttgtatctcatttaaatttcacaggaacactattgggtcagaggtaattttcacaggcttaggggagaaaactgaagcataaagaggttaagtaaatagcctgagttcatctgggtagtgtaacactttggacttttaaagcattgtgggaggagtatatttcctcaccccattgattttggactcggttatgtaacttactttgcctggagatattcgtagatgggacccaaaaagaggccttaagtatgcctgtgtgctttggcttggctctgatgctctggaaatttgccatgcaaacaggccccactagctgttgagataagaagatgagacacgtagtgctgagtaaacccaaactctcaccaaaaccaagcctagctcactggtagcctggtgcagagtcacccagctgaaccaagtctacatgggctgaacttcagttgcctcacagacctggaacccattgagattccaaggttgtgttttctaaggaacaaaagccaattattgcagctaggaaatcacatttcccagatctcaacccataacatctgaatctgtgagctcatccataactcacccccggagcatggcaagctc

SEQ ID NO: 63136 - DNA, 539 bp, Homo sapiens
ctctgagagctcacctgggaccccagactctcttccaggaacagaaagtgcaaagatcccaaggcattttcaaagggagcaaggaggcccagcacgagacgggagagggacggcaggtgaggcagggagcagccagtcatggtagggggtttgggttttgatgtaatgccatttggagggtggtgagcctgcaaagggcatgaactgattatttcatagttttatgagatcatgctggctgcagtgtggagagtatactgtagggggcgcgagagcggcagctgggacccagttaggagctgtgggagttgtctgggcgggaggtggcgttggttcagaccctgacactaaagcaggaactggagcctagtgctcagttgtaaggcgtattttggaaatgctgctggttggacccgctgatggagggcatggaaaaaaaggattcagcgacgagtccttgtttcttgccttgaatattgtagagtgtcaacttgtgtcattcactcatctctttattcagcaaatatttattgaatgcc

SEQ ID NO: 63137 - DNA, 891 bp, Homo sapiens
agatacatgggacaactggtctgcaaaccgacttcagtggttgatgtgtcttctgtactgacttctgctacgtgctgggcactggcgacacaagattcacaggatatggtccctgcccttgaagaactcacattcaagtagaagaaatcgagtgccatgacagtgacggcaaacaatgacaatactggattacagggatcaatacagcacttcagagacggagaaatgagtggatggctctaggggatcctggggatactgatgccagtggcgcccgtttggagcagccgctgtgaagacgctggctgcagtgggggagaagcagccagggctgtgcactccacggagctggtgggagccaggaacaggcagggctcctgcctgccctgttgtgagttggtggagtgggagccccgtgctcttccggtacagctgcagctgcccagccatggctccagaccagggcatccctaagttctcaggggtcggggaagcccccgccacgacaggctcagaagttcctgctccaactgtctggcctctccctgctcccagcactcacttcgatttcagagcaaagctgtggccaagcctggggactgtctcaacccggccaggtgttgcacacgcagagcagtgctgacataccagcctcctgccatctcagcccctccagactttggtcactgacaaacatgggagggaggccaagggggagctgagggcagcttggcacaggcctgcaggagcccctttgcataaacagcctgggcaccgtggatgacatgtattaaacaggtggcagcaggaggcagacaggctcccgggcagaaaggggtgggtctccagtgaagccccaccttcaagccagggacaggctggcctgaaacc

SEQ ID NO: 63138 - DNA, 1882 bp, Homo sapiens
cgcaccactcggcatcaaagcaaaggtggcaggagtgtgtcccctggccacttgccttctcactcgaacagactgtggatgcagcacttgctcgtgggtaattgtggatctgactttccaaaagtacaagtatgtggccactttaatcactgagcctcagtttcgctctctgtaaaatagggagaactaataatcctagctgcagagattaaatggtggatgcaaacagccttgtacgaagttgttatctgtgcagaggaaaaagcggtatcactagcgtggaaggacccagaggatacagccaagcctttctgtcttctccatcccccggccttttaaacagcagtggggcggggccacggcatcgatcactcggcgctcctccaggcactgcgtcgtgatcagacgagcggtgagcgatcgatactcctatgctagcctctggctcctcaggggacacagccgagtggtcggaccaaacgcaacgagtcttcgccagcccaaaggcgactcgacaccgtcccagctgaagagaggttagtctgagcaactcgagagcggagtcagctccagttcctcagaagtggagaggccgggttcagaggcatagaccgcgcaggcgtcatgtgaagcagccaagcccggcctcgcgcgtgcgccttggaaaaccccgagggtggctcgagttgccgcatgcgctctgagaatgcaatttagctcgtcgccggcctgccctgcgggaggataaagggaaaggttccgcgcgtgcgtatgctcgtctcttggcagtggttttgcgcatgcgtgagggcaggcccttacggcgggctgctgtgcgctttagcggttcttggcgtcgcgttggtgtaggcctagtgcgcctgcgcgggttttatactctgctatatgtgtgtccgctgcttttaggcaaccagccgctgcccctgggccgcaaggcaggctggaaacgattccgccgtcaggtcccaaatatgagccgcgagaaatgcagccccggggaaggcgctgaggagggaagggggtctgaggcctcggggctcaaggccagtgcggggtacgggggaccctctggggcctgggtgtgtgactgccctaaggaaaggtgcttgtagctcggtaggacttaacgatgggcatcggtgcgtttcccggcaacggtaggaatcgccgtgctcaggaggactcgggagcaagcccggggacaggaggtgcgcaggcgttggggccacacggacgacccaaacacaagactgtgtgccccttagagagccaaagggatccctgtgccatgaattaaagctttctggaaaatgttccaaactttcctgggaagttttacgaagctcttgtttttgcacaatttttgtggaatactgccataataacattgaggagattagagaactggaccgcctgttcccagaaagctaggtgtaggctgatctgtcctggaagccccttttgggaggctttctcatgaccagcatggtgcttgcagagtgcccaccctgagaccctctgcaaatcacagtgaggctctcggagaggccattccacccagccaccttaaagaatactcagggaggtgctttagaggagttgatgtttaaaaataatttaaggctgggcgcggtgcctcacacctgtaatcccagccctttgggaggccgagacaggccgatcacttcaggtcaggagttcacaagaccagcctgaccaacatggcgcaaccccgtctctactaaaaataaaaaattagctgagtgtggtggtgcacatctgtaatcacagctgcttgggcggctgaggcaggagaattgcttgaacctgggaagcggaggttgcagtgagccaagattgg

SEQ ID NO: 63139 - DNA, 1376 bp, Homo sapiens
cagaaggctgtgtccattggccttcaacatgaggtctccaaggccgatttgcaaagtagcagataggccgcctatgaagaccaaacatgaggccaccctgggaggccaggtgacaaagcagacacggggccactgggggaacctggctacaaagccgcacacgtgaggccaccttgagaagctggcttggtaaggctgataggcgccctgtgaggggccgttttataaggtcaccctgaaacaccaatttacaaagcccgtaatctgcattgcagagaacaggtttatagcccatttgaaaccctctgggaggctgttttctaaggccatcaagagacaggtttacaaagctggtacatagagccccagtggaagccagttttatagtagggcaataaatggtctcctgggaggcctttccactggcctttatgagaagccaggatatgaggcccctgaggtcttttggatgctcaagatgagacttctccatgttgctctataagattcatgtaagccacacacgggatgagccaggaggccacccagggaggccagggatgggcccatgtggtgtcttgtgctggcctagtggataagtccatgctggaaattggactgtgaaacgctccaagaaggctgtgaatgaggccaacacaagccttctaggaggctagagatagaacccaccctggcaggctggggctctctgagccctaccataccctgagcttgctagaaagaaagttcattgtgaaccaagaatggaaatgaactcattataagctcagccctgtggatacaaagtccaaagagctcacccttgaaggcaatgagtgttctgggcagacactgccacttactgtgtagtttggcacaaattgcttaacctcgaaatctcagtttattcatctgtaaaactcccatcataggattgcaagggacgtgttaatctatgtcaagcatgcagcattgacatggcgcacaggagagggtgctgagatcagccagaatttaagccctgcttctgcacaaatgattgaccgtaggccttggggcaagtcacttcatttttgtttttttgttttaatttgagtcaggatcttgctctgtcacccaggctggtggcatgatctcggcttactgcaacctttgcccccaggcttaagtgatcccaccacctttaatctcctgagtagctgggaccacaggcatgtaccgccgtgcccaactaatttttgtattttttgtagagacggcgtcttgccatgttggccaggctggtcttgaattcctgagctcaagtgatccaattgcctcggcctcccaaagtgctgggattacaggcgtgagccaccatgccggccttctcgaat

SEQ ID NO: 63140 - DNA, 4848 bp, Homo sapiens
tcctacccctgacacaggttcctggtggaatacctcaaatgtcgacttcctgaggtggttgctattttgttctgttttgattttaaacagaaagcaagggcggaccatggtttgattccagatgtgaagttagaaaaaacagtcccccggctgcaccgtccgtccctccagcatttcagggagcagtttttggttccagggaggcccgtgatcctgaaaggcgtggctgaccactggccgtgcatgcagaagtggaggtgggtggtcgctgagggaggtgaggtcccttttcccattttagcgttccccagggctccctgaattcctcccgaccatccccagggaaatgcaaccttgtagatgcttcactagcagcccttgactgattgccaaggggttaaaaaagagtgaaaagtaaggtgctctgaatttatgccgcaggttatgggattcttaccttctaccttgctcgccttaagcggttttttaatgagtccctaagtggcagtcctagaatgtttctgttatgcaattttacaggatcctagcaatttcagaccatctcagggccctgaagctaagagcagaaataacccaagagacagcccctctctctctgagggattctgtggtctcttgtgtttgtttctagtcctttctcagaatcatgatggggagatcagatcaggcagctggagcgtggctgtcatgccgcggctctgcatgagtttggaaataaggaggcatctctccaggaaggtagatggagtccgcctgttttgtggtttcgcggagggaatggtacccgctgacacatgtggaggaattctcattgcaggagctctcctcacagcaaggcttcattaagcattttactacgtacctggcactaggacaggtgttgtcatcacccccattctgtaaatggggatcaaggactcgggttcagtaacctgcctcagatcccctggcctgtaactgatgaggcctggaatcagtcccaggctagagggcagagtccaggagactgccacctgccacgctgtccgctatttgttcaaaggtttctcagcttagtgacaaaatgagcaaagaaagaagtgaggaggctgttggcaagcagggaactagagcagcccagccaaccagacttaccggccctgtctgcaaagctgcacagcactgtgtatgagccacacagccttgagcagggagccccacctctccatgccggttcctcatcagtgaagctggggatgacagtccttgtctctgcacgtgaggttttccgaggatgaaaggggaccacatgcaaagcacacttagtactatgcccaacagatattagcagtgacgatgccaatgtgtgtctttctgctagtttggagtatatccaggagatcgctggctgccgaactgtcccagtggaagttggttcgaggtacacagatgaggaatggtcccagaccctcatgacggtcaacgagttcatcagcaaatacatcgtgaatgaggtacatcatggggactgctttcccctagtacttgcaaggcagagagcatagtacatttaggcaaataaccccccatgtgttgtaatgggaggttttggaggagccaggctgtaagtctgtggtcggagggacgaccgcagcgaggaaggcaggctgcttagccagcagacatgagggattcatgtcaggtcctttttaatgggcaggggagtataattcagtgggttttagcctgttccaaaagttggacagctaagtctagagtatgtgtatttaaatttttaatagcagccaggcatggtggctcacacctgtaatcccagcactttgggaggctgaggcaggcggatcacttgaaaccaggagttcaagaccagcctgggaaacatagtgaaaccctgtctctataaaaaatataaaaattagctgggtatagtggtacgtgcctgtaatcccagctactcaagaggctgaggtggggcaaattgcttgagcccaggaggcagaggttgcagtgagccaagatcaggccactgcattccagcttggacaatagaaccaggccctgtcaaaattacgacaggacaggataggacaatttatttttcccaaaagttagatcacttatactttcaccagcaattaacacaagtgtccattttcttacatctttgcctgcactgtttgttgccattttatgaaaatgtttgccaatcagatggatgagatcagtgctttacaaactgggtaccccggtgctggagaggttctttgaagctgccccagggcctctaagggttggagaggaccactcaggatggagtggaagggtgacgggtgctgcagctggggccagctggacagcagcagcaggagggcatctgtcatgactaactgggctttctgtgttgcctctggttttccccggtggattagccaagggacgtcgggtaccttgctcagcaccagctctttgaccaggtaagtctgaggccacgcacctctgcccctcaccgtctcaccttcccctctcctcccctcctgggctcagtgcggctggagcagtgagcgtgagtaggagggaggcagcaggtgaggctaggaaggtgacaggacgtgggtgatgaggagccattttcctaaagtgacaggaaacactggggggtcgccagtgccccgaggattgtaggggctgctattcagagatgaagggagcagctgtcggagcgggtggctggctgggctattgctgtggtgcaaggagaggtgatgctggcaggtggagcagttcaagaccggtgtgaaccaccgagccctggacgtgggtggatgtgtgggggagggagggaagatcggggaagatgcccagattcaggaccccaaaacactaaatagatggagctggggcgcccaggagggacctggctggtgtggtgtctgccaggagtgcccaggaaggcagcccttggcaggattcaaggatagggccaggtgcgtgtcccgaacgtggaagactcgagtcagtcagggtcagggctacagccaggggtgggctggggccgcacctctgtagcctttgcagtggggccctgggatgctgatcagctgctgtatctactgctgaagccaggactgcttctctgtctcgatgggggacccagggccagtaggggctgtgccaggagccttcatgccgacattaaaggacgctggcggtttctcttccccaggcctccctattaggacctgtgcatcctgcgtcctgtccatgtcacttgctaagtgaaggaaagggggattctaattgatcaggtccctactgtgtgatcccgagacccacctttctcctgaccctggtcatcctgggggcatggcctcagtgtgggctggggaccctggaagccatggttaaccttggctccctgtcctggagcagctgtttcatactttgtaggacaggaggagttatatttaggagtagaaggccaagttcacagtgactttcaagatgagccaggacttgaaagatgtttcgggtaatggagggccgcctgggtgtttaccttgggtcccagagctgagtgtctaccatgctgtggagaggaccctggagaagtcccagcagcccatgcccaggtgttatcatgccgtgtggcaaggacagtgttctagaaccttctctacctacaggacgctcagggactcctaccaaattcttgtcccagaacctcttattgacttttctcccagggaccccgtgttctagaagattttggccatcagtttaagcctgcctcagttattagtcacatctcgggagcactgattcccttcgggtctctgcatcctcggccagtgattctgatgacatgatctggtcagccaatcacctttcagaaatcctgatgatgtcatcagggaccaatcatagtttctgctcagattccacagggccagttctggtcaaaagcagcagcgtcgggttacctttgggaggaacccctcacagccctgggagggacctcagcttgcgaacttgtacttcagtcctaagcagcaggcgcggctgcgtttctgcacagctgatttgagacaggttcttaaaggtctgaatagcagtgtctgggaccaagctccctgcagggagaacattccagcttttcctggtacacactggtttctgagccagcagcctgaagttaccgtcactgctcccgaaggaatggtagtgtccacctgcaggtgccttcaggctgcggagcagtgactcttaaaaagccctgtgtccctctggcaaccctgttttcatgcctctcaagcttgaaaaatgccgccaggtccatccagggtcccgtgaagaaccctggggttctcggtggcctggggggtgtgggctggtggcctgctctggtgggttcaaccccggaggtaactgaggtgcctgctaagggtctggacaggaagtggacttagagtgagtgtgttttcactctgagaccctggctttgtgtaaaggaggccagggccatgtgcagtggctcatacctgtagtcccagcactttgggagaccaagcaggaccagcctggacaacatagcaagaccccatctctacaaaaataaaattagccaggcacggtggcatgctcctgtggtcccagcaatttgggaggctgaggcaggaggatcgcttaagctctgcaggttgaggctacagtgagccatgatggtaccactgcactccggactgggtgacagaacaagactgtctttgaaaaaaaaaattacaataaataaataaaggaggccaggccactgcggccctgccccaccgt

SEQ ID NO: 63141 - DNA, 1376 bp, Homo sapiens
agcagaatctgcattctcgaaagctggctgttggcagggagaggccgtgatactcatcctgggagtgggctgccgaggggccatgggcgtgctggggagtgacaaacacaagagctatctggaagctgagtccacttggctccgtgggcagctgtttgcaaggacattgtttattccctgccatggttaatagtgaattacctaatctttcacaggaagaatttacaccagatgtcaacacccctgaaagtagcgaggcataaaacagggacgccctcatgactaggttcgccattagtgaggaggggtggcggcccggccacagtgggctgtgactcctggcccgcctgtgtaactcaaaccccttccccagctgaaggacaggtggactgtggccccagctcccagtgcctagccgctccagctggcaagccccacggcccatctgtagtgtagcgtgacagaaagctgggcacgggaggccacgttcattaacgtgtggtatcctggccaggtggcttcaagcagatgtcccttgtcagatgaggaatgggaaaaggggaaatgtcctgccctgtgggtgaggacacgcagcatctggaactcctcatgagggttttgagtgagtgctagtgtgcgttgtgggacgttcatgtcggtgttatcatgcaggggttggaggcaagagagacaagcagcaggagggctggtgtccccagtggccaagtgcccagaggcttcctgagtccccagccaggactgactcgagctcaaagaatgaacagccagaaccacaggacaactgggacagtccggagctgccccggcccctcctgcaggcattatttgctagttggctttttgccttctggcgtccatcttcccgtcttccagaacggcaagctgactgcattctggagaatgacctctgccccagggatgcggtcctggaaggtctgtacatcagctcctccctggaccggcatcttgagggcgtgtcgggaggagctcagacaggctggagccgaccccctgtggcagcagcgcccgcagtgacagaattgtcttgacatccatgacccttattccaaggtctcccattctagactggtcctgccttcctgtcatttctgcaagccacctcatacgtttccaaaaaacccctctttaggtgaggccggccggggctggcagtggctgaacgtactgggcttaccaatgggcgtgtctctgcccactgacgaagggctgggctgggtccccggctgcctcactatgggaaggtgggcttgagggctgaggagcccagacctggttctgggagggtgagcctcccaccagcaggggtcattggttcactgagccttggatgcctg

SEQ ID NO: 63142 - DNA, 933 bp, Homo sapiens
aaaaataaaaataaaaaagaaacccttgaacgacaggatttgaagagcttcgggttattaaacacacagaggcgttgagacggtggtgcaagtagagagggcacggaaactccatgccacccccacttcccacagctggccctgtgatctctcctatgtggctgttcctgagttgtagcctttataaaaaaaccacgtaagtcaaaatgtaagtaaagtgttttcctgagttctatgaatcattctagaaaattatcaaatccaaagagggagttatgggaaccactgatgtacagccattggtcagaaacacaggtagcccaggacttacaactggtgtcttaagttgggtcagtcttgtgacactgagccctttaacttgtaggatttgatgctaactccaggcagatagtgtcagaattaaactgaattatggaatgcccagttgttatctagagaactggagtagtgttagaaaagataccacatcaagtgtcaagagaaaaagaaaccctcattgcccatctctcgaaagatcactggccttgactgacgaatgtccagtattttatactttgtccatttttgaattgtttcaggcaagaaggtgtactgagccctgttgctccatactggccaaaagtggaaaacctcaaacccaagccttctccaccacccccgaggcctcctgtgccgacttctatcaaggaggcctatattggaatcatctgaccccttgtctgtatgactcatgagagccatggtaaaataaaaattcaatctctgagtcaccagtccctagcacagaggcctggctcacttgagattctagggaagctttgctggttgaataaacgtatgtgtggatgcaagtcctggctcaaaaatctaaggtcctctaagaacacaggtccctagcgccattccgaaagg

SEQ ID NO: 63143 - DNA, 467 bp, Homo sapiens
gccctgatcaaaacgctggctactgccatggagcacgcagtgcaggggctaagaatgtgaatttggaactaaacaggaagcactgagaccagaaagtcccagatctgcctgatcctaaggatttcctaatgtgcattttaacaatacagattcccaaaccctttcctggatgttctgactgcaatgggtcctggaattctgaggtgtttacattcattttaggtgatgtcaagatctgacaagaaagaagttcactggtgccttgggcaaatacagcaggcaaacatttttagctaacaatgctcagcctccctaaggcctagtctcttcacctctaaaactgggaaactagtagctaccttaaagacatagaggaagcctaaatgagtcacaactaccaaaggcttgccaagcacctggcacataagagatccacaagactgctaattactgctcttttgttcttt

SEQ ID NO: 63144 - DNA, 642 bp, Homo sapiens
tattcaaaactaatgaatgaattatctgaaaacctaaacactcctataaccattaatgacattttatagaaaatccatcttctcacaaagaaaacttcaggtcccaatgactttatcaagaagttctaccaaatagtctaaaaacaaataatttcaaatgttacacaatcgcagcgccagaaaaaaagcaaaccctccccaacccatctgacaaggctaacctaatttggccctgaaacctaacaaggatgtcaaaagaaaggaaaattacaagccagtatctttcatgaacacagctacagtatgtcctaagcaaaatgctaacaaacttaatccagatatgtaaaaggaatgacatatcatcacttaggtttattccagcaatggtttcacatctaaaaatcaatcaatgtgagtcaccacattaataaaggaaaaagcattttaaaattcacacagggccgagcgcggtggctcatgcctgtaatcccagcactttgggaggccaaggcgggcagatcacctgaggtcaggagttaagaggctagcctggccaacatgatgaaactctgtcgctaccaaaaatacaaaaattggttgggcggggtggcacgcgcctgtaatcccagctactcaggaagc

SEQ ID NO: 63145 - DNA, 1696 bp, Homo sapiens
tcaccatattagccaggctggtttcgaactccgaacctcaggtgatccgcccccctcagcttcccaaagtgctggaattatagccgtgggccaccgcgaccaggtcaatgtaatatatgcgtatcttcataactttagctgtggaaagggtcgtgtatttgattacaagccgctgctccagccccctctgagggtgaaacctaacatagaacatagggactttacctttccaaactccgagaactcctcgattttaaacgcatctggcctcggggctgtaacataagcggctgcggacttgtacaaagtaagaaactccgtacacaaaacagaggggagcacggagggcggcgggacaaagagggtggtcggcaaaggctgtattttccatagatgtaatcacagtttgaatcgaattttatattttgctttttcacctgttacaatgaaaagtatctttacctgttaaatcgtaattacgattaaaaatatttttcactaaatagtaagatttttagatgtctgcgtgtgtgttgcgggaggacatcccagtccgctgttttctgcggcccctgtctgggcctcagtttccccatcaagaagggggaaaccccaagaccccagtccccgagttccacagcccacggggaccgaccccggggccggaccccactgcctgtctcgcccaccccaccttccgtcctcccctcgccttccttgaagtccctcttctttcccctccaacccctagctccccacgttacccaccagggagcccaagcgcatcccaggccgcgctagcggatacggtcgcaaggtggactcttcttcctttgaggcggggcgaacgcgaacgcggcgttcccattggtggcctgcggcttattcgcccgtccgttgagtgacgcacttccggttctccgtttgcgccattgccctggtggttccgcctcgtgggttagatcccaaattacgcccgctctcgatccttaataatgggaaggggcttccacttgtcgccctccgcctcctgcacctcagtgacttccctgaccaaggaggaagaattggcgtgcagcctgggcttccctcaatggccaccattccgctggcacaatgtagtgccctgccccgggcctcagtttccccatctgtggaactgagtgtggcctcgacgtcaaaaatgtggactctggtccggtcgcggtggctcacgcctgtaagtaatcccagcactttgggagaccaaggcgggccgatcacttgaggtcaggagttcgagaccagcttggccaacatggtgaaacccccgtccctactaaaaatacaaaaagtagccgggcgtggtggtgtgtgcctgtaatcccagctacccgggaggctgaggcaggagaatcacttgaacccgagaggcagaggttgcagtgagccagatcgtaccacagcactcgagcctgggtgacagagctcaaaaaaaaagaaaagaaaaatgtggactctgtggtcatagagcctgatctagaatcctggctctgccacttactagttggcaggcgcttgggcaagtcactgagcctcagtttcctcttccattaaatgaggatattagttcttgcaaaatagtgttggtgagatttacaagagataataacacctatatcaggtgcttagcatggccattgaaaagtgtcacatg

SEQ ID NO: 63146 - DNA, 1563 bp, Homo sapiens
cgtaaggtagcaaacagtatcaatctttggctgaagagggcctggcgtggtggctcacacttgtaatcccagcactttgggaggctgaggtgggaggattgcttgagatcaggagttcgagaccagcctgggcaacacagcaagacctcgtctctacaaaaaaaaaattaaaaattagccgagtgtggtggcatgtgtctgtagtcccagctacttgagaggttgaggtgggaggatggcttgagcctgggaggtagagcccaggaggttgaggctacagttgaggttaaggttgagggatggtgccactgcacaccagcctatcccaaaaaaaggttgggaggtgctgaggagatgctaagggatttaaggggaatggatcaaaaggtttggaagagacgctgacgacaatgcagagatgagttcctagctgaggttgaaaccagaaatgtgtagagatgacagttggttatctgatccctccctcaacacccccatccccatcctgggggcttcagagcagaagctcagcctggattcatactgaagtgggccttagctggggttaagcaactgattcatagaaggccaagtgacgggagaatgctactgtcaagtgatccactatggatctggcaaaaataaaaagaagggaaagtgctgacaaattaaaatggaagcagtacagcaatcagaggcctctatgaggtgaatctcgttcagcaggaacaagtagtgagtaaggatcgaagttcatcatgcagagtggtcccccatggggtgacagtcctgcctcagtatgactcagaggacggctcattccctagtgggctctgtgagtatttattgggcctttgaagtgccagactttggactctctattcctggacagctctgatggttcagacttctcaaagctgaccctaaaatgcatgagagctatgagtacataaatttgttgaccacaaggcgagggccaaggccttggctagagaggaagcttcgggaaataatatgctgagggtgttggtctttcacccgaagaccacagaagcttatgaaaagtaagtgatgagatcaggcttgtattttagaaaaaaaaactttggtatatctattctttacagaaattgactatgtactgggccacaaaggaagcttaaatgaattccaaagaatctatagaccacattcacaaaccgcaatgtggtaaaattaaacatcaacaacaaaaagagagccaaaaaggtgtagatacaatacaccttaaattagtaactgcagctgcttctgaggaaggggccaggaagtcagaatgaacttttttttttaaccacgtacatctattacttacgaatttttaaaaattaaaaattgggcggacgcactggctcacgcctgtaacccctgcactttgggaggccaaggcaggtggatcacctgaggtcaggagtttgagaccagcctggacaacatgatgaaaccgcatctctactgaaaatacaaaaaaatcagccaggcatggtggtgagtgcctgtaatcccagctactcaggaggttga

SEQ ID NO: 63147 - DNA, 3683 bp, Homo sapiens
ttgcccaggctggtctcgaactatggggttcaagtgatcctcccgcctcagcttcccaaagtgctgggattacaggcatgagccactttgcccaacccattttgaatttcttaaggactctgtgcctcagtttcctgatttgtaaaaccggtgatagtatcactcccttatagggtagttgccaggattgaacgagttaacatttgcagtgcccgacagattgtactagttactgattgaagggctgttttactatccaaatgtggctggagtaggagttgggtaaacatttattgaagaatgtgcaaccactctcacttggaagccgggctgttaggaaggggaggaggattccagtcgcccagccctcccccaccaaacgcaactgccccggcgcaaaagaggccgcggaggccaggcaggagcaggtcctggaggcctggtcggcgtgggcgttttattccgagaccaaggggatccactgcagagttctccgctgggcgtgacctcgggctacggcgtgggaggaagcgcgcggcaagacacccagcgaggtgctggggtcgcccccaggagaggacggcggctcggactgtccggcggcggcggcggggacagcgacaggggcgcgaggtggccgggacccgggccgggcgcgccgggcggggcggcgcatgcaaatctgccgggcgccggggcggggagcaggaagccggggcgggctgggtctccgcgcccaggaaagccccgcgcggcgcgggccagggaagggccacccaggggtcccccacttcccgcttgggcgcccggacggcgaatggagcaggggcgcgcaggtaggatccggggcccgcgcgcggatcgggttgcgaaggtatcgcccgggcacgccggctgagggcgttcgggaagggctcggccgccggcggggaccacggggaccaccccgactccgagcggggcccgagcccgcgactctcggtgcgcgcggagcagcgcccggttccgtccttgccgccgaacggcagcggaggcgcgaggcccggggtacgtggacacccagcgctccccaaagccggtgctggcagtgagacctccgccgggacggcctgcgggggtggggggcttggggttaggctgtcggaggccacgcagcccctcttctccgggcagtggcgcccagccctgcgctcaggaagtcagtgaggacttcggagagagaaagggtggggaaagttctgagaactgtaaatttgagtagtaggtcagtgaatcggggcggtctccgcctccgaatatcagatggacccaataatcgcgatcattgactgggacttgttttactgaaaggatgccaagtgaaacctcccactaacttctctgtggccggtgctgtgcgtcatggacattgtacagatgaggtcaccaagaccccagccgctttagtaacttgccctaaggtgccgcccacttgggagtccgtggggcagcaggactagagcccaggcaatcccacgccagagccagctgctctccatctctcaatcacgtttgaggagcccccacaataaccagaatctccgggagatttgcttaaaatgcagattcccaggtccttgccctgagattcagattcagtaaacccaggaatctgatctttattttatttttaaaaatttattttataaagatggtgtctcactatgttgtccaggctggcctcaagtgatcctcccacctcggcctcccaaaatgctgggatgacaggtgtgagccactgagccctgattttttttttaaacaaaatctggatttcttagacttaagcaagataggggaccactagtttgtctgcttctggggttcaaggaatgcccccaggccagcgctaaccctgctccagttctagtctctccccttccccagccctctgggaggcatgacccactgcacttccctgcccccagtagcctatgaggagcccaaggcatttgctgggacctcagtgcctttatcaaaatcccaaagtccaatggggaaacaggctcaggtgtaggtttggccagggtgtcctgcacattagggcattccagggtcctgcaggggtttcttagaactcggctagcccagcccatgaatgggaggtgacctgctaagccactcattcactcactagcactcattcagctcctgcgaggccctgggtggtgttctgggcactggtgcttgcctcaaggagcaccccctctgcaggaagacagacgtgagggctgggagggtgcggatgcaccagcggctgcaggaccacaagccagaggggatcagctcttcaaaggtcactgggccaggcttcccagcacccagggaccctgagctagccttgtgagtagagcaggggagtctggcaggtagaggatgggaggtaaagggaggcacagagtgggcggaggctgggaagtgtgaaagggcactgtgtacagaacctagggagtaagcagaagccagagatggatggaaagttgggctgggctgcattgtggaaagccttgaatgccatgccaaggaacttgggccagtgtattcaccttggcttgagttgtaaaagcaacaatgcagattcctgggccccaccctgggcctctggatctgaatctggagggagacgctggggaggcagcagggaggaaaacctgcagtcactcaccccatttacaacacatgcagttaccggcaggtccgagataacctaagggtttccaaatgctaggaagtgactcaatgactgatatgtttaatacaatacaatcccggttgcaaaatgcccagggcaagggtgggggtgttcagttttctaatgctcccagttcaaaaaggagctgaaatgaattgtcaaagaagtgacaagctgggcgcagtgactcacacctgtaatcccagcactttgggaggctgagagaggatcgcttgaacccaggagtttgagaccagcctgggcaacatagtgagatcctgttcctacaaaaaaaatttaaaaacttagccaggcgtggtagcaggtgcctctagccccagctatttgggaggctgaggtgggaggatggcttgagcccaggtggtcaaggctgcagtgaactatgattgtgccactgcactgtagcctgggtgacagagcgagactctgtctcaaaataaacaaatacataaatacatgagaagagagaaccttttctacctcccccatctccctgccctcttccacccaccccatctgggacgatggaggagagcgtttgggattagatgccccacctctcgactgccctcactggtacctgggagtgaggccaggacagaagccgcctaagtactgttcttcctcacatttgtaaaagtgaactttcttgagggttgatgacatgttttataagctacttcacacaatgtccaacacccagtgggtccacaatcaatgtatatgtctgttgttacctgtcaaaacgtatagctggggagtgacagtatggacttgagccagatcacccagtgcaaatgctggctttgctgcttactgtgtaactgacttcccagagcctcagtttctgcatttatgagattatagtgactatgccattgtagtgatgactaaatgagttaatatatgtcaagcatacaaaacagtacct

SEQ ID NO: 63148 - DNA, 1208 bp, Homo sapiens
tttaatcagtataaaagagccaacttccagcctgggcagcatagtgagaccccatctctaccaaaaactaaaaattagctgggtgtggtggcgtgcacctgtagttccagctacttgggagggcgaggtgggagaatcacttgagaccaggaattcaaggccgcagtgagctatgattgctccactgcactccagtctaggtgacagagtgagacattctcaaaaaaacaaaaacaaaaaaaccatccaccttctctcttctaatacttactcaagacatcattgtcatgaattctattttattgatgtcagtactcctgtactaataagccagatgagttaaaaacaacagcagccttgcaaccagccatgaagcaagtgatcttattctcatttcacagatgaggagactgaggctctgagtggactccagcctgccacggtctcccaccgagtcaggttggagcctgcacttaggcccagagttatgcttctgtgtctcagatgcttgggggtccctgcccacaaaggtggcccccatgtctgtgtgtccccacccatccaggaatggtatggggtgagacaacaggaagagctccatgggtagtccccacccactgccttccatatgccagtctgcaagcagaaaatgaacgggaagctcttacctgtgcccatgtgttgtcctggctttgggtttgcccagggggcaaagtcctggtcattgttgagacaagttcactgctgctgagggccgagcaaatggtgacaaaggccagattctaaattcctacctggttacttcctgctccgtcaccatcacctcgggcaaattctgaacctccctcagcctcattcctccatctgtgcttgcagggagaatattttactgtatcttccatagtgagctttccaggagaagcaaaaaagagtggtgtataaaaaagcaagtttatgactgcttctgtgccaggcactgtgctgtgcactccagagccaaaggcctgggttcaaatcccagcccactcactagctgtgcatccttaggcaggttcctgaccctctctgggcctcggcttctccatctctgcaatggagatgatattaattgtatctgcaatgctccttggattgggtccatggttaagtgagtgagtgaggctcaagggcttctttttttttttttagagatagggtctcactctgtt

SEQ ID NO: 63149 - DNA, 1818 bp, Homo sapiens
aacgctctggcaacttcttccttgctcaaatatttgttaaaagaagaaaggaatgaatgaatgaatggcctgtttgcatctgtaatagccagcacataggcagtacttggaaaacacccacagcaagaataaatgaggagatggctggacacggcagctcatgcctgtagcatgttggaaggccgaggcaggaggtttgcttgaggccaggagtttgaggttgcagtgagctatgattgtgccatagcactccagcttgggccacagagagagatccccatctctacaaaaatttaaaaattattcgagcatggtggtgtgtgcctgtagtcacaactacttgggaggctaaggcaggaggatcacttgagcccaggagttcaaggctgcactgagccgtgacggtgcgactgcattctagccacagaatgagaccctgtctctaaagcaaaaaagagaaggagaataagtgaggtacttgagcaagtgggtgaggatggttgagccacagcaggcccacagggaggctggtgggtgctgttggtggagggggccgatttgtgttcctggtggctgcagagccagtctgttgcctcccctccctcccactggctgggctggggacggagccaaccaggcagatcccgggccattctggggccctggcctggcctgccttactatcccagtggggccaccgacgtggctgccatttctggaaaccccagttctaggtaggttactgtcccaggaagaagtgcatgcctagcttcctgccagcccagcccagctgtcccagaagccagaggaagctctgggctggtttcttataagtagcatgactaactgattgcgccacaggagctgaggtttcaggccagtttctgtcgtggagtttcaggggtcagcggctccaaagccccagcccccacccgaggcccctgctgtccctggattcctctccacatgccacctgtcacagaggtgcttgcatcctgtctgcagaaccagcccctcctccaagccaggtttcctgcccagagggaagaagagcagaaggcctgtaccgccccctgtgcgcccccagtcctccgccccctgcccccctgccacccgctgtgggttcgggaagagtcctgctgggtcgcttccaggctgctgctggcttctgacatttcaaggcttaatcacttaatctcccccgagttttttaaaaaaagtgagtcaagtgtgttctcctggtggcgggcgtgttttcccaggcccatgcttctgctcatttcctggctgcggccttcactgactttgctgcttcctaactctgtgaccttggccttgtcacttgctgtctctgggtctcaggccaatgggtctcaggccagtggggctccccggacaaagttccagggttttggggactgcatttcaagggtcagcaaccacagtccttaaacacgtggattttggagtgacaatgcctaggttatggttctgtgaccaccagcaagtgctctagcctttttgtgcctcagtcttctcatcagtaaaatgggaatgttaatggcacctacctcatagggtcgttgggagaaccaaattgattaatatattgtaagtacttagaacagggccaggcacaaaataagtactgcatatacagttaactatggacaaaagcttgggacctggttcatgtttaaaaatgattattgaggccaggtgcggtagctcatgcctgtaatcccagcactatgggaggctgaggcaggcggatcaggaggtcaagagatcgagaccatcctggccaacatggtgaaa

SEQ ID NO: 63150 - DNA, 2354 bp, Homo sapiens
accctcgggcatctcagagaagagtaaatcctcatcatccttccatcctgcccctggcaatgctcagagctcaagccagacccccaaaatcgtgaactttgtctccgtgggacccacatacatgagggtctcttaggtgcatgtcctcttgttgctgagtctgcagatgaggactagggcttatccatgcctgggaaatgccacctcctggaaggcagccaggctggcagatttccaaaagacttgaagaaccatggtatgaaggtgattggccccactgacgttggcctaacactgggctgcagagactggaccccgcccagcattgggctgggctcgccacatcccatgagagtagagggcactgggtcgccgtgccccacggcaggcccctgcaggaaaactgaggcccttgggcacctcgacttgtgaacgagttgttggctgctccctccacagcttctgcagcagactgtccctgttgtaactgcccaaggcatgttttgcccaccagatcatggcccacgtggaggcccacctgcctctgtctcactgaactagaagccgagcctagaaactaacacagccatcaagggaatgacttgggcggccttgggaaatcgatgagaaattgaacttcagggagggtggtcattgcctagaggtgctcattcatttaacagagcttccttaggttgatgctggaggcagaatcccggctgtcaaggggtgttcagttaaggggagcaacagaggacatgaaaaattgctatgactaaagcagggacaatttgctgccaaacacccatgcccagctgtatggctgggggctcctcgtatgcatggaacccccagaataaatatgctcagccaccctgtgggccgggcaatccagacagcaggcataaggcaccagttaccctgcatgttggcccagacctcaggtgctagggaaggcgggaaccttgggttgagtaatgctcgtctgtgtgttttagtttcatcacctgttatctgtgtttgctgaggagagtggaacagaaggggtggagttttgtataaataaagtttctttgtctctttattttttatgtattaaccaaacatacctccagacactgctgtgagtgctgtgtctctgttaactcctggaattcacccatccagaggaaccaggatgcaagaggttaagaaacttgccatctgggtttgggttccccatacaaggattcaaatagttgatttaggaagtaatcccgggaaaccctgctaaggtagtggggaactgaggcagggaaggacacaaaccaagaaagtgttacctgaaaggggtccagatgcagaccccaaaagagggttcttgaatctcatgcaagaaagaattcagagcgagtccatagagtcagtgaaagcaagttaatgaggaaagtaaaggaataaaagaatggctactccgtagacagagcagccctgagggttgctggctgcctatttttatggttattgattaattatattccaaacaaggggtggattattatgcctcccttttagaccatatagggtaacttcctgatgttgccatggcatttgtaaactgtcatggcgctgttgggagtgtagcagtgaggacaaccagaggtcactcttgttgccatcttggttttggtgggttagagccatcttctttactgcaacctgttttatcagcaaggtctttatgacttgtatcggtgacgacctcctgtctcattctatgactaagaatgccctaacctcccaggaatgcagcccagtaagtctcagcctcattttacccagcccctcttcaaagctccagtttaaataaacctctgacaaaagggtgagttattcaacagattaccagcatgagtaactgatgcttacctgccggggatctctggaagaccatgcatggcacatgcccagttatgcctgcaaaggagagggagctggggtatttgtccaccagctcccatctgtcattggctgagagctgcttccaggagcattaattctccagcacttccagctactccaggaaaaaaaaaattcttcaactgagagttggaggtgttgagagactctggcacaccaagaagacaggaacaggacaccaacagtggctgatgatacactgccaaggtcacacagctagttagcaacagatctatagtggaatccagacagtgtctccatcacccaggctctctgtagtgatctgcgcttcacatccgaggcaggcagagggatggtgtgggccttagatgggaaggctgggaacctgaagctcctatgtctgtatcacttttgcttctctgagtagctgccct

SEQ ID NO: 63151 - DNA, 1753 bp, Homo sapiens
ccaagatcgcgccactgcactccagcctgggccacagagagagactctatctcaaaaaagaaaaaaaagaacagcacctcacccatgaagtccctgataaatgtcagcttttagcattatcgctaattgtcctgatacgcagatctcgagttgccctaggctatctgcaccgaatgaatataccatgagggtctgttgatctcaggagtctccagtctggctctaaagtgtctttcctgctctaatcctatcctccaatgtaaaggaaacattcttttaagcctgaagaatatccccaatcctgttcgccattaccccaaaacacacacagggacaaaacgggacatcactagattctccccctccccccgccaactccatcggactccagggccctgccaggcctgagggaccccagattagccttaccgccgtgccccaactcaatcaacaggcctccggtacttgcacagccccactccattcccccgccctgcccccagctccatcagcccccgggccctgcgcccgcccgcccgcccgccaggccaggccgcccgctgaccggtcctggagctgtaggtcgggtcgctcccgaggctcctcatagaagctgatgcccgggtgcgtggcgagggcccgccagagaaactcctgcgtgcagggttccaaaggcagcgggaagggcggcactcgcgtctccagccggctccacagcgctggcagacacaggccatcgagcccctccagagcgacttcgtccaacaacgactccagcgcgtccattgctacttcagtcggcggcgcccggggcgcatgcgcaacgcaccgccaagggccttggtccatcgcgcctgcgcacaacgatccggggcccggggaggtgggtcagacccagggttcggaggaggagttccagcgcgccggcatgacgtcactccccgggggcgggctcagtaagtggagctccaccgtcattggtccggggccccgcagtaaccaggggaactgcaaacagtgtagaggccgcttccggttcgagctcccggaaccgccgcctctagggatggacggtgagtgtctgtgggcccctccgggaggtcgggctgttattctcccatccctcccgaccgcgctttgggcagaatcctaggccatgaacccctggaccaccacttcctgacccaagggggtctccgaaatgagggatagggaggcttagtggtctggaacgcggaggagagcctgggggagtggtcagtgctgtgaccattctgctcggctgtggtcgtgaaggaaaccggtactggccgggagctcagtgaagggatgtagggtggggaaggagaagtagaggtctgaggagggtcttgtgaatgttgggatgtggaactgtcggatttgggagttgatatgaaaacaagcttgatcgtgggagtgcaatcgtcaggtgctgggaaagggaattggtgtggggggtgaagggagtttaggaaatactccctttctgtgccttggcgttaataataatagctccctttaacaaagtgctttccagtaccaagaactctgtaagtactcttgggcaacacctcgctaagcttcataccagccttttgagttcagcgttgttccattttacagatgatgaaactgaggctcagaggtgttaaggaacttgcccaaagtcaaacaaccagcatgtagcagagtgagtgagaaacccagacaccctgtctctggagctgaatta

SEQ ID NO: 63152 - DNA, 2058 bp, Homo sapiens
aaaaaattttttttaataaataaaataaaagttcccaggtgattataacgtgtagcagtttgagaaccactggcataaagcagtcagcacagggcctggtgcaattcattcattcatacatttattcattcattcatacttatataactaacccaatgtccaggcctctttccaaaccagttaggtcaaaatatgtgggtgtgcaacctgggcatcagaattttttaatcccctaagtggttccaatgtgcagccatgcatgagaaccagctctttccatggattaagtagactctggcatacaaaaattagccaggcgtggtggtacatgcctgtagtaccagcagctcaggaggccgaggcaggagaatctcttgaacccaggaggtagaggctgcagtgagccaagatcacaccactgcaccccaacctaggcgacagagtgagactctatctcaaaaaaagaaaacaaaataaatagctctggctgtcgacccaggtgcttctttgtaccctgtgcctggcctctctggccctaaaggcacttcagttctccaccgctgccacagataccaggaggcaaaaccaaagaagagaatgataaacattatagatgagccccaaataaagctccagggagtgccagaggagggaaagacttcctgggagaggtggcctgaacggaggcattggaaaggttacggtcatttctttttttttgagacatagtcttactctgtcacccaggttggagtgcagtgacacaatctcagttcactgcaacctccacctcccgggtttaagtgatccttctgcctcagcttcccaagtaggtgagattacgggtgtgtcccaccatgcctgactaatttttgtatttgtagtagagatggggtttcatcatgttagccagtctggcctcaaactcctgccctcaagggatccgcccacctcggccttccaaagtgctgggattacaggcgtgagtcactgtgcctggccaggttacagtcatttctgaaaaatgtagctttgatggttggcttgaagtcagtaggtaatttcagttcagctggtaaaaatattcttagcctcatttctaacaagtattcatggttcctgcctgtggagattatatagtgtttatggcccttggacatgaattattaatgattttgaaattgtggtcattgtagtttactcaaaaatcattaggaagtaaatttatcatgcagtgttggaaaaaaggagatcacagaggaggaagaaatatttattcatcttccaattcatccctacagcatccacactggtgcccagggcactgtggggctcatgagcatggcgctggggacatgtccccttactgctcagagccactgtgaggccactgttgactctgtgaattaatacctccagtttgctgtgagggctgcagttcaggtcctgaggccaagcagctctgcctcaaatcccagctgtgtgaccttggacttgagccctctcaccttgtttgataatgtccactttggagagggttaatacagtcatgtattaacgtacctagcacagtgctgggcacaccataagtgttccatagatgttagttgttatattacttgaagtgtctaggatttaacagagagattcacaaggagaaggcagcacaattaattacactttcacagaaggggcctccctcactccagccagacttgaggctgattccagccttcctgcttcctggctgtgtgtccccaggcacctgggcccccaggcaggctagccccagggccctcattcttaaccactctgagagcctcccatgataacggaaggccgtttttgcagttgattggagattccaaaaaatgctcttgacagcacactcatctgctgaactgactttgcaaggattgcaaaagtcattgaactcacccaactagaaaatgttaagccttccctttgcatgcatgcacatgcacacacatacacacacacacaccttcctgctagtaacagagacttctggtacaaggctagaggcttccttcattt

SEQ ID NO: 63153 - DNA, 1149 bp, Homo sapiens
aattcctctttacaagtcaatgctccacttacctatctcacgttttctttcattggttgtacaatcgtgaaaaaattctgtcatcagactttccaatgccctgagagaggcttcttcagatgcctaacaaaggaatttgaaaaaaaatcaataagctgcatcttcagttccactgttcctcagttccttctaggtcacattcaacagcaagagcaatttacttcctcaaaatcttggttcaacattcttcaaatgcatggtatatgccagaaaaaactgaagggaatttcccagctggctcaaaacccaacgttgttgttgcatcctctataaattcatgctactgtgcagctgattttcaattatgtatgctaagaaaaggggaaattcaaaattcaactctggaataatgattgaaagcaaattagcccctggcccttcctgaatgggcagagcagagagattcaagaaggccagaactcctcatagactattcatccctgatacatttcccctgtgtctgaataatttgtcatattttgattcacagcacttatatcaaacagcttcatggattctcaggggtttggggggtaaccagggagagtggtttttttttttttaagagacagggtctctgtttgcccaggctggagtatagtggtgcaatcatagctcactgcagccttgaattcctgggctcaagcgatcttcccatcccagccacccaaagcaatgggactacaagtgtgagtcattcactgcaactggccatggattcttggaggtttttgaaggcattccaggagtcatacagtcaattctcaatctcacgtgagcagccaacagagattaaagtgcagctgagagccaagctaactagggattcaaaattagctcctgtaaaccacaggcccacagtgagagccagactctcagcagaactgctcaggttggaaatgagaggagaggcagctcaaggcccccagtacccatcccctccctttggggttcatatggagccccaaaacccacttcctttattcttactcaagtaggagtcgcaggaatgaccttgagttaacactccttcacacaacctgcctgcaaaaaggtaaccattcccaaaccatttttgagtcatcactg

SEQ ID NO: 63154 - DNA, 1914 bp, Homo sapiens
acagctagatgagatgtttctcctacaatcacccagctctctaagtgtattagagatgcctaggttcaaagtcagatgcctaggttcaaatcttaacactgttaaaaagtcgcttgaccttgagctggggaattaattgctccgtgcctcagtctccccacttccgaacagagggctggtgtgatcattaaatactactgcactgtcaatcacttcgcgcagggccttggcaagtagtaagccctcaataaacgatagttattatccggaggagctgcaggaggcaaacaccagatgcaagggttgtgcctgctgcgctcccagggccctcccaggcctgagccatcatccctggggggatgggagcgcagggccggggctgcacactctgcacgcatgtgtcaccggccaggctccgcacgcgcctctccccgccatggggagagcagcgatggctcagcagccccggggcccattcccacccttccggtagggcaccccaggagggaagggggctccaattccacttaccatgctggccggggagggggcggctcagatgagctggttcttgggcttcggacacgtcccgctcgcacagttcaggtcatggtcccggcagactcgggaagtcccccacccatgcaaagacaaccccttccccaccgggccccgaggggaccctctaaaaagggcagggccgcccgggtcgcctcatcgggggaccccgagacaattcatccagacccacccgcccctccccaaggaaactgaaaaagcaggaaatgaggctcggatgccggcgaggagggcagctgctcgggacccccgcccgggcccgacccccgcgggggaggctgcgggcccaggcaggggctccccggcctccgcgggcagaggtggcggcggccccggccccgaggctgaacgggcggaggctgacaggcctcgaccgcgcggcccaggcggccggctcaggggagaggcccgggggcccgcgctgtcctcgcagcctcaacccacacggccactgccgccgccccctagagcatccttgcgcgcgcccgccctggagccgcccgctagtaccgcgcggccgcccccgaccaacagccccaacgcgccggaagtggcgagcgccgggcggccccacagcgcggccgccgggctgcggcgctggaaccggaccaatccggaatcgagcggggcgagcggggggagcgggcggagggcggagggcggggctgcacctgacggctcccactggccccgccttcttaccacgccctctcttgccccgccccctgcgcccaccgcccgtgcgtccacgcgggccggcagccatcttggtaaagggagcccgggctgccattttagtaaaggcgtggtttccctttcgcttttttcgcccattcattccgctaaaattttagtgagtgccttttacgggcggagcatcgagctggcagcgtgacgacacgcggccctatggagcttacattcatgcagtccacacactcttgcccgactatattccaggccctgctgtggatgctaggacaggggagataaacgtaacttcgatagccaaggtgctgagagaggcagagaatgtgttggattcctgttcccatcctccaatccactttactcgtgaaagtgctcatctttattttgttttatttttggggacaggttcttgctctgttgcccaggctggagtgcggtaacacaatcatggctcactgcagcctcaacctcctggtgcgccaccatgcccagctaaatttttttattttttgcagaggtgaggcctccttttgatgcttgggctggtctggaactcctgggctcaagcagctttcctgcctcagccttccaaagtgctgggattacaggtatgagtcatccagc

SEQ ID NO: 63155 - DNA, 1106 bp, Homo sapiens
ctccacaaaaaattaaattagccgagcatggtagtgctcgtctgtagtcctgaggcaagaggatcgcatgagcccaggaggtggaagctgcagtgagccatgatcacacctctgcactccagcctgggcgacagtgagaccctttctccaaaatacaaattttaaaaggtactctggggctggcacagaccggggacctcgagtggaccagctggggaggggattcatgtcctgggttgtgggcgatcagaagatggaaatgtcgtggtcttgccctcgagaaccagatagaacagagacagagacagagcgcgcgccgcggtccctcagatcgtcctgcactacggcgaaacggccactagagggcgtgttgtgctcacatatgcggaccggccggcaagcggcggattccgcggacaaagtctcttgtttagccacagaaccctgggcttggccccaggcccgctacgtccgggccgtgtggcctcagccaggttacacaaaagctctgtgaccctgtttggtcagccataaaatgggcacagctataagtccgaccttctaaggtggtgtgaggatgcccgaggccacgcaggcagagcagcgtccagtggggaacgaatggccccgcgagaaggggaggcttcgccatggcctccgtctctctccgcttctcctgcagctcctccgcccagccctccccaggccacatccggtcccgggagagagactgagatcgactttggggcaggggagagcagggggaggtaggcagtgtctaggacagggaaagagaggaggcagccacctccctcaccccaccccacctcacccaccccgcctttgttttagaggcaggatcctgctctgtcacccaggctggagtgcagtgtcctgatcctggctcactgcatcctcagcctcccaggctcaagcgatcctcctgcctcagtcttctgagtagctgggactacaggcaggtgtcaccacgcctgagaaatttttaattattattttattttattctattctattttatttatttatttatcttattttgagacagagtcttactccatcacccaggctgagttcaatggcgcgat

SEQ ID NO: 63156 - DNA, 694 bp, Homo sapiens
tggatagggcaaccacccaggcccaagtttatgacctcttccccaagaagactgtgagttctctgacgtctcgctggaaataggatgcatggatggatggatggatggatggacggacggatggatggatggatggaagcgcaggcaggcaggcggacgcatggatgaatgaaatgcatatccgaatgcagaacctggatttgttttccctccttcaaacacacacaggctccgccccactagcacagaccgggacagtctggggcagtctcgtcccgcagggcccagaaagctggaccaggtgaccctctcagactcccccgagtcctctgtaacctcgttctcgccccctcgtgggctctgacctagaaaaggagtggggtgggtggggggtggggggtgggagccagctcgggagccaccggcgctaggacccagcgcggccggaagggggtgggggcgccgcgcggggagaatctgcgctccgcggcgcgcggcgggagggcgggcgcgcggcgggtgagcgcgcttgcgcgagggcgcgcgccgagcgggacggacaaaggggcgggcggcggcgcgcgagccggagggcggagccgcgggccgggcgggcaggtgcgcgctggctggagggcggagccgcgatgccgcgatggagcgcagcccgggcgggcgccggggccggggcccg

SEQ ID NO: 63157 - DNA, 2176 bp, Homo sapiens
ctcaaaaaaaaaaaaaaaaaaaaaggttcaggcccggcatggtggctcatgcttgtaatctcagcactttggaaggttgaggtaggaggatcacttgaggccacgagtttgagaccagcccaggtcccatagtgagacccccatctctataaaaaaatataaaaattaggcagatgcggtggtgcacacctgtagccacacctacttggaggctgaggtgggagaatcacttgagcccaggagttccaggctgcagggagctgtgattgcactactgcattccaacctgggaaacagagcaagaccctgtctcaaaaagaaaaaaaaataagataaaataaaataaattaaaaaaataaaaaagttttagtagtgatgcatttatttaaacgttcactaggaaaacgctggttttccaagtggagtcgtgatttaaagttttctttttaaaaatatgtgcactaaaaaacgttaaggctgaattggctggaagaaaaaagtaaataatcctacaggtggtaggtatgaggatcttgctaaatccggaaggtgataaggagtgaagtttggaaattttacatgctgcccctggggcaaaccagtggattcagtaaatatttgtgggttcagctcctttgcgcagcttaactctttcttccccctttcctccggtcacttccctcttctcatgccattgtcactcgctgaagtctcaggccactcaccagaagcccaccgcgttcttccaatgcgcgccctgatggtccaacagagggagccggggctccgggacggtctcctcccctgggagagcgagaagagggcatgacccccacctactctcaggtgcacgaccgctccttgcgtgtcctcccggggccgagtcagctctcattcccctcaggtgggctgcgagccagaggtggtcgttccatgagggtgggcgggaatactcaccctcggaatccgaaaagcgccgccgcgagcctgcacagcctcccatcgcatcaagttcaggtcccccgagggtccagggtcatagagtgtccaaagggggctcccacgggagggatgagggtctgcgacaggtgacaaggatcaacgcccgattgccggtcccagctccggcttgtctagggcactcgcgccccgcgatccatcaaggaagctgggggctccatctcgagcgccctacgacccaccacgccccacccatcgtactctcccccgccccgtctacagcagggaccctgaggcctgtacctttaagagcagcagaatgttctgcactatgcagaggccgtttgtcggatcacgtgacagcacccgcgtgttcccccatcacgtgctcagaggttttccctacttccgggtcctctctgtcttcgctttgggccttctcggcttcggagcgtgaaaaagggaggggctggagaaccctggaaccgcaggttttaaactggagcgggtgggagcagcaagcagagccgtgaccttagatcagtggcgcccaagaccgagacagtagcctgccagcaccagttatgactgtgggaggcttcagctcctttccttcagcactcacttgccagaaacaaatatggccacctgcctactcccttttttttttttttttttttgaggcaggactgtttctggttgcgaacaaagacgaccagcttcaggtcattcttatccccatctgttgaccttacaaattgttttagagacctaagtaaacataacactcatctaaagggatttcgtgaatgatctattggcagtatccaagatgttaagagatccctatttccaaattatcctagaaccaaaaaatatcacagcacttcaacccctggtgttacagatgagaaaaccaaggtacaaatatatatatatatatatataacaaaattagccgggcatggtggcgcattcctgtagtcacaggtaccttggaagctgaggtgggaggatcacttgtgcccaggaggttgaagctacagtgagctatgatcacgccactgcactccagcctgggtgacagagtgagatcctgtctcaaaaaaagaaaaagtaaaaaataaaataaaaaaaatatatgtatatgaaaaaaattggaaagttgctgacaatcattcatacaatgttagacctaaaggtgaccttagagacc

SEQ ID NO: 63158 - DNA, 1744 bp, Homo sapiens
ttatccaacgagccccagcctataacccctgcttctggaggaagtaaatttaaccagtaccaccaggagtgggaccccatatcagcccctgaggttgaacctatgtccattgagggaggtagctaacagaactgggaggacactcagagtacatgtgccttttttaaaatgtctgatttggctttctgccaggagaaatttggccaggttttggaggatccagggaagtttatagaggcgtttgctaagccgaccatgtcctttgacttaacttggcatgacttgcaaatattgtttgcaagtaggtcactcctgacctcaagtgatctgccaggctcggtctcccaaagtgctgggattacaggcatgacccaccatgcctgacctgggacttgtttaatagaaggtatgaggctgggcacagtggctcatgcctgtaatcccagcactttgggaggctgaggcaggaggatcgcttgaggccaggagtgtgagaccggcctgggtaatatagggagaacttatctctgcaaaataaaaaataagaaatccagctgggcatggtggctcacgcctgtaatcccagcactttggaaggctgaggcaggtggatcacctgaggtcaggagttcgagaccagcctggccaacatagtgaaaccccatctctactaaaaatacaaaaattagctgggtgtggtagtgcacgcctgtaatcccagctacttgggaagctgaggcaggagactcccttgaacccaggaagcagaggttgcagtgagccaagatcgtgccactgcagtccagcctgagtaacagagtaagactccgtctcaaaaaaaaaaaaaaacaggatgttgcaaagaagccagctcaaaccagctaggactaggaatcataatacatttgcataagacacttccaccagcaccatgacaatttacaagtcccatggcaataaacccaaaaggtaccttatatggttccaggaaaaccctgccccctttccagaaagtttgtgaatagcccgcctcttaattagcatgtgattagaaggacgtatcagtagagcctcagtagagccagcaagcgatcagggagtgccctctgcctgtgggacagccctgctctgtctgtggaacagccatcttgttgtacactgttgcacaaataaacctgcttgctttcactgtccgctcactcttgaattctttcctccgtgaagcccagaaccctcctgagctgagccctgattttggggttctcttgcatcctcactgatggctgatcctccaggaggcctttcctggtcatctgacaaagattccctccttggccaagctagccagacaccaacatagttttttttgtatttttattttggggccaggttatgatgtagcaggacaagccacagacaaaactcatcagacaccggattaaagaaggaagaggtttattcggctgggagcgtcagcagacttgcgtcttaagagccgagctccctgaaaaagaaattcttggcctttttaaaggcttacaactctaaggggtccacgtgaaaaggtcgtgataaatcgagtaagcggggaacgtgactgggggctacatgtatcagctaacagaacagaaagctttgcaatgctttttcatacaatgtctggaatttacagatagcacaagtagtttaggtcaggggttgatgttattgttattacttttttaactcctagggccgggtggtg

SEQ ID NO: 63159 - DNA, 1473 bp, Homo sapiens
tgtaagcctttaaaaaggccaagaatttctttttcagggagctcggctcttaagacgcaagtctgccgacactcctggctgaataaacctcttccttctttaatccagtgtctgaggagttttgtctgtggctcgtcctgctacaatgagactggctaatttttgcattttttgtagagacggggtttcaccatgttgccagcctggtctcgaactcctgggctcaagcaatctgcccatcttggcctccctaagttctgggattacaggcatgagccactgtgccctgccaaacaccgacatagtttctaatagctcaaggtctcatccctggaatgaccctctaaaagtgcctgcctgagaaaactcaagcctgccaaaagaacttactgtttgttccagccaacacctgaggatagggccccatctcccagctcctgtgggagagtaagagctcaacatcgctgttgataagcaccagttagcaagcccagatgggtttcacctgggccaacccctcccctcttcatgtgttttgtaatttttcactgccttgactttactgaacccctgctcctcacccccactcccattccctcattctctgtacaaataggagttcagttcacactggactctgttccctattgcaacagtatattacagattaagatctgtccttgtgactttaactgctgtctggctttgtttccctctttcgccctcttttttggtttttggtgtttttcttttagagatagggtctcgcttctatctctaaatctctgggtccagtcgcccaggctggagtgcagtggtgcagtcatagctcacttcagcctcaatctcctgggctcaagcgatcctcccaccttagcctcccgagtagctgagactacaggtgcgtgacaccatacgtggataattttcttttttttttttttttttgtagaggcggagtttcaccatattatccaggctggtctcaaactcctggcctcaagcaatcctcccaccacaggctcccaaagtgctgggactacaagtgtgagccaccacgcctggctctgcttattttcttcaaagtgttattagtccataaatatttattaagcacctactatgttcaggcactgaggagacaatggtgaaaaaatcagccaataaataaataagtaaaatacatagcatgccagatggtaataacctgctcttaaggaaacaaacaggaatttcagcatgactgaaacttccttctggcctttgcttaaatgcctcctcagtgaagcattgctgaaattcttatttgtttgttcacttataattgtttttctgcccccactggaaggtaaattccatgaggaaaggacagtatgtctagttaccatggtgtctgcagttttagactattccctggcatatggtaggtactcagaaagtatttgtcgagggaataaatgatatttccccaaa

SEQ ID NO: 63160 - DNA, 1056 bp, Homo sapiens
gtagattatcaatagtggtagctggaactattactgtcattagcattaactttaggggattttagttaaaaaatcaattttggggctgggcacggtggctcatgcctgtaatcccaccacttttggaaggccgaggcaggaggatcacttgaggacaggagtttgaaaccagccttggcatcatagcagcgagacttcatctctacgaaaaatttaaaaattagcccaggaggtcaaggctgcagtgattgcaccactccaccccagcctgggtgatagactgaaaccctgtctcaaaaaggagaaaactgagggtgattctgaaatttaaaaatgtactcctgtatctgtgagctggcctttgagaaaggggaaggtggaagagaatcaggttgcttgcagaacagacagacaaccccatggtgagtttctcagttctctgcaaggagtcgggagtcctttgagttacagaagcctgacagggccaattctgtaagcccctggggtaggacagaggtcagtgatttctctagttctcagggggatccccccaaaatggggaaacagacatgcaaccagaagaaaaagaaagggtttaggaaaggggatggagacagaagaggaagagtctgggtaggatcctttcggatccaaaaattctgcaattccaagaattgccttaattcccagaacagccacttaaaggcctctcaggcagaggctgtgccaggcgagggcgaggccaggaaaggccaatcagaggccaggagggaggggcagtgtgtgaggactcctggctggtgtcaaaggacccaggacagggagtggccattccagctagggacacagtgcttcccagccttcattttctcttttgacagaagagaggccagtctcaccatttgacaggtgaggaaacccaggcccagaggagtaattgaccagaaattaacgagagtttaggattcttcattgtcaatacatggttcttcccaggcatgtagcaaagggggaaaaatccaggctttaaaattcagatagacctgagttcataat

SEQ ID NO: 63161 - DNA, 2734 bp, Homo sapiens
ctctgacttttagatggcactcataagtagcgttcccgtctatgaacaggacacaatcaacaaaaacaggtgctggggagggccgtgtttcatgggcagtatcgcaaaaaagcagaagaaattcctttccactacgtaggagcccacagaaatgtatgcactaaaatatatgcaagcaaaagcaaacaaaccaaaagctgcattcacagcgtagaccctgcaagagcaggaacactccctgccccagatacatacaccaaacacaaatacacatcaaagatgctctctcaggctcatgaatgtgcaggcacaggcaagcacacacatgcccgaacaaaaacacacaaagaacaaggatgaacacacacccaagctgtggctgccgtgcgtgtctatttattgttgctgccaccctggaggagccccagtttcttctgtagctttcttttctgggggatcttcctggctctgcccctccattcccagcctctcactccccatcttgcacttttgctagggttggaggcgctttcctggtagcccctcagagactcagtcagcgggaataagtcctaggggtggggggtgtggcaagccggcctggatcctgtcctgggtcctccttcctccgcagtcccgtctctattgctgggtgtagtgtccatggtctggcctcatctggggggtgaggaaaagcaggtggtaaaagggacagagatctgggttctaattctgcctctcccactcacttgatttgtgactccagggaaggacccaccctctctatcctcaatttctgtctctgtaagtcaaatttcccttcaattggaaaggttctgtgttcccactttgctctggccactaggaaactcacaatcaaacatatgtctcgttttattctgcatcaagacaacagttgcctgatccctcctccccacccaatcacacaccttccggcctgtccttcatggcagaagcaccaccttgagctctctgggccccccgactccttacctccagctctgtctcagcgccgtgcccctcgcttcttcctctctgaattctgcagcttggtcaccagtttcctctcgtgcccgccagggctggggcggttggtgttggcagcagcttctctcttggtgcgacctttccggcctccacctcctgtaaccaaggcaggagtcagaggtgaagtgggcataggcatgatgagaggccctgtcagaggagaggcaggggttcagggttgtggggatgggaagagcagggagaagcctgctgcttcccctctgtggaatgtgggaccccagatgtgtgtgaggtcccaggctgagtaacatagcactcctgggataagggattagacaggggtgacgtgagggtccaaggaacaggttggctagaaaagggtgagtgggctgggcagggtggctcactcctgtaatctcagcactttgggaggccaaggcaggagaattgcttgagcccaggaatttgggatcagcctgggaaacatagtgagaccccatctcaccactgcaggtggtgtacacctgaagttccagccactcaggaggctgaagcaggaggatcacttgagcccaggagttcgaggctgcggtgagttgtttgagttgttgtgatcacactactgcactccagcctgggtgacagagtgactctctcaaaaaaaaagaaagaaagaaacgaagaggaaaggaaaggaaatgagaggaaacaagaggggtgggtcctgatttcgggagaggaggaaggaccgtggagatggctgagtgggccttaccgaggtaggaatgggccaggctatagaggtcagattcatccaggctggagtcctcgtcctccgggcctgggggctgctggggggcgctggttgctggtgggaaggtggccatcgtgcctggcttgtcttccctgcctctcttcttctcctaacgctttgtctgtctctgctttcctggccccgggcctctccactccctcagcttataaggctgtgtctcctcctcagaccacagtctggctccagcccatcaggccctgtctgatgcaatctggccccttcccaaaatccagcccagtaaacacagtcatgagacgggaagagtcggtccctgagtccagcccaactcacctcctccctcccaggctcacccagctggatattttccatagaggaggtcccgcttctcggcagaaagcagggaagaggcaggatctgggctaaaacactcgttgggatcatggcctcacctgatcgagggcttcacctgggcctgggatgacggccacacagctaaccccggcaccccaattctcgctgagatgcaggacgtgaggaaggagggggaagggatatcagcacacttgtgccagggacaagtcagtggcttccacccagtcacactcaacatcttgcttgtcttcttttttttttttgaaatggagtctctgtcgcccggctggagtgcagtggtgtgatcttggctcactgcaacctgcaacctcctcctcccaggttcaagcaattctcctggctcagcctcccgaatagctgggattatagacatctgccaccatgcctggctaatttttgtatttttagtagagatggggtttcaccatgttggacaggctgatcttgaactcctgacctcaagtcatctgcctgcctcggcctcccaaagtgctgggattacaggcatgagccaca

SEQ ID NO: 63162 - DNA, 571 bp, Homo sapiens
cgcctcctgggttcaagtgattctcctgcctcagcctcctgagtagctgggattacaggcttgtgccaccacgcccggctaatttttatatttttagtagagacggggtttcaccacgttggccaggctggtctcgaactcctgacctcaggtgatctgcccgcctcggcctcccaaagtgctgggattacaggcgtgagccacctggccagtatcttttttatttgtttgctttaccattatttgtccccactggcatgcaaccgttggtttagtttagttaatggttaaaggagtaggctctggaacagggcttctcaggtctaaagcttggttctgccccctagttagctgtgtgctcttagacaagcttagtctgcatgtttgtttactcgtctatacagtgggattaatggcacctaggctggataaggtgaggcacacctgcaatcccactgttttgaaaggctgaggtggaaggatcacttgaggtcaggagtttgaggctgcggtgagctatgatcgtgccactgcactcgaaaaagaaaaagaaaagaaggttggggccggg

SEQ ID NO: 63163 - DNA, 854 bp, Homo sapiens
ttttaacaacagacttttattttttagggcatttttaggttcacaacaaaattgagcagaaagtacagttttcatattacccctgcgcccacccacctccagcaagcagcaatctgttcgctttcaagttttatttatttatttatttattgcattttgttttaaatagagtctggggaaatgggagaaaacgctgaaaacgcacaagcactttggttggttaaattagggttccgccaagagccggagcggtgtgccaagtgaaaactacatttcccacggggcagcgggtcacgtcacagaggaacgactacgcatgcgtgcaaggtcctccgcgcgcgactacgctcataaaaggaaaaaaaagcgtgtgcggttctcgacgtgccgccaatcttcgaacgcaggtctgtgatcatccgcagactccgaaaaagggttcgaggaacgcgcctgctcccctcgtcgcagtttccagcccgacgagcttgttttgtcccggactcggtaggtggcgacgggccgtggcctgagacctccggcgaaacgcgggagcgaagggctgagtcctccctccgcgccgcggctcccgacctccctgaggcggcgctctaggggcggtgcgcacgcgctctgggcgggaggggggcggggctcgtgggggtgggggcgggagaggagggcggggccggggctcggggagggcgggccctgcgcccggccgctcgaggtctgcgcttgcgtgcttccatccccggcgagggtgggaaacagcgacacgctgggctcggcacggacgcagcttccaggtggggtactcggacccgggtcacgaagatgcggacagaggatgg

SEQ ID NO: 63164 - DNA, 974 bp, Homo sapiens
tccttgagcccctcggcccctcacatgtggcaactcctaggctggccaggcctgtgatccacttgcccggccacagtccatctgggctccaggacaaacagcccattgagcaactgagctggtattgggggccagagcctgatgtgggaatgagcaaaactgtgatgactcagcaaaaggaggatcctgggcagggtggctcccacctgtaatcccagaccctagggaggctgaggccagaatttggagaccaatctgggcagcattggaagaccccatctctaaaaatcttttaaaaatattttttaaaactatccaggcaggatggtgagggtctgtagtcctagctactgaggcaggagaatcacttgagcccaggaattcaaggctgcagtggccaggatcccacagcactccagcctcggtgacagcaagacctggcctccccggaaaaaaaaaaaaggaagggagggggattcaggccggccggggttgtctgaaatgggatatccatggggagagggcagggatagcagaggcctcggcttctggaatgttggagccacaagctgagcagggtgagggcgtcctgggccattccggtgtgtcactcacctgagctcttgggaacctggccttgtgccctcctcgcccgcagtggctgagtgtgggtgttgtgtggggaatgcaggggtgttgtctgtgctgagggtttcttaggtcagtgtgggagggatctggagccggggctggacttagatttgcttccggaaggaaggggtagggttgggggtgggggagcttctctattaccctccttagtttgccagctggagacaagcttaaagtgatctccaaagccacgactgggtttggtgtgtagaaaacagaagaatgaaaggggaaagggcccaatggtgggtttgtttttgtgggtttttttttttgagctgtcactgggctcctgacctgcc

SEQ ID NO: 63165 - DNA, 1028 bp, Homo sapiens
ctagggaggctgaggccaggagttggagaccaacctggtgcagcattgcaagaccccatctctaaaaatctttaaaaaaattcttaaacattaaccaggcaggatgatgagggcctgtagtcctagctactccagaggctgaggcaagagaatcacttgagcccaggaattcaaggctgcagtggccaggatcccacagcactccagcctgggtgacagcaagacctggcctccccggggaaaaaaacaaacaaacaagggaagggagggggattcacgcaggccagggttgtctgaaatgggatatccatggggaaagggcagggatgccagaggcctcagcttctggaatgttagagccacaagctgagcagggtgagggcgccctgggccgttccactgtgtcactcacctgagctcttgggaacctggcctcgtgccctcctcgcccgcagtggctgattgtgggtgttgtgtggggaatgcagggttgttctctgagctgagggtttcctaggtccactgtgggagggatctggagccggggctggacttagatttgcttccggaaggaaggggtggggttgggggtgggggagcttctccattaccctccttagtgtgccagctggagacaagcttaaagtgatctccaaagccacgactgagtttgctgtgtagaaaacagaagaatgaaaggggaaaggcccaatggtgggtttgtttttgtaggttttttttttctgttttttttttttttttttttttttttccgagctgtcactgggctcctgacctgcccctgaactccaccctgccaggcagccaacagacaagctctctctaattgacccaggcaagagaggggagggattggaggagaaagctgggataggcaggccctggaaaggtcacctacctgctggctccaggccagtcttgaaggtgccaggggttctggcccagtgcagcccacaggcccccagcagcccatgcactccaggctctgaccacaaggccagtctaga

SEQ ID NO: 63166 - DNA, 3669 bp, Homo sapiens
taagctccccactgctttgaggataatgtccgtgtctcttacaagacttgggagcctttaaaacctgatcccagattagctacctcttcccccctttaattttatgcttaggacaagctgagtttttcttagtttgtcatatcctatttccctgcctagaaacccatctccccctgccctcttatcagtttttttttataatttaaatttttttttttttgtagagacaaagtctcactttgttgcctaggctggtctcaaactcctggccttaaacgatccttctgcctcggactcccaaaatgttaggattacaggtatgagccactgcgcccggccctcctgtcccttatctgggtctcccaaaactggattaagattaggtgtcactcccatttgctcttgtagtcctctgtgcttcacctactagatctcgtcaaattctctgaattcaccactagcatgaactcctccagagcaggaagcagtttaattatccttgtgtccaaaacaactaactgaatactccaatgcccaactcattttgaatgaatgaagctgccttcattgcagggtcgggtggaggattttgaactcggaactttggccttcagtctttgttattacagtttaaagattcattctcgggcatggaggaacaatttaggtcaaaatcacaaaaatctgaaataatttaggacgaggcgtaaatttatctgcaaagatcaacacgctcaaacgaatcactaatgctcatcagtcttttacttaaagcaaacaaggtggagggtagctccttgcgaaacctaccacctgcctaaaagcgcagtggctcgggtggtccagtcccggagactttcttggcacttaaggctctgcccacgggccgccaagtggcggaagagcctcacgcacgacgtgccgcctcacactcccgcggaggcatcgcgacgcagcgacggcgtgggcggagaggccggcccttcctctggcgccttcggctcctccccctgcgcctcacacgctcattgtgaagcgacagcggccgccggcttctaaggcggtttgagaccttaagaccctaaatccttggcgcgcgtgagcgcccgcgccgctccttacccactcccagggctaggggtgcgaggttcaccgacttgattctctcccactttcccgccgggagctaaccgcgccggtgtgcgcggcacctcgcgccactgctcgctcctggccccccccccccccccccccccccgggagctcccacccgcgcgctcctccctctccgctccccggcgacgcgcacgcgcgccagcccggctcgcgccctctcgctttcctccagccgcgagaccccctccccttccgcctcgcggcgcttcctcgcgccgcggtcttctctctccacccccgacaccgcggggctccccccgcccgcccacggcgggccccggctgcccgatccccctcgcttcccgcgctctccagcggggccccagccccggccccctctctccctcccttctctctaattccccttccggacgctgccatcatgttgaagcctcagccgctacaacagccctcccagccccagcagccgccccccacgcaacaggccgtggcccgtcggccccccgggggcaccagccctcccaacggcggcctcccggggccgctggccacctctgcggctcctcccgggcctccagcggccgcctccccctgcctggggcctgtggccgctgccgggagcgggctccgccggggagccgaaggcatcttggcgccgcagccgccgccgccgcagcaacaccaggagaggccgggggcagccgccatcggcagcgccaggtgagaagggtgggctccgggcgagggagccgcggccacccagaggctgtggctcggttccggtggggcggaccccgacccggcaccgtcaggggcaccggctgggtggggagtccccgtgaagctgggggagggccccctcaggtccgaacaggtcggacggaaagggtccccgggcggccaccggagcactgaggggccgcgctcggctctcggggcctagtcagggctcgcagccccggccttcaggggaggcggggcgcatcccgccggcgccgtcggaacggggagttgggggggggcaaggagctgatcggggtccccggttccattaccacgaagggtctcgcggtccccggcttcagccaatggggagtctgctgcgggaaggggtccccggccgtagccaatggaggggggcgcgcggcccacagtttggccaatggggagggagggacttgggagcgggttgctgcctcccccttcccggtctggccagtaggaggggagcgaggtgggcggggggacggaaggagggatgactgggaggactgcgggccgggagcctctggcgcgcgcgcccccttcccgtacgtgcgcgtggatgctcggtctcatgacccgggcattcgcgcgccccgggaacacctagggcagggactagttcgtggaggggctcgtctggtggcagtgcatgagtagtggaggccctgctcagtttttcctgtgcgagtgtgtgtgtgttaatggaattaagagtggcagcacacgcaggcgcagtgggctctgatcgctggaggtgggggttcggaaagtcccgtgggttttagtgcgcaggcgcagaccgggcgaggcctcccggtggatggcttttgcggctgcgctgtcccccagccccgccagcggccccctcttcgccctcaaccgccggttacatcagccagcgacgagcagggttacctggcgattggtgatccccgcagagtgggtaacgggctgaatgagtcatgaggtcgaggggatggggtgtggaggggatacccctcctcccacagttttgaggcgtcaggctgctgaaaatgattgtcttttctgtttgggaggtaatgtacctgagctaggtagttccaaagctgcactcctggagcttttgccctcacagctggcgtggctttttggttaatactgtagcattgatctgttggtagcctgcagccctagcccctttctcgttggttcttagagcaattgacaaccattgttgattgagatctttttgctggcatttggaggaaatgtgtttgctggcttattaatgtctatttttttcttcctctacaaggtgacagtttgaaaatcttatttattggccgggcgcagtggctcacgcctgtaatgccagcactttaggaggcaaaggtgggaggatcccttgagcccaaggagatcgataccagcctgggcaacacagatgggaaatcccatctctactaaaaattaaaaaaaaaaaaagccaggagtggtggttcgtacctatagtctcagccactcgggaggctgaggcaggaagatcacttgagccttggaggttgaggctacagtgaactgagatcacgccactgcaccccagcctgggcaacagagggagaccctgtctcaaaaaaaatagaaaaatcttactgattaacaattttgtagtctaaatcagcatcatcaggtggtatatacttctaggatttaacattaatttcatagtggtctaagagggcttgaacagacttaagtaatttcttgttttcttttataggggac

SEQ ID NO: 63167 - DNA, 2030 bp, Homo sapiens
cccacctccctcagctagaactaaaggaggaaaagaacacacctctcagctaaagttccagtgctagaggcagagcttagaccacgcccctgaaccctcccacctaaatacataacctcctccaatctctaactcttccagcagagagaactgtgggtcagaaagaaatgttagagggccttaagggtctgccctgtgacttctttagggtacagcctctgcttgcagagcattccccacgactttgtgatccccaagccattggtggatcacaaagttcttcctgttcaggagaaatttgtctcttgcatctcccaatccacctgtcgcacaaattcgggctcttggggccacagtaaactcctccagcagacactctgctggccttgcctccctggctccaggtcccatcagtagatagggcgctgctggacgccccaaccccactcactcttcgtgatggctgcagtcagcgtggtcttcccgtggtccacatggccgatggtacccacattcacatgtggcttgtcgcgcacgtaagtcttcttggcctccacggccaggccgcggcacaagagaggcaatgccggggctttcagcagccgcaacagaccctgcagcaggaaggtccggccggcggcgagacctgccgggaccgaagcttggagtcaggcagggaaggggtcagaccgaacccagccacctaccactcccccaaagtgttcctgggccgccatcgccctccctgaccactcaccgctgaagtggggcgtcgcgcgcagcagggtggcggccgccattgtggtcatactcgcgccccggtaaccggggagccgggaccaggagcccgagcgcacagaagaagaagggcgcctgcggctggaaggcacttccggcggaagttagagctgggagggcaagtccgggcccctctagccgccagtgtctatggccgtctcagccgacgtcgggcgcgcggctgaagacgtcatggagggggctggtgtctcgagggcggagtatgatggagaggttttccaccactcgcgcctctcgggctgaggggcaacgtagttctctctggcggtcgcagggggcactgaggagcgtcccctaaatcaccggcgccgcgaaggctcatgggcgtagtagttctcaggtcggcgggctgtggaggtgatcagagtgggagtcaggcgggctaggccggacccggagggaggggctcgggctccgggaggcagctgcggctccgactgctcaggaacctcctcctgggcccggcagagagagaccccgagtcccccggagtccgactcgctacgcgggtcttgcgagatatctggccgcctctgccgcagctggaggtaggggaccaggtcctggacgcctttcggggatggggtgaagtgtgacctccctcttcgctgagactttgttttctaatctgtaaaatgggaatagtagtatccacttcatagggagagcctgacatctagccctgagaggagatgaactgggtaggagtcagtgttgggccctgtgaggtcaggcagcttgcggggaccctgtactgctagacctcacagggccagagcccacaagacagacagcttcgctgcccacccctgtagtccctcagcagcctaaggagcagttccgttgggcatcgccccacccatctaattttgcagatgaggagccaaggatgaggagccagctaggggagcctttaaggggagcctgagtctcctttaatctgtcggtgtccccagcacctaacagggtggagcatgcagtgaatgttgaatgaatgggtgcaagggtagtcaatgtcccttaactttcacatccatcatctcatggcagcttccacagggcactccaaagtgttaattatggctgcttaaccctggctaatgtttcggaactcatcagatcctgagactcagtggacagtgtttgtttcaaatagattccctaattcctcccctggaggttatgattccgtggggtctatgcacagactg

SEQ ID NO: 63168 - DNA, 2217 bp, Homo sapiens
ttttagtacagacggggtttcaccatgttggtcaggctggtctcaaactcctgacctcaagccatccgcccgcctcggcctcccaaagggctgggattacaggcgtgagccagcgctcccggccctgacctcattttttttttttctatttttaaaatagggattctagttctgttgcctgggctggagtgccgtggcgccatctcggctcaccgcaatctctgccttccggattcaagctattctcttgcctctgcctccggagggactgggactacaggcgcgcgccaccatgcccggctaatttttgtatttttagtagagacggggtttcaccatgttggccaggctggtctcgaactcctgacctcaggtgatccacctgcctcggccttccgaagtgctgggattacaggcatgagccactgcgcccggccctgacctcattatttctacccaccccctcccccaccactaccaccatcttcatctccagcctcagagatgcaaactcctggaccgcctgcccctttcctcagataaaccaaggtcgtaagttcaggctccgcctccccgcagggcctccccaaggtcacccgcttctttcctcgctcagctccttggtggcgttgtccgcgtgcccctccacagcggggccggcgctctaggctgcagcgggccgttcacacagcctcatcatctcgctggtttccggtgctcggcggctactctagccctcagccgggccctgggactctatcccctaaggccggttctctatggtcgacatcgcccctttgtcccgaatttcctccgggaggacgctctggtgggatccaagcacttcccccgctgcgtctgtggtcgcttttaggtgcaactggagaaggcactgaagccctacgagattcacaccgtcttcggtctcctggggtcggcgccgagtgggaggatggcggaagtaagtatgaaggtgcccttccctcccgccgctgttctctatggtctcttccttcagcgacgggaaagggggtcctgacgcctgcgcggaaccgggctgggcgctcgtcgcgtagtgggtgggggcgcagggagcgggagccgccgccgccgccgccgccgccggagctaacctcggggaccgagatgcaggtgggaccggaaccggaacccccctcttcaagtaccttttccctctccgcgacccggccctggcgcccgagaggattcctgggtgggggtgggcgtggagggccgggggctggagaggcactcggccccggagagtgcagcagacagggctggtcccgaggtggatgcggccccggaaaatgggcggctggggggtgtccagggagtagggtcggatcggagtatatggaccaccgggcccggagggtccgagccgagagcggagcctgcaccctccacctcccgcccttcgggaaatatcagaactgagccaggaggcaggtgcaccgggaaaatgtgtctgagtcctgcttggcagaagagaaactgagtcaccagcttaggagtcgcagggtcagcgggcctgaagggggctgggtctgtctgcggtgcggaggattgggtgggcctgtgtgagccgaggtggccgctggctggagattggtttgcacttcttggctgggttcccccgtgctccatgactcctgcatctcctgattgtttctcgttggtttggagttgtccctgcggttggagccatctgagcttgtagggtcgaggcccaggaggaaggggagggttcaccgacttacagcctggctgtaggtttgaacaggagtctgaggtcgctgagggtttggggaggctttcctgagctgctctggccccagtcctggggctgtcaccttccagtattgcgtggcgggaggagcgctaacaagagccaagggttgtaaattccacacccagctctgccactttctagttgtaagaccttgagagggctcctcctttctctaatttctattttagaaaattggaacaataatattcttctcccacatgaagatagtaacaatggcagtcgttcagcggatgcttactttgcgttcagcgctgacataccccattccatgtaattctctcaacatttcgaggggagggatcattagctttgtttaacagatagaaaaacggaggctcagagaggacgtggaatttgttcaagataacatcgctcataag

SEQ ID NO: 63169 - DNA, 1664 bp, Homo sapiens
ctgccccgcccccttcccactcgctctgccgggtgctgcctacactccatctcttcgcggtggccagtttcactcagtcctctcttcggtcccacctggccccgccctcctagtggccgcgccccttcctcaccgggccccacttcgcacctgtcactggccctaccccttcaatggccgggccacgcccccttttgcctgtggctgtaggccccgccccctttcccgacggcgtggccccgccccttcctccatcatccctctccaccccccatccgcaggtggctggctcggccccgcccccagcatcaccgttccccgcttgcacggacgccccctcacgtaccagcccccggccgccgccgccgctcatcgtcgtccgcggccaccggcgcagctgccgccattgcctcagcgcaaacggcggattcccgcactccctggtgacggagcgcaccgcttccgggtcctctcggctgtttccggatccgctcggctgtttccggatcggccccgggctggaggccccggacggaggatggggggattgccgagcctcggccgaagattcccgagtcggcccccggccccggccccggccccgccccggctcttcttggctgggtcgcgcggttcgggaggacgcctgcctttcaagcccggaagaggatccttaagaggtcttgcccggcgtctctccgtgaccttggaagccctgctccaattatgcctcctccgggacaccggcctgcggagagctccccctcgctccctcgctgcccctgcccggagccagcctttgatcggctccggccgcccttccgcccgagcctggcttgcgttaccgcgaattgtggcggggccctccctgcacctccgccctcttggagcgtccctcggggcagggccgggtcggcttcatttttctgagcgcctcggagtccccgcgtagttagtcggagtctgaaacttgcacgtccccacccccattttgttactcagccagtcaccgcttcctgctggcccccctttcctcctcccaacgccctcaaatccctcctctcctctccgcctgtgtctagatcaggctctttatctgtgacctccacccggacggtgacaggcaattcagatttatgtccagagccttggttccccttccctcaaaccttttttccctctgtaaaggacacgccaggaacctggaagtccttgattctacgtgtcctcctgcaagtcccgtaaactctacttccaatgtgctgactattccagaatgtgcccctttttctccatctccagcgctaacactccgtcccagctcccatcacttctcctgaacttccgcagtgtcgactccaccctttaattaattaattctccgtaaagcagctggagcgatttttgtaaaacagataatgcagtttgaaaatggccaaaggtagaacgcttttacactgttggtgggaatgtaaattagttcaaccattgtggaagacagtgtggtgattcctcaaagacctagaaccagaaataccatttgacccagaaatcccattactgggtatatacctaaaggaatataaatcattctattacaaagatacatgcacgagtatgttcattgaagcactattcaaaatagcaaagacatggactcaacc

SEQ ID NO: 63170 - DNA, 694 bp, Homo sapiens
gactccgtctcaaacaaaaacaaaaacaaaaaacagagatgaggtctcgctatgtgtgcccaggctagccttgagctcctggactcaagcaatcttcccatctcaagcattcctagtagctgggacttacaggtgcactttcagctcttgagcaaggtttggggaaaggagacttgaaaattttagactctcagggccacctcctgcttgcggtttgcagtggtttcccgggagcgcccaagactggcctgccgcctggctacagagagaggctgaaggcctcctggggctgggaagtcggtggagtccaggagcctccgtttcctggaaaacagctccacctgctggctgttgtgcgcctgcagtcctgaccttggcggagtctgcacggggaagggaaatgcatgctggtccagcggggggcgcctgcaggggacatcggtgccgcggttgggatggaggcgtatgggatgagactagggcagaggtggacatgccgttctgcgtggatgtatgaggcgcgagttttgtgagcaccgtgggtgtgagcagcatgtggtattgggtgtgtgcggtgtgggtatcctgagcgacgtgtggcgtgggacgtaagtgtgaggcggcaggtggttatacggttggaggcaaagtgggaagagtgaagtgttgaaggggcgtgtttgtgttgtgttgg

SEQ ID NO: 63171 - DNA, 1744 bp, Homo sapiens
gaccacagaggggtgccaccacgcccgggtaatttttgcattcttagtagagacgcggtttcgccacattggccaggctggtctcaaactcctgagctcaaccaatctgcccgcctcagcctttcaaagtgccaggattacgggcgtgaggcaccgcgcctggttaaatccgcggtttccacagggaattccaggcccgccttccttctcccggaaaccttaccgctcgaggactacatttcccaggatgccctgcgactaaccaagccggaagacggttgtcttggttgggcgggtccgggagaggctcgtctgtggagaggtggcccagccaatgggtgaggccgactgaatcgaaagctacggtgattgtgccgaggtgattggaatctttggcgccttggtttcagaggtgggcgcatgatgagcgggtacagagaccaatgaaaaggcgggaaggcggatcccgcgcgtggggcgcgaagagttgctgacgagcaggctgtttgtccaatgcaaggcgaaagtcgctgaagggggcggggcgaggcgagaggaggcgggcgtgtgttgtggaggaaagtgtgccatggcggagcctgtggggaagcggggccgctggtccggaggtagcggtgccggccgagggggtcggggcggctggggcggtcggggccggcgtcctcgggcccagcggtctccatcccggggcacgctggacgtagtgtctgtggacttggtcaccgacagcgatgaggaaattctggaggtcgccaccgctcgcggtgccgcggacgaggttgaggtggagcccccggagcccccggggccggtcgcgtcccgggataacagcaacagtgacagcgaaggggaggacaggcggcccgcaggacccccgcgggagccggtcaggcggcggcggcggctggtgctggatccgggggaggcgccgctggttccggtgtactcggggaaggtgcgcccggtcccggggaggggaccggcggaagggccaagggcttggcctccagggaggggccggcgttcggggagggtagggctataggggtgttgaggctggcgttctggggctggtcctcgggcgttagggtgttggaggcagggagaggcagggctccgggactttctgcagactggggtggtgaaggagggtgggatgcgttggaagtttaggattcctaggagctagagtcttgggggcacagggaggctgaagagctgggattcctgagattttggagagggactgggaggacctggggccgttggattttgaggttggggtccatggcaaatgaagccagggagctgcagtattgggggttggggtccatgcgggttcagagaggactgggcggctccagaggctggggtcccccgatggtcgtgtgagcaatgggctgagagtccctaagagtcaggggtagaggggcggctagtaacctagttaaaaagggcaaggaagcatacatttcagagtgtcttaggcagatggaggaaagggtgaagggtacttccattctgaatcctggggaagctggacttctaggttgccaggagagggccaaggtgtccacgatcttagggaggatttgggagctgggtgtcagggaagaattacccccaattttttctttcggtaggggaaggacttgggcctgacccctctcccttctttgtctttgcaggttaaaagcagccttcgccttatcccagatgatct

SEQ ID NO: 63172 - DNA, 2269 bp, Homo sapiens
ctcgaaatagtttctaacaaggcgttttggggttgggggatgctctccccacgagattccaggatttcagtagagggcctttaagggctggttgaaagatgggtcttgaagctgtatttgcacagaactatactaattttacttagagtgctttattagatgtagcttggagattatagggtgccactaaagaaccactcccaagttatccctttgaccctagtcctgcagctgggagtctccttaggctaggagctcctgcctgccctacaaaagcccaccggagggcgcaagggctccaatcccgattggagtgaggaaaaatatgctccaggagcggcgggtggagacgcttcctttaataggtatttaagtgtccacggtgaaggctcaggagtttacaaggctagcagggttggggaatctcaacaaagggcggggcgttgctcaagctccatccgtccgtccgtccatccctccgtccctccaatcctccatccatcgcgctgctcaagctccatccatccatttatccatccatccatccatcctttattgagagtaaaaagccgccaaccagaccctgggaggaagacaggatggttcccgagaactagggctgctccttggcttttagaggtatctactacttccaaaaccttttgagaccccattatcccgtttgatgaagatggagtctgccacgtgggggttccagataagacagctgagattcggaagggcaggcgactccacctagtcacggggacgctctttttgacgctccagggaccgcagggtctgggaaagttcctggttactccggcgaccggccggccgtcacatgacatgtgagcccgggcggaacgcccaagaggcttccgtagtcgggtggcaggtcacgtgtcgaaggcttgcccgcggggaccccttccaccctggctcccgcgtcacatgaccggctttaagcaacatggcggctgccgtggtgcagcgcccgggctgagcgacagcaagtgcagcgggctcctaccccgggtgaggggtggcctccgcgtgggatcgtgccctcttcagcccgctcctgtccccgacatcacgtgtattccgcacgtcccctccgcgctgtgtgtctactgagacggggaggcgtgacagggcccgggtcccttctcagtggtgctctgtgcttcagggcaagctccccgtctccgggcgcacttccctcgcctgtgttcggtccatcctcctttctccagcctcctcccctcgcaggtgggatcgtcggtgggaccggagcgcgggcgggcgcggccccccgggaccatggccgggtccgacaccgcgcccttcctcagccaggcggatgacccggacgacgggccagtgcctggcaccccggggttgccagggtccacggggaacccgaagtccgaggagcccgaggtcccggaccaggaggggctgcagcgcatcaccggcctgtctcccggccgttcggctctcatagtggcggtgctgtgctacatcaatctcctgaactacatggaccgcttcaccgtggctggtagggactcacttctgggaggaagatagtctaggagaggggagccagggtcccgagggtggcgctgctttgccggaccatcctgaattttctcctcaggcgtccttcccgacatcgagcagttcttcaacatcggggacagtagctctgggctcatccagaccggtgagtggggaccactcctggtcacacagccgctcctccttctgttctgtctcaagtggggccacgcgctggcctgtctaggggctcattaatggaggttttgtggccagttaggggaggtgatggccctgatgttgctcgggggtcagcgggacaccacatttaaagagggagtcagtttagtataactaagtataacttcacccaggtgaagacagacctgggtttaaatctcagctcttccacttattgtgtgatggtaggcaaggcactcaacctctctaagcctcattttccttgtctataagatggaacaagtaataacacgaatcatctcttaggactgatgtgaagattaactaaaagattgtctgtgaagggcctagtgcagtgtttggcacatggtagacacccagtaaataatggcaggagggttgggtgtggtgactcacgcctgtagtcccagcactttgggaggccaagatgagtggatcacttgaagttaggagttcaagaccagcctggtcaacatgacga

SEQ ID NO: 63173 - DNA, 1079 bp, Homo sapiens
acctgatgccgtggttccttccctctctcacacgcgccttaaacagagagtagtcagtcagggagggtgagtttcagttggtttctttagctcctgtctatatcagtgcccagtggtgaatcttgccaggagaggtggtgacctgagaaaaggtgagttgttgggcaatatgtggattttccctcctgcagtgctgtccctgccactatgtacaccaggtttccatgccagctacatgttgtaggatatcactgcagttttgatattctgcagattcccttgagatcagaaaggagagtgggtgtaagcagtgttgtaggtcagctgcagttagtgggaaagcggttccagcttcaatgtgggccaggctcccgctcccccgtcagtgtgggacggcctcccgctcccctgtgctgcgagctccacggccagctctcagtggctgccacagtgccgcccctgctgtcccgagcctacctcccccttccttctgatgtgtgcactttggaccccacactctttaggtcatgggcaggaaaggagagagaaaagacaaaacacaaattctgtgctattttcagctgttgattcttaaggcaggtgccagccttcctgagtactaagcagggctggtgggcactcccccaacctgtccctccctagacccgaaggagtgtccttctgtctgctggtgagacctggtggagggtgtctcttttgcacagtgcaattcctgtgtgattaacacgtttccacgtgtgctcatggtggctcctggatgggacggcagctagggaaatgaagttcttccctttctggtttgtgtgttttctgtttcttgggtttggagtccggcacgtgactgctcactgtggttacttggagttagaaatccggaggagactcagccggaaaggtcagacgtggagcccggctttgccaaccactaggtggcaagcttgccgctcaagagccccacgggagcctcaggaccaaatcccaagtcagggccacagggggtcccgtcaccttttccgattaggcagcggggtgtgaggtgaatgtgcgtggcctgtggc

SEQ ID NO: 63174 - DNA, 1756 bp, Homo sapiens
cggggttcaagtgagtctcatgcctcagcctcctgagcagctgggattacaggcggccgccaccatgcccggctaatttttgtatttttagtagagatggggtttcgccatgttggccaggctggtctcaaactcctgacctcaggtgatcaacctgcctctgcctcccaaagtgctgggattacaggcgtgagctcctgtgcccggccctgttatgccattttaaagctaaggaaactgaggcacagaaaaaggtaaaaaggtacttgagatcaaaaaggatggagttaggatttgaacccaggtccagggcccatgattttcccagcacaccatccaaaatgcctgcctgccctcaccagggagcacatgcttacattcacagccttggaccctgggttagggccaggagggctgggtgttgggtgagaacagggcctcgggctccttcactggctggggcagggcttctgagttccccatcagagcccctcctctgactttcagggcctgctgaggaatctgcaggcctggcagaggacaggagggaggcttggggagcctgggaagggccggctgacagcttgatgggccctccctccctccacagtcccacccccagcctggggcctctgggagccttggtcctgagcagccaacacaccagcccagacagctgcaagtcaccatggacgctgaaggtaaagggacactctctctgccatgtccctgcacccatccccccactgcctacccctgcccccaccctggcttgtctcagccccttgttgcctcctctggagtcatctctcctctggtcccgccatcgactcccttacctaccccatgtccctgcagccttgctcaacccccagaggccccttctcactcttctttctcctgtgttgagtccccaaggagctctggggaaggaaggggcttaagccctagaaaagggcagggtggcctggaggaggtggcgtctcctgggggcagtgggggccggaagtgggaggctggttgggggagcagcatggacttctgctctcgctggtagctcgggagaagcagagacaaagtcctgtcccttctgcagctgggtgggggagggggcttgagtcccgtgattccctgcctggagggagctgtatgcaaactgttggggtgatcagtcccaacccccaaccatgaagtccggtggcaacaaaggaatgagaaaagacaagttaagatttaaagcagccccagggggccagttgctaaagtgaaggctgcagagccctggttgcctgataatttattgagtacaatcttttgatctaagaagcagatggtacggggtgaaacggtgaaggtgggggtgtgcgcgtcatttgaaagatgtatagccgtggtggtttatgtgaatttcctttaagctcaaagcatatgtctaactactaagataatcttttttttttttttttttgagacggagtctcgctttcccccaggctggagtgcagtggcgtgatctcggctcactgcaagctccgcctcccgggttcatgccattctcctgcctcagcctcccgagtagctgggactacaggcgcccgccgccacgcctggctaattttttgtatttttagtagagacggggtttcaccatgttagccaggatggtctcatttcccaacctcgtgatccgcccgtctctgcctcccaaagtgctgggattacaggtgttagccaccgtgcccggccaactaagata

SEQ ID NO: 63175 - DNA, 1060 bp, Homo sapiens
gatctcggctcactgcaagctccacctcccaggttcacgccattctcctgcctcagcctctggagtcgctgggactacaggcgcccgccaccaagcctggctaattttttcgtatttttagtagagacggggtttcaccatattagccagaatggtctcgatctcctgacctcgtgatccgcccgcctcggcctctcaaagtactgggattacaggcgtgagccaccgcgcccggcccagaagtttaaatttaactaggtgcccagtgatctcatcaagcccacagcactccctcaccctcgcccccacaacctcccttccccccacgccccccttcctcaccgcagtcccccccctgggacccctagatcttgaggctgatgggccagttcccagtttcactggttgttaaatattttgacagtgacccctgacagcaggagaggcagccaaactcaacagctgttctctcttccccccaggcctggcgctgctgctgccgcccgtcaccctggcagccctggtggacagctggctccgagaggactgcccagggctcaactacgcagccttggtcagcggggcaggcccctcgcaggcggcgctgtgggccaaatcccctggggtactggcagggcagcctttcttcgatgccatatttacccaactcaactgccaagtctcctggttcctccccgagggatcgaagctggtgccggtggccagagtggccgaggtccggggccctgcccactgcctgctgctgggggaacgggtggccctcaacacgctggcccgctgcagtggcattgccagtgctgccgccgctgcagtggaggccgccaggggggccggctggactgggcacgtggcaggcacgaggaagaccacgccaggcttccggctggtggagaagtatgggctcctggtgggcggggccgcctcgcaccgctacgacctgggagggctggtgatggtgaaggataaccatgtggtggccgccggtggcgtggagaaggtgctggtcctgcctgtccctggtccaaccccaccctcagca

SEQ ID NO: 63176 - DNA, 594 bp, Homo sapiens
ttcttattcatcacttgagagcaaagaccaccctatacatgctgtaatttatgggatattaggagtttagtctggtgttttagacagcaggaaccaccctagtggcttatgttagccatcctccacccactggttggaatgtttatttttgctcttgggagatttttagaaataagcaagagaaaagagtcaaaccaaatccaaagaaaccaagataagagtgttcacaaaaattttaatccaaactggccatgcagaccaaaggttgcagtgagccgagattgcatcattgcactccagcctgggcaaaaacagtaaaactccgttaaaaaaaaaaaaaaagagggaggctcagcctgagagaagactcagcagggcagaacaggcctgttgtggaagcagagagctcacagccttcagtgagtgctgcatgccagttctaagaatcatcgattcttgggaggctgaggcaggcagatcacctgaggttaggagtttgagaccagcctggccaatgtggtgaaaccctgtctctactaaaaacgcaaaaattagctggacatggtggcgggcgcctgtaatgccagctactca

SEQ ID NO: 63177 - DNA, 967 bp, Homo sapiens
ggtgtgtgctaccacgcccggctaacttttgtatttttagtagagatggggtttcaccatgttggccaggctggtctcaaactcctgacctcaagtgatccgcctgccttggcctcctaaagtgctgggattacaggcgtgagtcattgcacccggcctggataatactagtttagataaaccacttcataaagtgggtatgcaatgctttgtttcctctcaccttgacccagcattgcttgtcatctctgaaagaccacaaagagacctgcccctccacttcagggacccacttgaaacctggtcaccatccaggcttgctctgccttggccatcaggttccctgggcaccaagcctctcttttctcccgctgcacctgccagcccgtctgacagcactggatcctgcaccctggagtccgtttggactcacctgccctgaccttacttggcttcctctgtgatgttgactttatcgaccgcttttgccagcctggtctgtcggccacaccctacccataaatcttctaccttggatctatacaactgcctcccttttgtcctgtccccagggtagtgagccctccagggcctgcagccccagctgtcctgatccttttctcctgaagcaaaggaagatgtgttcatagtgtacccactgctgatctttctcctctgtccaaacatctccagtcctgtgctactgccctggacataatcgtttattttgtttttttgttcttttttttttttttgacacagagtctcactcggtagctcaggctagagtgcagtggcatgatcttggctcactgcaacctccacttcccggattcatgtgattctcttgcctcagcctcccgagtagctggaattacaggcacgcaccacctcacctggctaatttttgtatttttagtacagacggagtttcaccatgttggccaggctggtctcaaactcctga

SEQ ID NO: 63178 - DNA, 1704 bp, Homo sapiens
ggtggcaccatctcggctcattgcaacctacacctcccgggttcaagcgattctcctgcctcagcctcccgagtagctaggactacaggcgtgccaccatccccggctaatttttgtgtttttagtagagacggggtttcgccatgttggccaggctggtctcgagctcctcacctcaggtgagcctcccgcctcagcctcccaaagtgctgggattacaggactgagccaccgcgcccggcccgtgttttgttttgttgttcaacagggtggaacataatgtctaaacctgggccctacctacctggtgctcaaaagtggaatgaccgtccctagccaacccttcagaaaggacagagagctactcaacggactgctgtactcttaaggactgggaaccggaaccgtgggtgagtgggactgaatcacagactaagcgttttccacgcttcgccgacgtgctgagtgccaagttataaagacaggaacatccaagctgctctcctgggctgacacggacgcgaggggacctacagtggccttgggcccagcaggcagcgactgcaacgtgactgcccagagtccagcccctggggcccagatctacagaaccgaccagacgtgatagccctttggctggggctgcagtcccacgatccacacaacgaccctggctccgcagacgcgccaaccacccacggaggcaagaaactgcagaaagtaaagggaaagggagcccagtgccgggcggcgctgagcagctcccccagcggccaccgtcgccaacatccctgcgtaggggtttgtatcgcagcgcgcttccagacatcaacggctgcgcggcccacgcgcgcgcatgcgtcctgaccaggggaaccttttcttggggacccggaggcgagcgctggaaggcgggatagtggcgacccacacgcagcagcttccggcggcgcgtagtcttgattggtggaacctgggagagggggcggggcaccggggaattcgaatgggagaggcgggcccaaggagggagtggaatggccgcgggcggctcgacgcagcagaggcgacgcgagatggcggcagcttcagcggcggcgatctcaggtacttgagcccggcctgggcaaggcgggtaccgacgtctggagtttagtgggagttatgtgtcggagtgtggtccaggctctgcgggttgtcgcggagaggcggccatggcgcaggggcggggagagggggacggtgagagtgtggggtcgcgagccggtcgccccgcctggctcctgccttctccctgtttcctgctctccccttgggtcagtagactcgggtctccggtccaggctcttggcttgaaccccgcgcactttttctttgtgagcttcggtttcttcgtctgtgaaacgggggtcatggcctcatccctggagatcacctgaataagcaagagaagagtggcggacgctctagccacgaggacgagaagaagggagccggaggcgtgtattgggaagggttctgtgtgggacatggtgtttgggtgcagagacatccctgagagatgcaagaggacgggctgaggaacagacccggctgctgctgggtttgagttggcagcgtaagatgctctgcgattacaggaaaacgaaataaaagactaaaatttcctttcactctagcatggaagtgaatgctattttaggg

SEQ ID NO: 63179 - DNA, 1825 bp, Homo sapiens
ctttttgaaagacagcttattctttcccttttagagatgagggaccagatttaagagcttattttgtgctttacattcattaactcacttgatctccacagcaactccatgagaagggtgctaatattaccactgggtactgagtagtacctctctttcactagttgcataataagaattaacccagagagtgacctgagggcgggattttggacacacttgacaagagaggaagaggctggagcgcaggaggtagctggtgctgggctcctagtcttggcagaggagcccaaagcacttggctgccctgcgtgtcactcatctccctttgcctcccagctggagtccctggatgccctagagcctgaggagaaggctgaggactgctgggagctacagatcagcccggagctactggctcatgggcgccaaaaaatactggatctgctgaacgaaggctcagcccgagatctccgcagtcttcagcgcattggcccgaagaaggcccagctaatcgtgggctggcgggagctccacggccccttcagccaggtagcagcccactggactgggggagggcgggggcgggggagaccgggtacccccgagaccctgtcccctatcgatcctgtcccgccaggtggaggacctggaacgcgtggagggcataacggggaaacagatggagtccttcctgaaggtgaagtcacggccctgcccctcctctgcctgtcctgcgccccgcgcccctctctaacgtcgctgtctccctccctcctgtgttgcaggcaaacatcctgggtctcgccgccggccagcgctgtggcgcctcctgaccgtcgtctcctcactccgccttttcaaatttttgtataaccccgtgttgtgtaaatacagtttttgctccggtgcttccgcctgatttttggggctgcgggggcgggaccggggtgtgaccgcctcggggtgggccgcgagcaaggcaggcgactccactgggcgccatcttcggggaacgactcagcgcaggattgtaaatacaccgctggggtggggcggggaggacggtggcctgcaggacgcaaaaagcggaagccgaagcatgaggcctgcgaccgttaggcgggcgcgcgctcagggattagccccgccccgtccgtgcccccggcgcgcgcgctcccccattctcccgctcggcaacgacggcggccttgtgcgcgtgcgcgcgaaataacggccgctggcggagggagggggagtggaatcgttggcggggggaagaggagagaagccgccctgtctcccgcgcgcccaccacctgcgccatcgtcagccaatcagcagccgtctcaggggtctcgcgctcggggcgactcgggctgctgggtggctcccccgtccctcctcccgccagagtccctctcgcgcctgcccctcccgctggccacgcgcgcgctcgcgctagcgctcgcgcccgctccagcctcttgtgtgtcctcgcgccccccgcccgccctccccgcgcgtagtgtgctccgcttcccccaccctccacctcccccctcctgcccgccccgcgcgcctcctcccgggttccccctcccccaccgccgccgcctcctcctcccgccccagggtgagcgcgagccacctccctccctccctccgccatggatcccagcaactggagcagcttcatcttccaggtaacaactccctccccccgcccccacccccctgcccacaccccctcctgcccgccctccctcccgtcccaccccccctccgcgcgcccggtgcgcgcgcagctgtccccctccctccc

SEQ ID NO: 63180 - DNA, 1402 bp, Homo sapiens
ctccccccaccccgccccgccaggctccaaccgccgccgccgccgccgccgccgcccgggcccccgcccccggccccggccccgcggggcctcccgcccccacccagggggcgtcgccgccgccgtcgccgcggcgctccgcggcccgcaaggcgccctcttttcctccctcccgccggccggggtgcgcgggcggcggggcggcccgcgggccatgcgttcggcgcggcccagcccggccggccgggggcggcgccccgagcccgggccccgcgcggcccgcgcccccggcccccgctgagccccgggggccccgctgcggccgaggccatgttcccggtgtttccttgcacgctgctggccccccccttccccgtgctgggcctggactcccggggggtgggcggcctcatgaactccttcccgccacctcagggtcacgcccagaaccccctgcaggtcggggctgagctccagtcccgcttctttgcctcccagggctgcgcccagagtccattccaggtgagtagggccggccgcggcggcccgggctggggggggacgcccgcccgcacccgcggcccactcggcgccttgtctccgcaggccgcgccggcgcccccgcccacgccccaggccccggcggccgagcccctccaggtggacttgctcccggtgctcgccgccgcccaggagtccgccgcggctgctgcggccgctgccgccgctgctgccgccgtcgctgccgcgcccccggcccctgccgccgcctctacggtggacacagcggccctgaagcagcctccggcgccccctccgccacccccgccagtgtcggcgcccgcggccgaggccgcgccccccgcctccgccgccactatcgccgcggcggcggccaccgccgtcgtagccccaacctcgacggtcgccgtggccccggtcgcgtctgccttggagaagaagacaaagagcaaggggccctacatctgcgctctgtgcgccaaggagttcaagaacggctacaatctccggaggcacgaagccatccacacgggagccaaggccggccgggtcccctcgggtgctatgaagatgccgaccatggtgcccctgagcctcctgagcgtgccccagctgagcggagccggcgggggagggggagaggcgggtgccggcggcggcgctgccgcagtggccgccggtggcgtggtgaccacgaccgcctcggggaagcgcatccggaagaaccatgcctgcgagatgtgtggcaaggccttccgcgacgtctaccacctgaaccgacacaagctgtcgcactcggacgagaagccctaccagtgcccggtgtgccagcagcgcttcaagcgcaaggaccgcatgagctaccacgtgcgctcacatg

SEQ ID NO: 63181 - DNA, 1384 bp, Homo sapiens
tcttttcatccctcttccccacgacagaagaagttgtggccctggccatgtcatcgtgttcctgtgtcccctgcatgtaccccaccctccaccccttccttttgcgcggaccccattacaataaattttaaataaaatcctgtttctggctctggattgaatgaattgccctcactaagaactgccgccaaccccaagggtttcttctcggcctggtgtccgtcaatccagccttgctctgccctgtgaggctgtgaggttctggctccgccctccccaggggcagccttactggcggcagcacagatacagggcggggccaaggctgtggctgtggagagcaagttccaggtctctggggaattcccaactcggacaggcccagaatagcccctggaggtttgaagaggccccgtcagaaacccaaacagagctgccagacgggaatgccgccctcccccgtccacactcatggccgctgctcagcccccagccgcatccctccccacgcgcgtcacggccctgaggccatggtgggtggatgcggctgcggaaaggctggggagtccgagccctaggactgggagcagcgaggtagagaatgaaagctgcacctgtccctcatcctgggcatgggccactctgtgtttacacgggctcctctgcccagctcctcctgccccttggaattccctttcctgtccccgctccgtcctttccagggccccttttttgagccttccagcgccagtttctgccgctcctttctgcaggctccattctctccaaaccccaccctgctcctcctctgcagcctccccgcgtcttgccccatcttccttgccctcctgctcgtagagacgcctccacccggtcctgcctgtctcactggtcccgtctcctcgcagaaccctctccgtttcccccaaatccccgtctcttccaggaatcccggtgaccgttggcgggaggggccggggacttaagaaggaggcgtctctcctggaggcgcgcgtgagaaggggcagggagggggcgcgagtggtccccgggccggttgcctgggtaacgcgtggctcccttgggctggcgggaggggccggaggctcgcgaggggcgggggcggcgacggcggcggagcgtaggggaggggaccggagaggaggggatgagcacacgggagaggagaagagggagacccgccgcctccctccctccctagctgacttgctccctcccgggctgcggctgctgcaaaagccagcagcggcagcgggagctgtccggaggccggcgtcgaggtgagacccgggcagactgaggctgcgggtaggagtggaccgaccgacggctgacgccgggcggactgcacgggaatgcgggt

SEQ ID NO: 63182 - DNA, 2120 bp, Homo sapiens
agctggagttgacccgcccacctgggcttttcaaccccagtccgcgagtttctttcttgaaggtgtgggggctagattcattcacgtgcttcgtaatgaaataatccaaaaaataggaccaaagcgcccactggcaggagcgagggcggggcgccgcgctctataattattttctaagatgatgggggaggtttgttgcacgcgacagcccgctgaggaggcggggaccgagctacaacgcggttcggatttggcgggggtttttttccttaaaaaaaaaaaaaaaaaaaaaaaaaaagtctgggggaagaaaaaaactaaaattcttaaaaaaaaaaaaaaaaggctattatcaaactgatttctccctttttgtatgccggatgctgcatgagtctgaaacaccaataaacggagactgcatgagactcgcctccaatctcggttggttcctgcgttcgtcccgccggcccggcggtgctgcctttctggcagaaccttactgggtggtatacgcatgcgacttcccggtggccatctttactgtgggctgaagcctgtgcgcttactcgcgcatgtgcaagccttccctcgctttcctcttccaagtagccttgcctagagcggagcctcccgcgccatttctgtgcgcctgcgtagcgtgaccctgcgcagcctgggaggcgggtcttagctccaggtgcgtacggcatctgacttgacgtggcccacaactgaaaggtctggggagaaggcgccgtgtccgggtgtggagaggggcgtcgtggaagcgagaagagtggcccgtccctctcctccccctttccctctttcggaaagtggtttctgcggggcccgggagcctcggagtaccgaacctcgatctccggggcggggtccttggtggggactgagcgccccctcccggggacgggcggtctggccgcggagtcccctgcgggagcgtgattggctggaaacggtcccgaacccccaggggagcccgatccctgggggaccctggcttcggactccagtatctgtcgtcgcagggtccctgccctagtggcctatgtcccttgctcggggccatggagacactgcggccagtacggcggcgcctctgtctgaagaaggggaagtgacctccggcctccaggctctggccgtggaggataccggaggcccctctgcctcggccggtaaggccgaggacgagggggaaggaggccgagaggagaccgagcgtgaggggtccgggggcgaggaggcgcagggagaagtccccagcgctgggggagaagagcctgccgaggaggactccgaggactggtgcgtgccctgcagcgacgaggaggtggagctgcctgcggatgggcagccctggatgcccccgccctccgaaatccagcggctctatgaactgctggctgcccacggtactctggagctgcaagccgagatcctgccccgccggcctcccacgccggaggcccagagcgaagaggagagatccgatgaggagccggaggccaaagaagaggaagaggaaaagtaaaggcacacccttacaccttgtcccggggctgctcccctgatggcgggaggaaatagggaggggaaaatgtgggacgctggaacctttgaaagtggagggagggaagccagcgggggaggaggaacgggcaggggagaagcacacgtgtgggtgggagggaggaccgccctcacccttaactatgttcacctgtcccagaccacacatgcccacggaatttgattttgatgatgagccagtgacaccaaaggactccctgattgaccggagacgcaccccaggtacaaacgaagaggaaacagttgggggaggtgaagggcctcggctcagttacccaagatcggctcccctagaggcctttgcttgctgcctcagctcccacacaacttacagctgcaggagagagtattcacccagtagcaccatctttatgacttagattactaccttgtcttccttttttttttttttttttttttgagatggagtcttgcccttgtcccccaggctggagtgcaatggcacgatctcaactcactgcaacctccgcctcctgggttca

SEQ ID NO: 63183 - DNA, 2554 bp, Homo sapiens
cctccaactcctcccagtcccactccagtgcagccagctggctccaaggtagaaacccatgagcactcagggagcagtgtgccttcagctgcagcagaagcagcccggaggataaaatgagaaccagctgcacacgggccctttaactcccaagccccacccctgggcttggcctgccttgccctgccgggaagtgatccccaaggcagggtgagagttccccatctgaggcgtttgttgcagctacctgcacttctagatgtgagtacattgtactagccccccaaaccccaaatcaggggcagatctttgtatcccttgaggctctctttagtcctgtcttgctttgaagggccttgcttctgctggggcagggaaaacatgtctgaatcagagtggggaaggaggatgggtggtggctttgcttttggaggtttcactttccaatagttgggagtcttctgggttttgaagtaaaggcagattaacaccaacaccggtcccccacccccctgcaactctcaggcctctctctgacttcagggtcccacctgggaaatcaggtggggaaccttacagggtcattcagaccccatcttagccctagatcggtgcttgctctactcacctgcactgtcctggggacctgggctctggcctgtcaccttgagctccaagaatgtgacctgtacccattcaggccccttaactctgacagatgagggtttcttactcctccatgcagggctgggccagctgttggtctcagtcgatcattcaggaagtcattagcagagtgatttccagaaggcgtagaatttagtgaccaaggttctttcctttttgggaggagaaagtgaaaactaggatgctcagctggacccaccagcctgagattctggggattttagagctgtcccttggggagccaagcacttgggggtggaggtgatagcgaggctgatggcccctgtgttctcagctctctgcctgggtagcccctgggtgatgggggagaggccagctgtcacgtggggtatcaggtggctctgccagaaactcccttggcacacagagcactgggtcggccctcgggtgtggctgtttgggcaggacagccctctgtatgtagccttgagcaggtaggggggccaccttgagtgggtggcccagagacagcctcagggctccaaggtaacggggtgctcaggttatcttgggtgctgccctcccaggttctgggggagcagaggctgggcgctggcccaacttacaggaaacactcacctttgaactgccattagcaccatctgggcagtacacagccccacccaggtcctctagttcttgttctcggcttagaatctttgtgtttctgcctgagaagccactgcctcctagtttgtggtctctacagttatagccaggttggacttccggctccgtcctttgataactgtgtgctcttgggcaaatttcttaacttgcaggttcttgtgaggataacatgagttaattgagggcacttaacactacctggcacagattaagctcatctgaagtgggagctgttacttaggggcgtttgcctagaacacagggtccagaggctctctcccggaaacttagacccagtgagtcagaagtgaggcctgcaaaaagcagcaggagtggggttaagaattccagcctagggctggatgcggtggctcaggcctgtaatcccagtactttgggaggcccgaatgggaggatggcttgaggccaggagttccagaccagcctgagcaacatagcgagaccctgtctctgtttgtgtgtgtgtggttggggttttgttttttttttttttttaaagaattatagctcagtcctatgattaggcaagttgagaaaatattgatgaagatcaggggtgctgaagcctggttcctggggtcgcttctgatctaggcggttcttgcctctggtgactggtgttaattggcaggagtgggaggagggaggacaagtggaagtctaggctggctgagctgttctgtctcgaaaagttcctaaaactgtgctgctttaaaaaaaaaaaaagtaatttatgagacacattctcaatttccattaatcatctcctaaagggggtaaaccaggaagccgctgggtgaaaacaggctgttggcaattcctgagtcatgtgacccattctctaaagactagaatatttaacttaaatcagtgagaaactctgtgaagttgtgtccttgtttataccaaacttcatgtgccttttcctgaacctgaagctgtgggaaggtctgggggcagggccgcatcaccgaccttacgtccaacctcaggactgcctggagcaagagccctggggttggggacaaaggaggctgcctggacctgggtaagggaaggggctggaggagaatgagtgcaattccctgcccttcacagcctgcaatcggagctgtgtttttgtttttgagacagagtctcgctctgtcccccaggccagagtacaatggcgcaatctcgactcactgcaacctct

SEQ ID NO: 63184 - DNA, 1081 bp, Homo sapiens
ttggaggctgggtagatggtggaattgatgaggaaccacttttttttttttttttttgagatggagtctcactctgcctctcataatgctgggattacaggcatgagccactgcacctgtcctggccagacatttttgaggccaccaccagacaaaagaggctcctcatcggccaggtgtgatggctcgcctataatcccagcactttgggaggcagaggcaagaggattgcttgaggccaggaattcgagaccagcctaggcaacataatgagacctcatctctccaaaaaaaaaaattagctagacatggtggcatgtacctgtagtctcagctacccaggaggctgaggcatggcttttgtgagctatgattgcaccactgcactccagcctgggtgacagagtaagactccgtctcaaaaaaaaaaaaaaaaaaaaaaaagtctgacctgagtctcttaaggatgaggctctggagcacctagtaaacttggtcccatttgtgtgactcaaagggacatgtccaaagtccaaagtgctgggggcaggggtggggcttaggtagggcatgtgacattcctgaacaggccaagcactgggtgaaactactcaggattcagaagcaggtgggatgggtgggtggaacatgataatcatcccccttctccttcctttccaccctacccttgctcacaactgcaggagctgaggatgggagagaactggggacgagggggccagagtgatttgcagtgttagtaatgcagctggttctatggaaggctcagttccatctgggatccctttatgagcagtggactaggtcttcacattcagcccaggattactaaagcataggaaagaggcagggaacatagacacagctcatgtaaacattccttttgtttatggccgaatcctagccactggactacctgaggcatacagatattctttggctatgggctgacatttgaatacagctggggcctcaggattctctgaaataaagggctgcctccctctggaggagccaggcagctcctcagagcagctgcccattgcgtgctggacaaggc

SEQ ID NO: 63185 - DNA, 981 bp, Homo sapiens
gaaagctcccatgccccttcctataagctgtcacctatatggaatcctagaatacccagccagaagagtcctaagaattgcttaatgcaactgtaaacatgactgaagctttaaagagaggcaggtttgcctggggtctttctacaaagcagagctaaaaaggagcccttccaggatgcctagtgccatcccagacacccttccgtctaggctcagcccaccccactgtaatgtctccaagtggcccaggcccccagaatcgcagcagacctgtggaggtgcagccagtgactggccacatccaaactcatgctgatttggaagaacagcgtggctccagggtacagcagggccaggttgaccaacaggcacatggtggagcagcggtccgtcagcatgtccagcatggccccaaaccgggttcctggaagattaggtgggcaagggctgttatggcacagtggatgcaggacaggtgcccatatttggtttatcactctgacgcagggtgtaaacgaagactggaagtgtccgcctgcctggggaggaacgcaggctagaaaacaggctgtgtgtgaggtcagtgggcaaaggtcaccatggcatgaactgagaaaggcatgagagtggagggaacagggtaggaggagaggaaagctatgtctgcaactcatcaaccccagaaccaagactccagggctagatagagacttgatgcctcaggggaagccttacagttgggtctggagaacagattaaaaaattagtcaaccctccagaagccatcacccttccctctccatcctccctctaagcatgccttctggaaccccaactgcttatgcagggcacacagtaggcctccagtaaacacctgttgaatacactgttttttgttttttgtttttttttttccgagacagagtcttgctctgtcgcccaggctggagtgcaatggcgcaatcttggctcactgcaacc

SEQ ID NO: 63186 - DNA, 1744 bp, Homo sapiens
tacaaaaatttaaaaattagccgggtgtggtggcacgctcctgtagtcccagctagtcaggaggctgaggtgggaggattacttgagcccagaagatgggggctgcagtgagccatgatcgcgccactgcactccagcctaagtgacagagcgagaccctgtctcaaaaacaaaaaaacaaaacacaaaacaaaaagccccaggccatcctgttctgctttttccagagatgggaatgacagccctctgactctgaggtcccgaggaggcaggggaagggaggaggggattgttgaaccccaaggctggctgagaggggtgtctgtcaccttgattaagagcgcgagcagcgtgtccatcgaaagcgtccagcaggccgctgagcaggtagaaggaggaggccgtgagggggcagcagggcatgaagtagaaagaaatgatggcgaagacaatccgggcataaccttggaacgggacgcggggagacagggcaggatcagggagcccgccaaggcccctcgccctctcgttcggcccggggccgtgggcagcactcaccgatgaggttgggcacgaacaggaagatattttcgtctggcatcgcggcgcctcccttgctgccccgggcctgctctggagatgccagtgctgtcccagccccgcagcgcggcctcagcctccggcccggcgcatcggccgcaccacctgcgccctggaccccgccgccccaacctggccccagatgctgaagcccgcagccgtcgggagcatggaccggccccgaggtgcgcgggacgcagggggcgcgcgcagtccgcccttcctacccgcaacctccctcgcctctgccagccccgcaggcgctccgggcctccagctgcggtcgccgctgctccagctgcgcgtggcttccgggaacctcctcctccgcgcccgtcgttgcaaaattggagagaggaaaaagtggcttaaaaaaatagttgcggcccctttaaggcctgtcggcttcctttcccttttcctccctccgcccctctcccttggctcgtaccaaagcgcagaggaggagagggaggaaggaaccattaacgtcaagcaaagttagaaacggaaaaggaaagggtaaaagagaagaccgaataaaaatctctgctttccttttgtggagggtatgacttcctggaggcaaagataaggcgataaaattcctcctcctgagtctttgcgtccccaagaggccaggagatttggtgcagtcctcactttactccccgccccctaagtctccagccgcctttgctctcgcaggctctaggcggctagagaggctccagagcgccctgcagatgggttgcttttcgcgtgccccttgtgatgggaggattaggtcgcaggctccaccctacgtcatcctcccaagcttctcaagcgtctggcgcttggggtcactgccctcaaggaggcacctggaggggtacggaggggaggctggaggagcaaacggggcgcgctaggaaattcctctgtctttagttctagaacccctgatctcctagcaacgaggctgcggaacctctgcagactccaagggttttatagcgtccggtagcgacacggagccggctcccccttttccagccttcctccccatctcccattctccatcccccacgacctataccagaggtccttaggcctccacgtctctccttttgccgagtagcccaaggtttccacccatctg

SEQ ID NO: 63187 - DNA, 1539 bp, Homo sapiens
agatgggatgtgggggctggagggagctgagaatgagttgactggacagtagcgggcagagagaaggggcatgaggagccccggtggtgagagactgcggggaacgggagttgggggtctggggtgggggcacggtaggggcgccgctcgtacctccggcatcggtcagcacctccacgcggccgctgaacatggctttgagcatggtgtcctgtcccgtgagggtgcgcagcgtggtgtagtgcaacgagccgcccacgttcagcttcacgtatttgctgttcggggtcagcggcttgagaccgtaggcggcggggccaggctcgagacccgagggcttgggggcttccagggacggggccgcggcggcagccgggcccgaggcctccgccgacatgccgggtagcagcggcggacggcgatcccaggatctctccgcgccctgcggcctgctcccgaagaccctcggccggcccccagcccttgggccagaccgctcggcgcacacgcccactcaccgcagctactctgcaagaccggccctccgccccatctcgctcgcaccacccggaagccggcgccgggcagctgcgcaggcgcggccccgcccctgaatgggggcggggctgcgagtatggagcatgcgcagtggcctcgctgggggatcccgtagaggtttggcgtgtggcctgcgggttccccgggcgggtcgacgtgcgctcctctctggtctcgagtcaccaggaccagatcgaggatgcggccgaccccctgcccgatgtggaaagcgaagtctccacctcgtgattgggtctctgctgtcagagagcttcacgagcttgaggggaaacagacagagaggtctgggcattgggcagtttcccgcctcccagccccgcgcactgaacagactgtgaccagaactgcgaacaaagcgcggagggaagctcttaaaggaggccaaagcggccgggcgctgtggctcacacctgtaaccccagcctgtaagcctagctactcgggaggccgaggcagaaggagcgcttgaagccaggagttggaagctgcagtaatccgtgatcggaccgttgcactctagcctgggcaacataacgtcctttgaaaaaaaaaaaaaaaacagaggccaaaacgggtagcagtggtgcccgggcaccaaggatggaaggcctctctgaggaggtgatgccgagctgaagctgggaagcggatgtgagggaagagttccaggcagagggaaggcaaatgcagagatcctcaggcaggaacactgaactgttctccgtatttgaggagcagagggcgtgtcagtggtggccgcagcagctgagcaaaggtcttagaatcccagctaatgtcgtgggacctagcacccaatcccaaaagaaagaagaatagataggaacccactgttgacaagaaggtgcactgagaagtgtttttatctgacccgatctgcatccagtttagaagccgatacatcagggatttaacaatctgtcttaatgtctagcaaggggg

SEQ ID NO: 63188 - DNA, 1595 bp, Homo sapiens
ctactgagcaactcttcagctccagcatcctatacattaaggagtcactaaaagtcagggtccacgagaaaggtgcagatcggggtgcacagaagagcggagtccaaaacaccactcccagccccagtggacagagtcctcaagtggcagccctgcaactctgagcggatgccgagtcctcaccgggaacccgggcgcggctggtctgtgctattggcgcgggtaggggacgcacagcccaaaaatgcccgcgacaagcttctggggcagttctcgccagtctctctggagggagcctacgggttctgcgacgtttctcgcacttgctccctggcctcgctcccgtttccacccctcccacggaggttttcctttctggtggctccttccttgggtgtccctttggtacgcccccaccctggcggtgagctgcgaggctggcgcccgcgtggccactgcgcatgcggacccggccgcggggcggggccgcgcgaggaggagggtcggggacggaagcgcagagcacggaccccgccccctcgcggccccgctcgtgacgtcgcggggggcgccggcctccgcccggccccgaggggtaagagcgagcggctggcggatccgacgcgcgagaccgggaggggacgagggcgttgcaatcgttcggggcgggggctttccggggagggggtgctcaggtgcaccagcggcggcggaccctcagactctgccctcccctccctttaacccccttccagccggacgggaggcggggcagggctgagcatttgtgacacctacatttccgtggctcccttcttttcccccgacccctgtttatctcttcgccttccagaagttcttttccatcaggccgtcgcaccttgcgtgggaaggagcaccccacttggaagcaggaggcggggttcagatcttggccctacccctcctgtgttaaagtccgcgagcctcagtttccctcacagtattttttgcctcgccttacccggttttgaggatctgtacgagaaagagaaaggaagtggacatttgttgaattcctgcatggccaaataccacgcagactgcttcatccgccacgtttaatccttattacttggtgttctcagaactcccatttcatggattcttaagctcacagagtcagtgaataacagaaagggattcagatctagccgtttagctgcacagtggagttcttctccagagtcttcccttgtctgggctctggctggaactattcctcagccaaatcctcgccccagaacagtgcttcctgtttctccagctgagaagtctccctttcagtttccttcttccagcacggagtacactgctctgcctccacttagattacttcagaaatgaaatgcagcaaatatttatccagcagtgcagggagttgaacttttggagtcgggaaccttggattcttgttctggctctgccacttactgtgtggccttgggaagtcctttgtcttctctgagctttcttttctctttgcgtaaaagcggtgctcttgtcccattctccctccctgtcttccagcaggctctccccggaggctcagcccc

SEQ ID NO: 63189 - DNA, 1477 bp, Homo sapiens
gctaacctcggagcagtctattttcccgccttttccgcgcccagcagcagcttcctttgcccctcccaacttccaccctgcgcgcagtcgcagatcgccgctgctgtccgtccacccgcgccccctcaaagcttcccctagcaacaagctcgggctcagagcgaaggcggggcgagcgcatgcgctgcagctctgtccaccgccagtcgtgggacagagtgccgggctcctccccttgcaagtctagctcttctccccgcctcctccggcctggggtccgcgtggcggggcgggcgcgcactcgggcttggcggctgccggtctcccaggccgcggcagtgaggagagagggcggggctgagtcctctgcgcccccgccccctttagcccggcgtccctaccgcgcctgcgcgctcccgcccggtctccatcttggaattgggaggaagagggagagggagaccgggacgagaccggggctgtggtgcggagagaggctgagacggagaagaggagaggcagagagggcgcggggaccgtcagcagcaccttagctacaatcgttcagctattctcggaagagagaagggagagggaggaggccggggcgggagtgggggctgtcaccctcggaccccggcgtgagaggggccgtgcggccggacgtcctcggggtgggcccccagtcggtggccgaagacctacagctcaggcccctgggtcccaaatttccaggctttgcccctcctcctttctcagatacccgggtaacagtcctcatagtccagatatccgggactcgggtcccaacctctctaaacctgggtctctgtttcatagaatttcaaatatcaggttcaggcccctgcgtgcaccagtatccggggttcattccccgggcgttcaaatatcggattcagtctccatcccgttcagatattcggggttcagaccccacaatcagaaatccggaattcggcagctgtcgccctcgacgagggggaggactggaccgcgaggtcagattaggttgtcaccccctcccctccaggggaggcttcccgggcccgcccctcaggaagggcgaaagccgaggaagaggtggcaaggggaaaggtctccttgcccctctccctgcttggcagagccgctggaggaccccaggcggaagcggaggcgctggggcaccatagtgacccctaccaggtgagacacggggtgcaggggcgcgggtccctgtgtctagttctgagaagaaagggtgcgcctttctgagaagctggacttgggtaggccctctcaggatggggaagcccagctgagcgagtggtcagcctctggctagccttgccttctgttgccacccccttccccttcctcttcccttcattgtgtctggttggtgggggacctcaggtgacagggtctctgatgtcaccggcgttcacaccctagggtgcttcagctaatcagatgg

SEQ ID NO: 63190 - DNA, 1771 bp, Homo sapiens
tccacctgtgtgtgcgccaagagggcaaactatgcaccaaggctgcgctcaccgcgccccgtcaggcccctcctcctcagcagcaagccccgcctccgcctcccgcggcccaggctccggcccggcacacctgcatcttcagcagctcctcctccaccagccgcttcagtgcctgcttctcctcgggctccaggtggctgcggcccgagtgagctaagtacctccgccgcacgatggaatgcgtaagcgtgctgcagggacatggtgtcaggacggagtcccgacccacccgcgccctttccaaccccatctccaaccccctgggcacctgaggtccgggcggcctcggaagaagctacgggtgaactcctgcatctccttctcccgcgccattttgctcaacccgggattgacggctcccgcctttttttcttctcggcctccgtcagcgcgtttgacagcggctcgcgcacgcgcagtgctgcggcaacgtggggcgagggaccgttggcccttggccgcggaccgcgtgggccgagaactttgccagacgagacttgttttctctgggcagttggagggtctcgcggctcctacccttttttggaacggatcattttaaaagttctcgttagaaaccaattcggcgccggcaccctttgggtgaaacctaatcagcccgcgacgctgcctttctcactggtcacgggcaacagctaggctgctgttatttcgcaaggcagaagagaaaaggcatcctcgcgagcagatgaggaacctcggggataaatccttttgtggcttcaagtgtctaagtacattagagtcaggaacggcgctttccagcgtccgccatttttgtggcgtcaccgcgtcgctgctacgccatccccagcgcagtggctgccgcgctcctgtcccagtgtcccccgggaggtcggcccgtgcggtgacgcccctgagcgcggggtacgccgggagttgtagtcctgacggcacagccttgcagcgtctccggaagtggaggcgggagcggcacggcagccactgcttggggtagcgggagggcagactctgggcgccactcccgggccggtcatgaacgggccggcggacggcgaagtggactacaaaaaaaaataccggaatctgaagcggaagctcaagttcctcatctacgtgagtgctgccgcgggaaggctgtgggggatgaggcctggcgcggacaagatctcagtttacccaggtgtaaagtgggtggggcgagcggccgctggttccggggcccttcacggaggaccgttggcccagcgcaccccttgcccgtgatacaggagcacgagtgcttccaggaggagctgaggaaagcgcaaaggaaattactgaaggtgtcccgggacaagaggtgaggcacgttgcaggggcggagggcgatgtgcttcctaggaaatctacattcggaccccatccccgagtagggccacaagtgcatgggctctttcaagtatccgatgggccagctgggagggacaggtacccaggaggacattgctgcgctggaaaatcactgtccgtgtctccttccctcccctcagtttcctcctagaccgacttctgcagtacgagaacgtggatgaagactcttcgggtgagcaaggtcttcaaaaattggtggagagcatggttcctggtacttagcaagcttcctgggcccccgccttttaggcagtggtggctgatgcagcccccagtggtccttaagcctagttgc

SEQ ID NO: 63191 - DNA, 4034 bp, Homo sapiens
ccataaaatgggaaggagagaaccctgaatcattgcttctagcttctgaactcagttgttcagaacaaggactcactgctgatttttcaacagcacagggaattgcactgttcctgggaatgatggacagtaccctctgttccactgggcaagtgagatttcccaggcctctctgttcccttctccccttagagagcaacagacgtggccccatcccacctccctcaaccctctctctcctccctcaggactgggcacctcgctgcccccgctgctgcccactctgcgactgtgcctgtacgtgccagctccccgactgccagagcctcaactgtctctgcttcgagatcaagctccgatgaggacccagggcccctgccctctggggagcggccagcccccagggcccatgtgccctcctccctgaagagcctttccccacgccactggaaccacagatggcctgccgagcacccaggcctgggaactggaagtggcagcgcagggcctggctccctgcagggcaggactcttggccggctggacggcagctcctctggagggccagaaaagagaggggctagtgctcgggcaggtgccctggcttcccttcccctccacacgtcaacgattctatttgaagttgggcaggggggtggcgctgctcaccacacacaagtgttataggaggagtctggcccttgagtaccgggtacgcaggggtgcctcaaccacactccgtccacggactctccgttattttaggaggtgagtgtagtgccagtatctactctccttcttaaaaaaaaccagggctccagagaatcagaacagccaccatcaccgcagggagtcaagggaggagggagattagagaaggagccagggagggtggcagggaggccacgtgatccgagtcccctcacccctttccttcccacaggtccctggccaaagatttatttctcttgacaaccaagggcctccgtctggatttccaaggaagaatttcctctgaagcaccggtgagtgggcaggggctccctccccatcaatagggccgacccaagtcttcctcccccttcccccatgccgggccccacgatagtgtgaatgtcaggggcttcaggtttccctaaatataggtccctgccagaggatccgtggcgggaaaagggcaggggtcattagagaagatcggggacacatgtggggcgggcaggagctgccttataaccagcccgggaacccctagctcactcgctgctgaccaggctctgccggctccttcggcctcgccgcaggtgggccccttgcaggaccgggccggggtggggatggggttggggttgggccaacagggtccagatggggtccaggtgaggaggggagatttggacgataggagcagggggctcagcatctgggaggcagatcagttcggggacggattttcttttggagaaggaagtcaggctcaaggaagacgtttggcaggaactgtgaccccgcatgccagaggccgagcagcggccggtgcatagccgcgcattctggttttctgtggcgcagaggactaccagcctggctgcggcggcccggcggagagcgcgcacgcatgcgcgacccagcccggcctgccagcctggaactcggatggggaggtctcgcctccgcgcgccgctagttccgccgccttctcgcgctccctgcgtgtcctctcgatgccctttcctccgcctcccttacgcctgggccagtgacagggtgtcggctccgcgccgattcagcccgcgggcgaggcaggctaacgcacgactgcgcgatgtggcccctatggtgacacgcgctgcagccgcgaagaccggaagctggggcggccccgggccgcgcgcgctgggcctgggaggcgaaactcagcttccttcgtttccgacttttccatccgcgtcctccacttccccgttccgccctcccccattgccaacattctggctgagtcacggcgccccagagcgcgccaggctgggggaaaggagcagaagggagggccctagcgacccgcgggatgtggtccgagtcacgtccgaggggggtggggagggatcgtgttctcggcgcccgccccttcctagcgcggcctctgggctgcgcctctcgggggcggcccgtagcccagtccgtcgcctgccattggacgccgcccgctcctcgtaaaggaaaaagctcggcggagggcggagtggtgcctttaaaaggccgggcgccgccttccgcctgcccgcctcctgcgccgccccttccgaggctaaatcggctgcgttcctctcggaacgcgccgcagaaggggtcctggtgacgagtcccgcgttctctccttgaatccactcgccagcccgccgccctctgccgccgcaccctgcacacccgcccctctcctgtgccaggtgagcgcccctcttcacgtgcggggaccagggaccgtggagagggatcttgggggcagtggcgggttgggcgtccgcgtggaggcctcccccatcccatgccagcgtctccccactaccaggcacacacaggctccccggcccctccagcctgaggtcctctaactgcgcaatgcagcggctgcgcgcgctgagtcatggcgggggaggaagccggacgagatgaaggaccattctcccccttttcttgcagggacccctgtggcaaaggattagggccccttagccctggcggggatcctaagaggcagtgaggggtgggggccggcccatgtacagccccagggttctcgcaagtgggagcttggtttctgtcctgggaaacggggcgcccttcgcgaggagggaaacccctccgcggtgcttgatgcccccttaacactttccctgtctctccttatcgggcgaccttgattctgagcccggaacagctgcagccatgcgaagcgacgggagcatttttcaggggaaggcgcttgctcctccacgttcttgccccgtaggaacagtgacgatggcaaagcttaccgctttcctcgcctcgggctagggcttgttccgccgccctttcctgggcttctccttgctctcttatatttttcctaatgcccctttcctaccacccgccccctcccttgtggggaaaagcctgaccttgggatgtccttgaagccttggagcccgggccagccctgggatcttgaggggattggaaggaacaccccagtggcagtcagaagagctgggttctaatctcagatctggctccggggttgctgtgtggcttgaagcacagacctttcccatatctgggccctttcccacgagggtgttgggccctctgcttgattcacgatctttacattctaaaatactccggttcggttttgttttcaggcaaggtgaccccatggcaaggcgcaagccagaagggtccagcttcaacatgacccacctgtccatggctatggccttttcctttcccccagttgccagtgggcaactccaccctcagctgggcaacacccagcaccagacagagttaggaaaggtacaggggcaggcctagcaaagggaagttgggcgtaagagagagctggggaccagaagtgccccagggcctgctgggtgtggggcaggggaggtagggaacatttccctgacctccaggagaggggccctggtcatcgggagatgatgggaaaccctagctaactagtccttcccctctgtttcctgtatccaggaacttgctactaccagcaccatgccctaccaatatccagcactgaccccggagcagaagaaggagctgtctgacatcgctcaccgcatcgtggcacctggcaagggcatcctggctgcagatgagtccactggtgcgggcaggagacagaatgggtggagggtgcagggttgggagtggcaggctgatcccctaattcccatgtgacactcccagggagcattgccaagcggctgcagtccattggcaccgagaacaccgaggagaaccggcgcttctac

SEQ ID NO: 63192 - DNA, 3464 bp, Homo sapiens
atcctccaaggactgtggtggggaaggctgacaaaacaagtaacaaaaatgtgtaacattaaaaaaaaagtgtaatgttaaaaaaaaaaagtgtaataaagttacaaagcctagccccagctcggcttgtttccctagctgaaatgggggatggccgggcgcggtggctcacgcctgtaatcccagcactttgggaggcccgaggcgggaagatagcttgtgcccaggagttcgaggtcacagtgacctatgatagccccaccgactccagcctgagcgatagagcgagaccctgtctctaatttagaaaaaagaaagttgtggccgggcgcggtggctcacgcctgtaatcccagcactttgggaggccgaagggtggtggtgggtgggggcgcggatcacctgaggtagggagttagagaccagcctgaccaacatggagaaaccccgtctctattaaaaatacaaaattagcccagcgtggtagcgcatgcctgtaatcccagctactcaggaggctgaggcaggagaattgctggaacccgggaggcggaagttgcggtgagccgagttcgtgccattgcaccccggcctgggcaacagcaaaactccgtctcaaaaaaagaaaagacagttgtttaaacatttttatgaaatgatatgggaggggactggtctagggtttctaatagcctccacatcgcccagcggcagagcccacaaaactgccactggccgccaccgggttcctccacctccttcccgatctcaggctggagaagtggtgcaggggtcgctgcgaaaggagaggagcgtgtatgacgccacatccggcgcgcggcggaactggcctcctttgcttccgcggcggggccggaagtaggagcggcggcggcggcggcggcggcggtcgaaagcggagtgaaagagggaggcagggagccggagagccggaaccggagtcgcagcggcggtaatagtgcgagactcctctaagtcaccgtccttagcgcgggaccgcggggttcgacgggagttagcgggggtgcggccaggccgttggacgccggggggtcctggggccgatgtgaggggaggcgggggtgggggagccgggccggctctagaatcgagttgtccgctccgagccccggacggacactgatccgcgggctcgtcttggcctttcccaggagacccctgtgcggtgcggagggggcggcggccccgactctgacccgcgccgggggtgggccatggcggagatcagcgacctggaccggcagatcgagcagctgcgtcgctgcgagctcatcaaggagagcgaagtcaaggccctgtgcgctaaggccaggtgagctcgttggccctggggaagggaggccaagccgccgcccacgggttctggcctggggcaaacccaactgagaactttgggcttgcctcgttctggaagctttcccagagaggagcaggatggagccgctgccctcgaggaaaagctagcctgctcggggaagacagagtggataaagacacttaaagtttattagacgatgtgtttccagtggagtaagagtgttacataaagtacttaggaaactcaaggaaacaagtccatctgtcgggggacggaagcttgttggaggggggccgaactgtgggagaggcctcgaataaggaggtggtaaaagagtcagccaaaaaccaaaagtttaagacaggaaagttaaagaccctgtgatttataaaagtcttctaattacaacaacccttaaagattggtggtattgtactcattttacaggtgggaactttcatgttcaaagttacccacaagtaaggaatggggtctgaagccagctcttagtgtcctgtcctttttcaggccataatgcaaaaaggtggagttggatcattcacgttcagggtgggagcctgagaaatcgtagcaagtaagccagggtagaattaagcacgatagggaggccagttcagagttctgtgggaagtaggatgatgtagtggttaaggctctaggttttgcagtgtgagatggctctaggtttgaatctgaactctgccgctttctagctgtgttagtaatcttaagtgtctttatttgtaaagcagaattaatagtacttaataagatgattgtgaagattcagtgagttggtgctggagatgaggttagcacagtgttttggtacagcatacgtgcttgataatcaccaggtattctatttcttttggaagagggcaataatgagatgggctaaagccatcagggagggcttttgagtggaggtaggccttgaaggatgaagataatttggctagctgatggaggcagggccagtgagggaagggcattccaagcaggacgaatgtaacagtggaggccctgagatgcgtggggaacagtcaggggtttaattacctgcctcctctggggaactgtgtgattgtggcttctaccaggctggagaattgtggcagaagagcccacagaattaccctacgtttattgaacagtaaacattggcctttacagggccactatttggcctggcccggtactggcaaaaaacttctatccatctcttccccccagcaatcctatgaggttggaatcatttgctgcattttatcgaataggaagccatgactcgtagaggtctggtgacttaactgaggtcacccactgaggacgtggcagagctgggtcctgaatctgtggccctcaggctctttgcctggccctgcctcacatagactacctgcagccagacagggcctgtgaggggatgatgagcagggtcggcctctttttcgccacctgtctgtggcttttctcttttgccagctgaccagaccagccccatggtgtttttagttgtcccctttccctcagtcctgattggcatttttaggaacttaaacctgttgttgcctggcactattctttaacctcgaagtattgtctccctcacgggccctggatcagtgtggtggtgatggtagacaaagcttagatagcatgctggagtttgcagaatagcaggaagtcgtatattcagtctccatggctccttgcaacagcctaaggaatacgcagggtgggctgagtacttagccccatttcatagcagaggaaactgagcctttgagtagataatgtcttgcccaacatcacgcagctagtcggaggggaagttagttttgcatccaggtctttgactgtgctccgtggtcactgagagccaggcagaggcatttagattttgatgtggggtgtgaggcagcaggaagccatggaaggctgaggggtggagggtcctgcccagttgaaactgagtggaactaggaggtactaggccaaggcctgagttggccgctgttgtcccaggctcagtctgaagcagggccatctctgatacctggttatggcctcctgggga

SEQ ID NO: 63193 - DNA, 1650 bp, Homo sapiens
tgtcaggacctgggccacacacatgcgaggcactcccagagccgtggggactcgctctgtcacactgggctgctctctcctttccccagagccagcagcctctccggggaccagaggcgtctcggttttgactcagtgaggaggcctcaggttgcatccatggggaaactgaggctcggaggtgcccagggtgagtcacccgcctgcttccggcctcacccttgctgacctggcagctgaagctggaggaaggggctttggaggggctgggctgtcagttcccagtttcgggggagcatgggcgggtaggcactggttggtccttgcgacctcatctggagagcagtggggttcactggtggtttagggggttcatcggggagagggtcccccacctggaggaggtaggaggcctcgccgtgaaggttgagggtcacctaggaggggaggggctctcacctgcgggcgccaaggcctcctctacgctcaggggctcttacctgcaacgcggagccttacctggactccggggctcacctggggcgcgggggtgggggcgggcgccgggggagggggcagtcctcgcgggctgggcaggggcgcggggcgacacgcagccctgacggcgcgggcctcacctcgcctgggcgcgcggggcccggtccgccggggtgggctggcctgggagtggggggcgctcctggcgggcgccgtcccccccgggcccgggttcgcaggcgcctggacttgtttacaccgagcccagctgctgccgccgctgcggcgggagggggaggggacccgcctcctgtcccggcggccgccgtggccaatgggcgctccgcatgcaaatgagggggcgcgtcacacggcggccggcgcaggccccgaccgcccctcccccgccgcccgctcccgccggcccggaaatgcggctgcggcccgcgcgccccaggcctgctcgcattcctgcttgtggcccgcgcaggggcggggtcggaaggtctaggccgggcgcggagcgaggaagcgggtggcgctgggacgcatgctctgggggagatgagtataatgacccgcgtttgtccgccgcccgtgccccgctcaatccccgcatcaatcccgtgaggccgtttctcccgttggctccactgtaccgggggctgaggcccagggaggtctcgcggctccctaggttatccagctagtaagaggcgaagctggaattctcactgtgggcccattccatggcttttgccagagcgccagggacacactcagttcaccttctagcagggaagacccaaagatgcgcgcccctggcagccagggcgtcggaccaggcaattcctactgtccagcatcacctcctccaggcctctcggatgcctctgttgggacagctaagttcctcttcaaagactcaatttcctggtcataagctgtaaacagattctactcccgctttttcttctttgtcgcacgtctaccctatttgggaaagtttaaaccttagccaatcgggatcagctcagattgtgcggtccaaccccccagccaatggggaaaggacacagaaacaggaactgcgttagggttaaaaaccacttccctcctttgttggcgggtgctcttgggattgcaaccagc

SEQ ID NO: 63194 - DNA, 1845 bp, Homo sapiens
ggaggcctgggatctccagagagaaagctggggaccagccaggcggcccttcggtgactttacaaacagaggaagagactgaccgctcactgacttcccctctcctcaatccccttccattctactggccctgaacccttcgcccccattcccaggaaaggctccttaacccaagacaggtccgggggtgcagatgctggggacacaccatggggcaaatactgggaaggtggcagccaggggaggggcaggagagaatggacagggcaggggagggtcccagggtgagggatccgggcagcggggctgtcccagagggatagaggcccagagcacacggtggggccgggggcactcacagacccctcccaaaacatgcaggtggcactcctggccgcctcatctctctctgggcccctggggtggtggggccaaagccctgccccaccctgatctcggctcttctcccccaggctccctggcactgcctcacagggggaatccaagacaccctttcccccaaaacgggccctccactgcctcttcactaaggatgtcgcctccccgagagtactcatcctctgggcctcgccccgtgtcactagggtccccgcgggcccccacatgcactcggatgcccctcccatcattacagaagggtggactcaaagcctccaagcctgctcccctgaggacgtaggcagcgccccctcccccagaaagcactcaggggccccctccctgggacgctcccgatcatcccgagtctcctgcctcctcgggacgctccgcgtctccacgtcccggaaagcgctcggcgcctcctcctcctctcccgcgaagccccctcccctgagggcaccccctcccccggaacgccccctcacctgaccatgccgtacgcgccctcgccgatgtactgcaactgcgtgtagcgcgggcccacgtcgaacggctgccccttcaccatctccacctcccccgggacccccgggccgaccccctcggttctacggggctccccgcccccgcccccctgagccgccgccgccgccatctccactcctcccctcccaccgccctcctccccacggcggccccgcccgaggccccgccccttcccgcctgcctgtcacccgcagggccgcgcgcgccaggccccgcccttgccccggccccgcgtgggcctggagctgtcacgtgacccgccccgcgcgcgcccgcccttcttgccccaggttcgggggccatgggtccctgcgggctccgcggcctccaggtcaccgggaggttcggcagcgccgcctcggagactgtcctcaccctcccctcgatggcgaagcggccagggcgtgacctaccagagccacccagccaatgtatgcggcagcccaccagaacctgggcccgggatcaccctaggttaaaaataatgttctaataaatggatcaaattttacagatggagaatctgagagttaggtttactaacttgggtaaggtcactagtagtgacagctgagactcaaaatggtgtcttctgacacagagactctttctaattccatgcctctcagagtcctagactgtttttattttattatagagacagggtctctctctgtcgtccaggctggagtgtagtggtgcaataattgctcactgcagcctcaacctccctggggtcaagtgatcctcccacctcagcctcccaaagagctgggactacgagtgcgcgccaccacgccctgctaattaaaaaaaaaaattggggggctgggcacggtggctcacgcctgtaatcccagcactttgggaggccgaggtgggcagatcacctgagtt

SEQ ID NO: 63195 - DNA, 465 bp, Homo sapiens
agggttgcagaaggtagggactgaagaaaggcatgaaggagaaggatcggggtgagctgaggcataaaggcagaagcataacttgtccagcatggctgcagtaaaaaaatgatgaggtttcagcctggagaggtaggttggggccagattaggaaggctctggattctggcaaggagtttggatgttactcagtaagcagtaaaaaccctagagggacttttgccagatcattttgcaactgcgggagaatatagtgactcagagaaaacactatggagttcagcatggagccaggtttgctgagtgggagtgagtttcccagcataggaaaggctggtgtatcagagctgcaagctgccacctcctgctgctggaagctcagttagagtgtgactgagattcccctctagtgactgaggttggcatttccttggaggactggactgggatttgttctggttcat

SEQ ID NO: 63196 - DNA, 845 bp, Homo sapiens
ggagactccaaggggcagccagagtgcaaaaccggaagaaaccatctaacgtggggcaagggaggcgtaaggcaatgctggtggggcgtggaggtggagggtgccaggcccaggctatagaattacatctgtctatttcccatgcccctgccaccagactctgaattcctggaaggggaccaacccagctacctcagtttcctcaaggcactagccctgtgccaggcacatagtggggtccagagaatgtaggccgcagggcctccaaggccaggcagcaaaggctttgtgccaagaaaggtctgggaaaggagcccactgggtctgggccagccctttgattcctgtgatctccagtgagtcactgcccctctctgtgccagtacaatgcacacttggcccacacttggccactgagtttgcacttcactgaagggctgtgggaacgacggcaaggatagaggaaagccagattagggaagacactggctctcagaaccttagggatctcggtcttgggccactcatcccacttctgcccagcatctaaggagcttgagagggtgaagcgagagtaagagggttccatgctcacccccaacagggtcccaatgtcttctcgatgccctggtccttctgggcctaaaacatccacttctggggctctgtcctctggtggctacaaggataaagaatctgaggtcctgaaagccaaagacctaagaggaatcgaacaagaaacctgggagaggagcacagagcagcgcagttgggggtgtttacacggcaagcagagtccaggcagggaggccacaggatacctgacaggcacctccaagaaggat

SEQ ID NO: 63197 - DNA, 3117 bp, Homo sapiens
ccaagatgtcatatttgctggaccccccatcatcatcatcctcctcctcatcgctatccaaagagtgtttgcctttaaagcggctcccaggaccccctgacccagccacagggtccaccagctgtgagcaggagccagaaagttgagaaatgcaggttactggctacctccccaaatacttccggatctggacccaaatattccccaaatatttcaggatctcgactacttccccaaatatttcaggagccacactaaagacgctcccaacccattcctcagagaacctgaaaaaactaggcttttctctgcctgcccgccccgcccctctcccgccagctttcttcctcttcaggcttctagctcctctttcccccacacaaagcagtctggccccctcaccttcttcttggggacaatgatttcatcctcatcctcctcatctcccacgccttggaaggtcactttcctctttggcatgacggggcaaagaggtgtttctcaagctgaggaaaggatgcagaggaagggaaccgggtgaggaggggactcgccaacagacgcagcacagcaaacatttttcctggtctgtgacaggtacagtttgggagcggagggagcacaaaagcaggggccgaaaggaagctggcagccaggaggcctccaggacttgggtctagcatccgcgagttaaacggggcggggacggaggagcggaccctctggatcccccgaccctggctgaaaggagacaggcttcaccacgtgaccgcccccaactccagcccccgcagtctgcgcgccaccggctccacgggctgacccccgctctctaccctggctctctcggagctcgccgggccccggcagacccaggacctggcgctctcgccaccccgttcctccctgctccgaactcccaattccgtgtggtgagccccaactgtcccgggctgtgtacaacttagagggccacggggattcgggcggtcccaccctcgcgcactcacctgggaatccgcggaaggcgaggtggaaaaaagaagagatgcttgcgccagggctacatccggggcacccggccgccatcacccggaagaggactgcggaaggcgcccgggaagcccggaagtggcttcactcgggttagggaactaactggaagagcgggcggaagtatgcgataagcgagcgaagacgcctccaccctctctcccgccagaagtgacgtcagtcacgtgggaggacaatggtgagaagagggaacctaagaattcctggactctgactgggcgtgagaaatggccggaagtagcttcgagtccgtcattcaagcagtagaggctctggagaaaaactggagcgcatctgcttaaagggccgcccagggtcaggatggaggggcaaagtccgagcagggtcagtgggttgctgctccgttttcctgtcctgggttcaagtcacccttcccccagggctaagggctcagcgcccctaccgtctcgttagaaatcctgccttcccattcctatggtccagtggtcagccctcctagcctgagaggtgcagccttgcctctccgaggggaagcctgactctcccgatggccagcctggggcccctggacggctctccgggcactttctgaacacacctccctttaggacccaggggaaataatttgtcccacgcccataccctgggcgagttcctggtttctgaggtgggagagccatcactggagaggtggcattggcgccagtactcaggccagaagccccttgtgccctgctctcaggtaggcctggaaaagggcaacagtgcctctctgcagcatgaagcccccctgagcaaacagggcctagcaactcctgcccaggtagcggaatgtggcccaagcagaagggggaattggggaggtagcggggatcagcccctgtgctgggacccctagctcttgacactcggagcctgcatccccctaagccaagactgtgcgcaggcagcacgtgctgaagccagacgaggacagcatgagagttcccctactcttcccccaggcaactagatgggccacttctctctccctaggggtttcctcccatattggatcacgatgaaaactgcacagaaagtccgtgctcagtttcttccatggttacagaacacaggccccagaccaggaaggcattctgctaaagaaggggacccgaaacctcagctaccagcgccgatggttcatcctccgaggaaacctcctcttctacctagaacactagaccgaccatgcacccctgagcctcatcctgttagagaactgccaggtggaaccacaccttaaggctgcagaaccctatgcctttaccatcctgacccctggggtggagggcacaggtgggcgggcctacaagctggctgcagaaacccaggaagagctggagacttggctgtgggcactggctggcgcgagctggaggcggctggctgggctgctgtcccccctccccccccaccaaaacccaatactgggagctgtgccaggcaactggccaagaacccatctcatccccagaggacagtggctttctagccactgtgagtaccccctccagcttccaggagttgcatgagcactttgggaaggagatccgggtgctgcacgtggtacatagagagctccaggcagccagtgacaatggagacagcagatcccaggcaaagatggagcaggagctcaaccagtgtctgatgagtgactgagagatggacccaaagctaagaggtacctacttgccaagacagcagactgcttcaacagagacccaggtcctggctctgtccctccctccctcgtccttaccccatccccccctcatcaaataacaaggcagaaaacaggcccaggtacaacagcaggttcttttccaattcctcaaagcgctgcatggggtgggggcagagacagaagagaatgtaaacattgggttccaccccctggagctcaagggaagacccttacccagatagggactaactggaggggtggaagggaacaaggtgaaaggtatgggtcctggtgagacaaaagcaggggggcctgagaacacagagcaaggt

SEQ ID NO: 63198 - DNA, 2865 bp, Homo sapiens
tcctacttactctccacgattcagagcaggttcagctgactccctgctctaggtgcctcaggaaaccctctggagatctctaggctaaacccgaggtcttctattgaaaccaactgtttaagtacttttctttctctccagatgattggctccttgaaaggactattttatccttagcacctggggcctgacacctgggggcccaggagatgctgtaggctgactggcccagcaggtcaaaggggcacaggaacaacgggcaggatccagagagggggaaggaagaagtcagaggcaatcaccccctacctcgggagtgactcaggccccggagagaactaggaaagagtcagcccggctggggagatgaggaaatggggaagaggcctctcccaccctttacttcagtgcagatacaagactgccctgtttcacagcgggatcctgactgcacagtctcccttccatcagccagacttccccacctctctactccatccctgggacctagggctatgggggaagggagatgcctgcacccctcccaggctatccaccctaagggaccaagggtctctaccagaaccctcgcccaaccaaccctccagaatatccggcctgtagctggagttccccatcaaagagcagggatgacctcaggtatcatctcattcaatccactttatagaggaaaaaactgaggcacggaaatggggaagccactagctcaagggcacacaacccatcaaaggcaaggcttaaacccagacctcttgacccctggtctgaaactccactaacatgccaatgtcacaggcacctcaggatgctcaagacacggcagctcgcgctgatcaccccgtggatcctcagaggaggctgggctgccagagtctgggcaaagtgtatcgttttcgtttcgccctcccccaacctttgcttccccgaggcggtcccgctgggtgcccactggtactcacaggctgcccgagtactggctgcccccaaggaagccatacttgtccgtcttgcgcagggccagcccgtttatctctgaatctgagcccatggagctcacatcatccgccaaggactccaaggtcccagacatgaggctcacggagtccaagtaactcagcgtgtccggggcctgccctcgaggcccagagatgccaggtcccaggctggacgtggagcccaggtcttgagagttttcagcaggctccggagctggggtcacggtcacgacagctaccggagcctcacaagtcccagaggggcctgtgccagggcctgaggggtcctcaggagcctgtcctgctgatgctgatgttgctgcggcagctccatgcccacctgtcacttgtcctgatgcactccgtgcagtcactcctgaggccactgtggttcccggcttgggggcaagcgggggtttggcggtcagggcaccaggagccgttctggaaggggtcctggtaggggtcccggtgggggtccctggtcctggggcgggtgagggtcgagcctcctctgtcttcggcgagtctgcccctgcggccagagccctcgatgtctcaactccagccactgccgcgggctctggggattccgggccggaggggagctgcggctttggggcttcgggcgaggcctccagggtcagcaccaccaccgtgctgcccgtgacagccggggctggggccggggctggggccggggccggagcagaggtctcggccgaccccgggacccaggcgggccgcgcctccccgggggccaccagggtgacgggggccgaagtggccgtagtcactggaggtcccggagccaccaccacgacgggcccggcccgggaaccccggggcggcggcgagggggccgcgggggcgccatgacggcgcggcggggccaccaggggcgccgtgcccgtctccatggccgcgggccgcccctcacatccccccgccggggaggccgcagaaggcgccgcccctcgggcctcccggcgaggccagccgagaaaggggagagggcgaagggcgcggctcggcgcgcgccgggggcggagcggccgctgggcgcgcagaggcggggcaggggtcggggggcgccgcgcgccggggtctctctcgagccctctcaccccctcgcgcgctctcgccaccgccccctccctcctgcttgggggcgagccgccgacctcgcgcctgcgcacacgccgcagagccggctccgcgccagcgtctcggcgttccacgcctgcgcgcggactggctcatcgcgctccttttttctcccgcctagtcagaggatttggacgaatagtgggagagagagaactgggcttctgccaatcgttggaatcgtgggcggggctggaggcgaaaaaggggtgggtcatctggaaagaggaaacggagaaagctagggctgtaagaccaatcagaggacgaggaaaggcagggggcgatgggacgaaagaaataaccaatagaaacgcaggggtctgaacctcctggccaatgaatatgactgaagggtgaatgaccgcggaagggcggaggaggaggcagggctgtgcgagtaagaggtggggcctggaggcttcttaaccaataggaatggtaaaaagggagccaatgaaaaggggagcaggtggaggtcaaattgacaggcagtgatgtctatttaggcggtgacagacagcatccgcagtcaataggaagagctgaagaattctttaggtctcccaaaatggtcagtaaggaatgacagctgggaggaggcggggcaagctagagattaattcgccccgtcagccaatgatcgtgttctcccactttggccacaggacaggaaaataga

SEQ ID NO: 63199 - DNA, 1315 bp, Homo sapiens
cctacgaagggttaggcactgccagaggtaagggagtagttaagattgtggtaatgggcggtaagattgcattttcacagcaaatgtgggcggagagggcaaaagcgagtgtctgggaggccaatgaaggaagtagagtgacctgggttttcaggggaggctggggctggcatcggggatgaggtgcgagggagtggaaaggaaccaggaacccaatcgcaactccccttgtgtcacctctctccagcctggaggagctgctgaccacgcagtgtgaccgcttctcccaggaggaggtgagtggggaccggggcggggccggagcagcaaaggggctggggccggggagactaagggcctgtgcgagacgcccctacgtctttccccagatcaagaacatgtgggcggccttcccccccgacgtgggcggcaacgtcgactacaaaaacatctgctacgtcatcacgcacggcgacgccaaggaccaggagtaggggcacccgcgggcctccgctgcccgacgcttctgttcggcccgacctccaccccggctcccaataaaatttaactgatctttgtttcttatgggcggcgccttcagagtgtctgcgcgagggcctcaggtgggagcgccccacaaatgaatggatgcggcctggaggcctgcgggggtcggccccacaatctacgcccgccgcctttttccgcaaggaaggagaaggctcgcgtggccgcgggaagctcagtttttattgaagacagagtctgggagaagaagggggactccggaagacagtgatgcggtcggagattgtgcaggccccgggccgggaagtgggcggtgtctgggtgggcgggaccagcgccggggcggggctacggactcaggctgggagaacctccccctagcccgcgcgagggcggcacccgcggaggtcccggggggcgctgggcagtgtggggcgcggggattggacaagaggccgactgaaggcggagccgaggtaaggccgggcggggcgtggcctcagagggcgtctgactgctcgccctgggcctggctctgctgcatttgggcctgcatcttctccagcatctcttgcatgcggcgcagctgtgcagggcgagattgcaggcggtgacctggcgaagccagagggggacctggggcatcggtcggggggaagcgaggtgcgtgctcacctcttcgtctttctcgcggatcagcttctcggtgtccgccagaggcagcatgggcagcgggatctctgtggcgctctggcgggaaagcttactgcgggacagtgggaagggg

SEQ ID NO: 63200 - DNA, 1723 bp, Homo sapiens
gggctgccgacctgtccggagtctttctggccgcctctttctttgtgtctctttctctttgtctctgcccgtttcgctcactatcgtcttttgttcctctgcttctgggcctgttactctccaggctcccagcctcttactgctcctcggactctgcgtcaatgactttatctcttatccgtttctacgtctctgtctctagcggctaatctttggctccccttatttttggtcagccgctgtccctcggtctctctctgcctttgcgtcctctgtgactcagggctctgatgtgagtctctggctcagggtctctgttccgggccccaggtctgattccatctctccagcagcatttacccggtgtctgcctctagcctctgctcctgcctcggtctccccagcccagcccccattccatacccacccccaccccgggccctcggcctctcggaccagccccgctttgtttcccacgtctcggcgccccgccccgccccgtctggggtctccgccgccctttgtctgccttggtctctcccccacccctttccccgggtccgtctttggatccctctttctttgtctctcccaggtcggagtggctggcgctgtcggccggccggggaggtcggcgcgggtggctggagacacacagccacaattacgaagagcctcgggcctcaccacccagctgcagcccaggaggcacacggttaataccaccgagttcgggccgccggcctcggcttagagtagcccctgggccgcacgctgccgcccgccggccacagagctaccgccgacgcgggcgacccccacaggcccgcagctcctccaaggtcctagagcggctccgtgcggccccgcgcttccgcttcccgtccccgcccccggtggccgcccccgggacgcctgggtccgagcccgctcccggcttggcgcggagcctgcatcccggagccgctggcggctcgggcgcctgcaccccgctgaggagctccggagggcgccggggtggcggagccggaggcggccggcaaggtgagagcggcggctgcgcgctgggaggagcagcaggtgcaggggcggccggcggcgcgggcagggggcaccgggagccgcgcccgtacctgggacccgacgccgcccggtgcccgcgctggccggcagagggcagcggcagggcgccgcgggccacacatggctgcgtgaccgcgggatgctgtctgtccccttgctcagggcggcgtgccggcgatggagcgcgcggtagagccttggggcccagatctccaccgcccggaggagagggagccacagagaggcgcccgcacaggtgagggcctcggccgtgcgccgccacggacaggtaacggccggtggggactgcgatgcttggctgtggccggccgagatcctggaagatcggacgtgagctgtgcctctggggagatagggggaggggagctttcggagcaccaactgtgcgccaggccgggaggggctcttcacggcctctgtcccctccctcacggccttcctcatccttactgcctctgccctacttcaggcttcattctgttttatcctggcaattgcagtagcctcctctctgcccctttctctccactgatgcattctctcgccagcttgatctaagtccagatataatcctgtgtctcttctggaaaaccttccctagcgtcccccagtctcctaa

SEQ ID NO: 63201 - DNA, 582 bp, Homo sapiens
cccgagaccctttttatgcgtcgggaaatgagtcattcggctgcacagcccaaagggagggcaaacggtgctccttcacccccagaaaagcccgccggatttcccggcgccccgcggggcctgggaagcaggtctgcaatccctagcgttttcacaaccactggcctgatcggccagggattaaagaaaaaagaagtccagggcggttctccccgctaaacaatgaaggcaacgaagtacagggtcgcaagttcccgcccccggctctccccgatctccgtgcggaaagaatccctggacgggttctcgcgagatcgtaagcactggcctggcttccctagaaaccgaccagggctggctgcagtgcggctcctcccgctccgcccgccctttccaaattgatgcgctctcaaaaccctagaaccctgcgttcagggctggggctcttgatggcctgagcggagccctttggggcttctggaagttccttcttgctggttttcctagctcccttccctaccagtgtgccctccaagacgacctgcagtgaactttcttttctttttttttgagacggagtct

SEQ ID NO: 63202 - DNA, 1249 bp, Homo sapiens
ctcggcctcctaaagtgctgggattacaggcgtgagccgccgtgcccgtccgaaaagattttttaaaagtaaaaataccctaagggccaaacaaggtacccctgtggactggatttagctttgggctgttgttcacctaggctactgattgtcagggatgctatgacatccttatcgtgtaacttaggcaaatcagtttacctccctgaacttcagtgagctcatctgtaaaatggatcaggacccatcgttatgcggatcaaatgagaccaggtatgtaagacgctgaacagcgctggcgcatggtaagcaccccacgcatgacgcgacagcggtagcttgggtggatgttgaattggttaggatgtattcaaggatatcccagaggccagcggaataggcgaagccgagaaagatggagaaaagacggcagaggagataaagagggaatggaagaagtgaggaggcaacagggtccgccctccaggcggggcgccagggagaggcccaggccggggcgggagcgcacgtggcctatttcgggcggagcagaggcactgggcgcagcggagacctccaagccggccccaggagacgggccgcgaggttaggttggaactcggcggcaaggaccttgaacgccgggctggggcggctccaggtgcttgggagtcgggggactgcggaggacgccaagtctgagctcgccgccctctccgagccgtttgggccggacgcctgggtccttcgggctccgccccagggggtggggctatatgttcggaccaatgaccggccgtccctgcggtcccgccccctccccgcccccggagccgcggcctcgctgagtgcccagccgcccggcgcccaggcctggggcaccgcgagtgccgaaccttcggctggtgagtgcgcaccccctccccggggtttccgccccgatcccgcctccagcccgtgccccagagctccaggtcgccgacccgggccctggggagtgactcagcgcaaggatggtggcgacttgcgggggctggagattcgaactgttcaaggccttgaatgctgggatgagtggggtgaacgcgagccctcggagctggtcccggggctgtgccagagcgtggggccgggctggggtggacgggagaggaccagattcggagaccagggcagggcgggagaagccacggctgcactgccttgctgggccagggccacggtgggcgggggggggggtggggggggg

SEQ ID NO: 63203 - DNA, 666 bp, Homo sapiens
tgtggatgagtgggggtggttggcaggccacacagggagtctggcttttattctgagggtatttgaaggttttgagatcagaatatgagttaaatttcaccccctggagaccctaactgccaccagatacgtttccgcttctcagaaccccagaggattctgtctgcccccagcctgagcagccctgagtaccagcagagggctttggccccagggacccagcttgcaggggccgggactctgattcttcctgcccaggagccagttcccagggaaagaatgctctgctgccccctagtgggcctgctgggtgctgggggaggggactagctccttaggcctctggatagtctaataactatctggttgtgtttgttgcgggcccccttcgcccattatccagctctgcctgcctcttctggccctgcgattgcctgatctccacctttggcctctaagttacaaacacaggctccagagcttagggtggacttccagctccatcatttacccgctgtgtgaccttggccaagtttcctaaccgctccacgcctcagtttcctcatttgtaaaagggaaattataacagcacctacatcttggagttgtgaggaatgaatgagtcaacacatgcacagagttagaactgtgtctggcacaaaataa

SEQ ID NO: 63204 - DNA, 1922 bp, Homo sapiens
cgttccctctgcagtgctcctcagagggctatccacgtagcctgctctgtcacctcctttaagtctttgctcatgttatcatatcggtaaagtgtcttgacaaccctgtttaaatctgtagcatccccaataccagcattccttatccattatttctgaaagcaggaattttttaatgctttttatttaatgcggaatccccgtgcctagaacagtctaggacactgcatgccctcagtaaatattggttgaattaataaaaatagctagaacgccactgggctttgtgatgtgtgcgttacgcgcattatctcactggatgcgcacagccatcctgggaggcagcaccgtggcctttcctatttcatagatggggaactgaggctcacagagggagcagcctgtggagacccaggtctctggctccggggcctgccgctaagggctgacctatccccctctccccgcaggtcccgggcgaggcgcccgcgccgtccgccgacccggcgcgtccccacgcgtgccccgactgcggccgcgccttcgcgcgccgctccacgctggcgaagcacgcgcgcacgcacacgggcgaacggcccttcgggtgcaccgagtgcgggcggcgcttctcacagaagtcggcgctgaccaaacacggccgcacgcacacgggcgagcggccctacgagtgccccgagtgcgacaaacgcttctcggccgcctcgaacctgcggcagcaccggcggcggcacacgggcgagaagccgtacgcatgcgcgcactgcggccgccgcttcgcgcagagctccaactacgcacagcacctgcgcgtgcacacgggcgagaagccgtacgcgtgcccggactgcggacgcgcctttggcggcagctcgtgcctggcgcgccaccgacgcacgcacacgggcgagcggccctacgcttgcgccgactgcggcacgcgcttcgctcagagctcggcgctggccaagcaccggcgcgtgcacacgggcgagaagccgcaccgctgcgctgtgtgtggccgtcgcttcggccaccgctccaacctggcggagcacgcgcgcacgcacacaggcgagcggccctacccctgcgccgagtgcggccgccgcttccgcctaagctcgcacttcattcgccaccgacgcgcgcacatgcggcgccgcctgtatatttgcgccggctgcggcagggacttcaagctgccccctggcgccacggccgccactgccaccgagcgttgcccggagtgtgagggcagctgagtcccgcagggctgcggaggggcgcgctggggcttcgacctggctgcactaacccaggctcctcctcgccccggcctccgggtctgggaaattgaggggacggcaggcccggctgccctggaactgggagacagggagaatcccctgccggggtccctggaaacagtgcccaccccacatcactacattccctcggcccgtgttagtgaataaagtattatatcctcaccccacccgtgcctgtgagtgaggtgggtgggagaggaagaaagttggggttctccaggctcaggtgccaagtgagttgtcaaggaaccaaatggggatgtaaacctaaaaggggttcccggcacctcggtttgtgttggttggaggtgatcgcacacttggcccttggttacgtcctcataaccttagacctgaaagggcccataaatatactatgttcacgatcagacacgcactgcattcggcagagctccagtgagcaaggcacgaccctcagatctcagtctagtgaaggagagaaaactgtaataacactacgttaaaggttttaactgctttgttatgtaagcttacccagcccggcgcacagtgactcacgcctgtaatcccagcactttgggagggcgaggc

SEQ ID NO: 63205 - DNA, 1243 bp, Homo sapiens
ccagcaaaaaataacgtctcccacctctcagcacttcgtttgcccctctcgtacccccggcgcctggagagcagaggcggtatctggtgccggtatcttcccagggctaggctgaagggcgttcctagttaccactcggaggcaccacccaatttcccttgcctcaggtgtgcaccgctgcgcccattttgcagatgaggtaagaaggctcacccagggacagcccacagagccaggacccgagccccgctgccagcccgcttcccgaccacgtggaggaaccctccccaaaacgcgggagaaaggggcgacttccccaccccgagctgggccaggcctgcttacatgtcctcgagcgtgggctccgggctgaagctgaaccggccgggagcagcagtgtcctctccccccgtgtccccacgaatctccccaccggccacagacatgccgcccaccgctgcaccgcgacttcacggaaaacccacgagccacgctcgaagccccgcctccagagctccgaccaattacgggagttctctattgcctcacggggcggagcctgaggaaagagaccaatgacttttgtggagtttgctacagccctccccttccctcactggaccaatctgagggagcttcaagcgcgcgtttctagtcttaggccctggaattcttccgctaggccctgtgtctaaaggtagaggtaccaattcgacctggggaagagacgaagggcagagggtgggggaagcgcaggcgcgtcacttcgtttatgggcgccagagggcgccaaagcgaaacggcagcggaagagggcccgtcaggtggaaaaccctataaatgaaaggccctatgcataggtattaaatcagggcttaaggacgttgagaaacctcgaggccaacccccacactatttggatgggattgaaggggaagagcggagtaagatcagacggcagtaggacttcagctccccgccatcgctgtgtcctgtggttgaaacgatggaggtcgccccatccctgtcctaagggaggcagtaggccccagcgcaacgtacattgccctgaaacacgtggccccttatggtctggcctgtgccggcctctccagcctcatgggtccccagcacggctcctccaccccacacacgagaactccaggctccactcacaccagggaatacgcgaggtggcgagtcacagggttgctgctttcaaatcagaaccactgagttattg

SEQ ID NO: 63206 - DNA, 3777 bp, Homo sapiens
ctgcttcgagtccttttctgtcatttcagggggaaggtgcaaccctaaatctgggtgttaaattacccaattcaccagcatcagggaaaacactctctctctgctataccagactcagtgtataagctggttcgttttataagactgtattgaatttcaaaccaccaaacattagccagaatagtttttcaacaaggtttcttttatttatttagcaagaaattactctttattgatcaaatcaccaggaatctgccgcaaaagacttaacatcttaatgaccactgaggcctgggctctgaggcttgctctgcctctcccagtccttaatggggtttagagggagagacgtcattaacagagaccaagtcagatggttgcaggtcctcctttcccagtcatcagacaagttgctcaattcttgtccagagcaggaaagagccagtacttcagtaaaattgaataaagaatttgatgttgcattataagatctctcttaacaatttagatttatcaacaatattggtccaaaactcatttgcttctaatttttttcattttgcaatttactttgtgtgtgtgttactttaataatctcactccctgtgcagaaattaatcaaccccgtgcaaagaaaaatccctcaacctggaatagcttcatcttactttggcaagagaaaacagaggtatttttgctcctcttctacccaagtgatgaacaaatatccccccaaagttcaaaatgttactctggcctcggaatgcatataaagactgctttagatgggctgattccaatcacctagaaagggcagccggaaccactatgcaggcagccttctttggaaatttcttacaatcaactcttgagaaccatccgtgattgtggacaatggctctaaggtccaaacaacttctgttctttcatctcacgagctaggctcagaggaggcatttgaactgtcaggagcaagaacagcagctgtggccccacgaggcaggacttcaataactcgcggcttgtcaatgatccgggccgttcggtttcccttttccacaatgccaacgatccacgcttggtgaccctctccgtacttggaggatttgatttcagaacaaaagcgagccgcctgttctcttggcagacaaatcagtaatcccccagaggtttcagctgaggttccttgaagaagcccaaaccgtccactggccttgctgacggcagccatcttggcaattattggcagattatgaataacaaaggacacttcatttctttgttgttttgcaaggttctgggagtgtcctagaatgccaaagcctgtgatatctgtggccgcatgggcattaaatgtgtgcattaaacctgcagcagttctgttgagggtagccatattgaacatggcttcctgataggccagctccacctcttctctggagaccaccatctttactttattccatctttcaggattatccagccattggtgggcattgacagcaacctgggttcctaacggtttggttaacaccagcacgtccccaacgacggcgctgtccggcattatgaactcatttggttggcatactacagtggcaactccaccgattataatccaagggttgaccaccgtttgcccaccggtcactgccgtccctccttcctcagccgcatcccgaaagcctttgaccatgagtggcgttaccttttcgcgttcctcctcactcatactctggctgacgctgagtaacatcaacatgttgtcacactcagtaatccccatggcgtagaggtcactcagcacgttggcacaagctatgcgccccatcatgtagggatcttctaccaaggggtaaaagaagtccgtggtctgcaccagtgacaggcccccgtgcctcagggggatgacgcaggagtccatcccgatgcccagggctggaaaggtggggctggggcccgctcctgccggcaggccggcttcctgggacgcctcttcctggccacccaccaggccccggcccagcgggggccgcacgtccggccgcgtcagtcccgccaggagtttgagcagcgcctcctgcgggaccttgcagcctcagcccttcatgccggagaagcccgtcagccgccagctcgggctgaggcccaacgcctggggctcgaagggccggtagttcgagaagctccggcccagagtcaagcccgccgggcccgaggagccttccgccgctgccatcgcctctccgcaggcgcccgtcgccgaggcttccgccatggcgcctgcccggcagggaagcgagaggagaagagggcccttttattttccactcagattaatatgaagcaaaagtcaaatattacctgcagggattctccctagcgctactcaagccgtcagacccacggcatgcacaatcttcctgatagaggagccgccggactcccttatttatagccctggcgattgacagccgcaacatccaatgacgactccgccaccgagaggcgggcttcctagactctaaaaggtgcaacaacctccggcttgcaaaaccgcttgcaacgggattgcagaacgtcacgtgctttccttcgctctcttagtaatttaaatggtttcttggcagtggctgacggaactctgctcccttccagtcacttttccaagtccagcaaattgtagacgagggaagattggtcactcggcaaacctcatgatcggcaggattgtcccaaaggtcacttgacagcgcacatgatcgatccaggatggcaaaatagcccaagggaaaaaacagaaagcatgagaaattagaaattaaactactaccattaagttagcaaactgcaggcagcatcaatataatgaaatgttaacaggaacttcaagaactctaggactcaggaggtcgaggctgcagtgagctgcgtccgcgccactgcactctagtctgggcgacagagcaagaacctgtctctaaaacaaacaacaataacaaacaaacaaacaccccccccacacacacagacacacacaaaaagagagatttaggactggaagtccagacacctgcatggattctaatggtgtttcccaccagctttgtgtggagtcactctccgcgtcggttgactcatccatctgtggaacagagtgggttacataggactggtctattctaaaattcctatatctctgtaaataaatatatatatatatcttatatagccatgaagggcagtttgccaatatctattaaaaactccacctcccaggttcaagtgattctcctgcttcagcctcctgaatagctgggattacaggtgtgcgccaccacacccggcttatttttgcgtttttagtacagacgggatttcaccacgttggccaggctggtctcaaactcctgacctcaagtgatctgctggcctcggcctcccaaagtgctgggattacaggcataagccaccacacccagccaataaaaacttttttaaaagacaagaaaatgaatagaagactcagcataggggctatgtctagggagggctacatagggagcttctgggctatgtttaattctgttcattgggctggtggtgggtacgtggtacatggttgttctttaaactgtacatagatattttcggggccgggcacagtggctcacacctgtaatcccagtactttgggaggccgaggcgggtggatcacgaggttgggagatcgaggccagcttgatctatatggtgaaaccccgtttctactaaaaa

SEQ ID NO: 63207 - DNA, 867 bp, Homo sapiens
gactctgtctcaaaaaaaaaaaaaaaaaaaactgcacatagatattttcccacactatttttgtaggtatgctatatttcagaatttaaaaaacatgcaaaaagaaagcatgatggagtgggaaaatacagtgaaagcaaaagaccttgtatgatgtctgcattgctgtcagtgagctggctgaccttgaggaagtgatctagcctctctgcaccttagtcttctcttctgttaaaccagggtcacaatctctgcttaggatctagtggaagggccataggaaacctcagctgaaaagtgttttgcaaaatgttaagcctattgtacagggaaaggatcctcatatctctaagggaaagaggaaaacattgtattatgtctgtaatcacctcacctgagttaaaaagtgactaggtcaggtggtgctggttatacattctcttagttctttggacttctccctctctgcacttagtacaatttgcaattcttttttttgtttgtttgttttttgaaatggagtctcgcactgtcacccgggctggaatgcagtggtgcgatctcggctcactgcaacctccacctcccgggttcaagcagttctccttcctcagcctcccaagtagctgggattacaggcacccgccaccacaaccaacgaatgttttgtatttttagtgagacagggtttcaccatgttggccagaatggtcttgatctcttgacctcatgatccgcccccttcggcctcccaaagttctgggattacaggcatgagccaccgcgcctggccctgtaattctttaatcatgtgataatgccatgcctatctgtctggccccctcgtttgtaagctctgcagagcag

SEQ ID NO: 63208 - DNA, 789 bp, Homo sapiens
aaaaaaaaaattagccaggtgtgatggtgtgtgcctatagtccccactatccaggaggctaagcccggagggttgcttgagcttgggtggttgaggctgcagtgagctgtgattgcgccactgcactccaacctgggcaacagagcaagaccttgtttcaacaacaaaaaacaaacaaatctgggactcccagggtaaaagccaactccgcattaagccacttcctgggtctgcctgaccctcacatgcatgccttctaccttacccagaagtaaatacctcacttcttccccgtcctgccatgaatttttttcactgcatttactgctgttgggtctcacctgttctctgctttgttccccaggcacaagcaaacaggacctgacttccttcaacatggagctgtcctccagcggcatcagtgctgacctcagcagggtgcgtgctgggctggagcaatgggctgcagggagtgcagttggctctggggggtgggtcggtgggtagctgacccgctcatctccttccctgggcagggccatgcagtcgtgggggcagtaggagccaaggactgggctgggggctttcttgacctgaaggcagacctgcaggatgacacatttattgggaatgaaccattgacaccagaagtgagagcaggctatttgggtgagtacttctcttttctgctgggatcttctggttgttgaggtcagatggtcgctcagcctggcttccaaaacaataatgaaagcagttaagcaaccagcatgaacaaagtcagagttt

SEQ ID NO: 63209 - DNA, 640 bp, Homo sapiens
gagtccagtctcttctgctggcagaaagcaaatgtgacctgtgtcactacgtgactgtggcacacgccttgttcttggccaaagaccaaattccttggcatgccttccagcaccctgcaaaatgagaccctcgtggccttccccagcctcttctagagccgtgatgcctccctgttgaagctctggtgacaccagcctttctcccaggccaggctccttcctgtcttcctgcattcacccagacagctccctctgcctgaaccttccatctcgccacccctccttccttgaccagcagatcccagctcacgtcacacttggttgggtcctcacatctttcacacttccaccagcctgcactactccctcaaagcacacgtcatgtttcttcatccggcagcctggatgttttttccctgtttaatgattgacgtacttagcagctatctctcagtgaactgtgagggtaaaggctatacttgtcttgttcaccttgggatgatgcctcatgatatgtcagggcgtgggacatctagtaggtgcttgacataatttcactgaattaatgacagagccagtgggaagatacagaaaaagaggggctgggctgggcgcggtggttcacgcctgtaatcccagc

SEQ ID NO: 63210 - DNA, 1973 bp, Homo sapiens
tggaatttggaactttgagcttcaaattctgggctttgggttttgagctcagtgttctgggattcatatctagagctctcagattcatagccagggctccggggttcatacccggggctccgaggttcatagccagggctttggggttcatacctagggctctgggattcaaactcagggctctgagaatctgattcagggcttctgggtgcaaactcagggcttgggggcacaagcccagggcttcgggactcaaaccccgggctttcaggctcaaatctggggctttggggttcaaactctgggctttgtggctcaaacccagggctctggggttcaagcccaaatggtatctcttcgacttcatagtccccactgccttcttgctgagaaatttcctcttcctcattctcactcatgttgcctgcaggatgagagaatccagatcgtgtgagacctggaaggtcatttggtccattagcaaccacacacctcccacctcacatgcagggtcgctggcccctagacaagtgctgaaattcccacgcccccctcagctgacccaagacaccccagtccccgccggcccctccttcgagtcccaggtgtcccagccccgggccctcgctccctccctggagccacagccccttctcctgcgcgcaagtccactcctcggacgggcgctccctcctcacctctgaggtacccttcggggctcctcatttcgtcagaactctgcacatcctggggctcgaggccccacggcaacgcctcccgctccatccccgcgggctcccagtgcagcggcggcggcgatggcggccgatcccgcgacccggcctcggttgccccgagccgcgggcccccgcctcccgcccgctcagcgccgcccaggggactcggcggcccagcccgggcccccgaggccggacgtcttgaccccgcgcctctccagcgcgccgggcccctcccctgcccgcggccccgccccctcccaaggtctcggcctccccgtggccctcactggcccccgcgcgtcgcggcctcggggatgaggggcttcgcgactaccccggcggcccccggcccccgctcccgcccgagcccccaccttctggaccccggccccgggctgggctgcactgtccaacggccgcccagcacccccccaccctcccccgcacaggaagtgtccgtccgcggccaggtccccccgccggctcgcgccgcggcctctctaggagccgctggaggtggaaactcgttggcattaaccctgggctggaggggcccggccacggggtgggtgaggaccggacgccccggagcccgcggggctaccggggcagtgtgtgtgcctatgttctaggtctccgtccctccagaggcccgtctgtccatctcccgggccccgcgtcgtcggtgcgtgtggccaagggcgaggcgacaagcgagaccaaggtcagcgagaaggagcgacgcttcccggcgccagcgggggcggtgtctcgctccctcccctcccgggcctccgggtcagctccggcagcgcctcgggaaccgggacggactccccttggcctcgccgaggtccttgagcctgggaccccctccaggaactccgctccccggcacctgcgcgcgcccgctcccgttcctccggcccccacccagctcggctcccctgatcctcctcctccctcctccctcctcgagggctaggatagttgccaaggagacagccccgccccggctcccagaggcacagcttctccgccccaggaagcccggcggttggccgatggggctcgtgctctagccgccccgcctcctccaaccccgcggacggctgggcgttaatggtcgccagggaacgccaggcgccttcctgattggccgggagtgctgtggtcgggtccgcctcccctgtcggccagaagcgccttcaggaggtagtgggagggaggtgc

SEQ ID NO: 63211 - DNA, 2513 bp, Homo sapiens
aaaccagccaggcgtggtggcgagtgcctttacagtgttaggtactctggaggcccacgcgggaggattggttgagccgattgcttgagcccgggagttcaagactgcagtgagctatgatggcgccactgcacctcagcctgggcaacagagaccctgtctctaaaacaaaacaaaacaaaaaagtccccggagtgtagtgaccacgcagaggtgaggactcaggggcgggtatggcagggccagagcccccatcacagcccctttctaggctgcatcccggagccaggcaggggctcagcctcctggccgcagttgaggaggcagttcagagaggaaactgctaagcaggtagctggaggtggcagagggtaccgggatgggacaggaacagagaagtccccatgggactgagcacccgatactccacctgggtccgcttctgtcggacacttcgccacctccggatcctgggcagccggatcccacagttcggccttctcctccacccaggagatgagcgccggcttgctgcctccgactcctgggggagaagaacgcaaaccccacgctgcgaggaggccgcctgcccggccccggggcccccaactccacacgcagctcccagaggcgcggcagggcctgtggaggcgcagggcccaggcaagcaggtggggctctcaccgagcgcgcccaggtggccgtaggtctcccgcatcacgtcccggtacagggccctctgcgcgggccgcaggcagccccactcctcccgggagaagtacacggccacgtcggcgaagctcacggccccgggctttctccactcggatcccgccccgtttgggtcccggggagggagcggggccagaggcggcgccatggggactgtcagccccagcgacggatcggtcatctcccctggccaggcctgggcatgcggaacctcccgcgcccgagaacacttccccggcccggtaccaagggaaggagggacgtcagtagagcccccgaaggcccactagaggggatggaaactaagggccgatggctgcgagtccatggtcagaactggacgatgtcttcaaataaaacggcggcagcgcgacctctcgacctttgcccctgcgcaattgtacccacgacgacgcccccctccccgcgcccccgctccaggcccagttctctccttgccctaatccaaaatggccgttgcggctacaggcgccggccttgaaaaccagccgcgcatgctccggccccgccaggtgaggcggcgcagctcagagcttccgcccgggtttgcgggaacaaagcagcgccctgcggaaggcagccctcgtgaactcagaagttagttttcgtctctggacctttttataatcggacttcagcccatcactgtctcgttttgtcctcagaaacggcgacagcagcctcttcccaatgttgagagcaaaaagtgtgaacccagaaattccgagacagatctcaattacttgccaaggttgaggacgcgcgcgtgacagcctcaggaagtcctcacgacatgtgcccaaggtggtctgggcatagcttagttttatacattttatggagacatgagacatcaataaatgtatgtaagaagtacattggttctgtttggaaaggcggggcaacttgaagcaaaggcaggaagacgtgaagcaggaagggggcttccaagaaacagaaggtgaggcacaaacggttgcattcttttgagattctgattagcgtttccaaaggaggcaatcagatatgcatctgtgtcagccagcaaaggggtgactttgaatagactgggaggcaggttggccctaagcaattcccagcttgactttttcctttagcgtagtgatttgggggggtcccaagatttattttcctttcacaaaagccatggagtggatacaggagaacctcctctattgtaggctttttggagcttgaaattctgggagcttctagatggcggaagcagcggggagaatagggtaaggctgagaaagtcagagggccctctcttctaggagcttctcccatgtgctgtgcaggacgcctcccgaccgcctgtctccctctagctgcagccaggctcttggcttccctgacgtcctgcccctgcgcggatggcccaaggctcctaggctcaaacccagctcatccctttcttaccccaacctgcttcccctggggtctttatctcagtaaaagtcgccagctctcccctgagacctccttctcacacttcctgatggcctactctgtgctccacgtgacttcatacatgtcctgtgtactggagtcagagtcacctccaacgcgccttttagctcttagtgggttctttagttgaatctaggcccagattgagaatcgcctgtaatcctggcgcctgggaggtcggggcaagaggattccttgagtccaagagaatgagatcagcctgctcaacttaggagaccctatctcaaaaataaataagaaaaaat

SEQ ID NO: 63212 - DNA, 1439 bp, Homo sapiens
tgcatctgggagccacgcaggggctcagcctcgtcgtcgcagttgagaaggcagttcagagaggaaactgctaagcaggtagctggaggtggcagagggtaccgggatgggacaggaacagagaagtccccatgggactgagcacccgatactccacctgggtccgtttgtgtctgacatttcgccacctccggatcctgggcagccggaccccacagttcggcctcctcctccacccaggagatgagagctggcttgttgcctccgattcctagggaagaagaacgcaaaccccacgctgcggggaggccacctgcccggccccggggcccccaacttcacgcgcagctcccagaggcgcggcagggcctgtgggggcgcagggctcaggcgagcaggtggggctctcaccgagagcgctcaggtggccgtaggtctcccgcatcacgtcccggtacagggccctctgcgctggccgcaagcagccccactcctcccggcagaagtacacggccacgtccgcgaagctcacagcccccggctccctccactcgggtccggccccgtttgggtcccggggagggagcggggccagaggcggcgccatggtaactgtcaaccccgacgacggatcggctgcctcccctggcctggcctgggcctgcggaacctcctgcgcccgagaaagcctccccggcccgggcccaagggaaggagggaggttactagggcccccgagggcgcactagagggcgtggaaactaacggtgccgatggcagcgggtgtataatcagaaatggaatatgccctcataaaaaatggcggcggcgcgggtactcgacctttgcccctacgcagtcgtgcccaagacaacgcccccggtatctccagtccgcgttctctccgtaccctcatccaaaatggccgcggtgactaatacagaggccggccttgaaaactagccgcgcatgtttagtccccggcccggcgaggcggtgcagcagagagctccgccccggcccggcgaggcggtgcagcagagagctccgccccggtttgcacgaacaaaagagcgcctcgcgggagtgagctggcctcccggccttactgaactcaggcattagttttcgtttgtggaccgttttataatcgggctccagctcatcactctctcgttttgtccttgttatctcagaaacagggcaacagcagtctcttcccaatgttgagtgtaaaaaaaccaatggagtgggcgtggcgcagtggctcacgcttgtaatcagcagtttgggaggccgaggccagcggaacaactgaggtcagaagttcgagaccagcctcaccaacatggtgaaaccccgtctccactaaaaacacacaaaaaaacagccaggtgtggtggcgtgcacctgtaatcccagctactggggaggctgag

SEQ ID NO: 63213 - DNA, 583 bp, Homo sapiens
attctttctatgaagcaagactcctttgctgtttcctctgcctgaaaatctcccccaacaccaattcataggctatgggaagcacagccatctcctcccaggaacatttcctggcatatcaccaaccagcctaggtgaggtggtgcctctgggcttcctctgtcatagcgccaattaatctcttcccacgtcgaacgtgggccctgactcagctgtatcactggagcccagcacaaaaacccacagaggcttcaggagggtgtttgctgaatgaatgaatgaatggggtcagctttcgtcatcgtggaattcccctattacctagcacagtcccttcaacagaaggcactcaacacacagtcactaagtgccaattgtaccttcttttttgtttttctttttgagacagagtctcactctgtcgcccaagttggagtgcagtggcgcaatcatgggtcactgcagcctcagtctccctggctcaagtgatcctcctgccatagcctctcaagtagctgagactacaggcacgcgccaccacacctggctgatttttgtttttgtagagatgggggcctcacta

SEQ ID NO: 63214 - DNA, 1752 bp, Homo sapiens
tatttatttatttatttttgagacggagtctcactctgtcacccaggctggagtgcctggttggactgggctcccagtcctcacaggaccgctgtcccatgttctgaaaactttgtaccaggtctgccttctttactcctctagtacccaacacagttgaatttctttagggatgctggaagtgggggcctgaaaagaaactctgctagacaggaagccctggaaaaccaagtggggggacccgggactatccctcacctctccgagctcctcccagtctttcccccttctcaggatcctgggcggcggggctccaagcctcactctcctgttccatccaagagatgagggctggtttggggcctgggaatcctgggagagaacagggatcacagcgcgggcctgagaggccatcgtgggaagatggcattcccctccaggctgagggcaccccctcggagcttatactcaacctggaaggggctgcagtgctgctgcctgaatgaaatggatgcgggtgaaaacactcccgagggggtacctgaagccctgggaacgggaggtggctgctggtgttggtgcaagagtgcgggattagggctcacagtcctctcggcccttctacatcatctcccctgtgaacccggtgaaggaggagggggctcggacccggggctctcaccgagcgcgcccaggtggccgtaggtctcctgcatcacgtcccggtacagagccctctgcgcgggccgcagacagccccactcctccggggagaagtacacggccacgtccgcgaagctcacagtcccgggcttcctgcaaccaggccgggtctccccgggcctcggcgccaggagcggggctgggggcggcgccatggggcctcgcagccccgatcggcggccgccaggtccctggagccgccgcctccccgctcccggcctcagctgtcgttgtccacaggaagggcggccccgcccagccgtggcgtccgaacgcagccgaggcaaccgaagtagcagggactggctgctagggattcgaggattctgatagggacaaatataattcctcagtgtttattcacttcatggccgcttggacatagacacccgggttaagggacccggaaggtgccttctgaaaatatggcgaccacccttcaattgtcacaggctgctcttaagggcgccattatttgaccatatcaaatatggagcctttctgacttctctggcctcatcgtcccacttgcccttaaataaagccgcttcggctgctttttctagtgggggaggcggggtgtctgggaagtagaggagaggcttcttgccttcaagaaagatgtaagggcccgaagcttcacttacccctctgtacccgcaatacgcaacggccgatgattggcgacgatcccggaagaagctgcgcggtgattggcctgggactggcggggcatttgaagggaccccgcggtcctgaagcctctgttgacagactggagcgcagcggagacctcggcatctgcggtgctcgggattgtgtcccctacggtctcttaccgtgcctcccgatggcgggagctggaatttggtccccagaccccttgggaagacgcgcacaccctggcaaaccatgtgtacacccgcggtagaagcaggtgcgtgttttacagtagcttagctgcggagtccacccagcccctggcatccgcagctcggctcgctcaggctctagaccgaagctgcaggc

SEQ ID NO: 63215 - DNA, 1846 bp, Homo sapiens
agaccttctgggaacaagcatttattctggtatcagggctgcaggaaaaacatttctcttcatttaaaaatctaattaatggtgttatttactacacgtggttcacatcattaatatccaagaggaacatctgtcttcattttatcccacaacaaaaatcaaattacaggtttcccctttcccttgacctcctaggaagctcaagctctattttgcattaaactgaggttttccagtatggttaatcggttccatagatcccaatttcgctgttccatcgggccattttgcagtgagatgaggacgtttctggggtagggtgcagggagacaggatgggactttggagggggcagcctgcgctgaggatgtgagtgagttgggggcgggggttggggcttctccacggctacttatccaaatgaagtacctgcttcctgtccttggcccctgctgaaagctgcagagctctcaccgtcgggatcctgggcctccgggctccacgcctccacttctccttccacccacgagataaaagcgggtttgggaactgaaaatcctgcgaaggagaaacaatgggctcggctgagcgcacgggaggggagaatgagactgctccctcggcgccccgcttccagcccactagcctctggggacaccgatcaccgcttcccaccgacggactgggggtcccggccggagggcccggcctcacccagcgcgcccaggtggccgaaggtctcccgcatcacgtcccggtacagggccctctgcgctggccgcaggcattcccactcctcgggagagaagtacacggccacgtccgcgaagctcacggcgcccggcctgctttccctcgtcctccggggcccggcctccccgggtacgtgggccgggcgcggcgccaggggcggccccatgggaaaccctttctgcctggcaaagggaggcttccggggaaggtggagatgctggcgctttcctgtctttcctcagacaagtccgtaagggactcctgcccttaaccaagatggaaccttcctggcgtcaacacccctcgcctttcctctctgcctttacacaccacgagggaaaccagcgggaagggtggccccgcaacaccactaaccgatagatggcgtacgttgattggacagtgccggaaggccaggagaagaaggaaggctgtgattgggcttttttttggagtggcctgtttgaaaggctgagggtgaaggagcgacagatctgaaaatagccggagctgaggggcctcagggtctaccctgactcgcttttcccggacggtctcctaggagagaggctgtggccagctgacgcgacttccttctgctactgaggtgagaagtcttagggcagatgcggatgtccagggcttcgaggtgagtaaaggtgaagcgcaaagccttaggcggcgtgcactgagtgggtaagggactgcagatcccagctttgagctctgagtactcctggcagtgccagcccgaggggcagcgggaacaggatcctacccaggatctaatttgacctttgccccgaggtcacagatgtcttcccttatagagatgcagaaggccaggcgcagagcccggattcaaagtcagctcctagccgggcgcgatggagcgcgccggtggtcccagctcctcgaggggctgaggcaggaagatcgcctgaactcgggaggtggaggctgctgtgagtcgagatcgcgcccccacactccaggctggcgacagagccaggcgcccatctctaaaaacaaacaaaagtcatcttctcgcttccgggttcggttaaggacttagggtagggccctgcacaaa

SEQ ID NO: 63216 - DNA, 1622 bp, Homo sapiens
catttatatatctgcaacccaataaacccctggtaccatgcagctcccccaaattcagtgcaaccaaagctgctgaaacaagtccagccccagaaggtgtagtggcactgtggtgttaccttatttttatatgacccttcaaaaaggacactgaaaacccagtgcctgtttgcagagatcatgtgtggaaattgaaaccctgtctttaaggaatgaccaaattcatgctacttaacctgaaaacttgggggcaaagtggttgtgattatctgaagggctgctatgtagatgaagtattaaacatgtcgtaggcaaggtttagaggagaatgtggtacttaaccttctatagatcccacaatgaaatgacctgccttgtgaggtagtgagctccctgtcaagagagattttcaagcaatgggtagaagaccacttggcaggagtgttgcaaaaagtgggctaaaccagatttttccaacctagtatggaggaagaggcagagtaggggaaggtcctgcccctatgagattctcctgattgcatgcaagatgacaggtaatccctgtgtggacagactagaaaagcagacagcccctaaaatagatggggagaacttttagccctgatatccacacaaactattttaggatagggtagcttggaaaactttaagcaaatgacgtcacctctcctaatgggactgttccagacacgcacagggaggcagccagcgcattgcaagatacaaagttcagctctgtgcagcaggagacccgggtttagttctgactctgccctgtatgacctggggctcctccttcccttttctgggaccctccataaaatgaaatgaacgtaggcagtccttccccttctaatgggcgttgcccctctgactggagcccccgatagcagatctagggctacagtttggggccttggggctacacttgtggacagccagagaccacctctggcggaagcaccggccacactcgaggcaggggaaaggcttctcccccgtgtgcagcagctggtgctgggccaggtggctccactgagcaaaacgcttggagcaaaggtcgcaggcatagggccgctcgcccgagtgcacgcgccggtggctggccagcagtgaggggtaggcaaagcggcgaccacagtcgtcgcaggcgtgcagcttctcctctgtgtgcgtgctgcgatggatggccagggagccgctccgccggaaggcacgcccacagtctgggcaggggtagggcttctctccggtgtgcaagagctggtgctggagcagcgtgctgcgctgggagaagcgggcctcacagtgctcgcaggcatagggacgctccccagagtgcacacgccggtgactgaccaggcgagaggaggaggagaagcgccgctcgcagtccgggcacgggtagggcttctcgcccgtgtggatgcgctggtggatgacgagggccgtgcgctggcggaagcggcggttgcactcgaggcaagtgtagggcttctctcccgtgtgtgtacgctggtggatggctagcagggaggggtaggcgaagcgacgtccacagctagggcactggtggggtttttcacctgtgtgtgtggtcc

SEQ ID NO: 63217 - DNA, 1770 bp, Homo sapiens
gaagtttaggatctctttggtccaactcaaaggtggctagaggcagagatcctggaaaggaggcagagggtagcacctgttaaaagctcactgattctggctggctgcaatggctcacgccagtaacccctgcattttgggaggccaaggcaggaggatcgcttgaggccagaagttcaagaccgaactgagcaagacaatgtttctacaaaaaaaaaaaaaaaaaaaaaagacgaagaataagcccactgattcattcacacagtggaaaactgcagcttgcagactgacataggaatctctgtgtggtggaccggccccacaccaccagacacaagaggctgggaagatgaatatactaaatacgcggcacccacccctagcccaaccaaaactctggacagagccgttagaggtagaacgttataggagggctgcaggctctgcgtggttatttagcactcacttctctggactgttagccctctcgggtactcctgcggatctagagcagccggttcccagtcatcggtgtttcgttccaaccaggagatgagggctggtttgggacctgcgcaccctggggaaagagaacaaatcagaaggccagctcctagatcacgccgagtagtatctccccgacggcacctcctgctaagcccctgcccacctcccctgacaacctggtcgcctgccaggaccgtggcctccctgcctacaccctctccggctcctgcatcccttcgcgccccgcggcagcggatggggccggcctcaccgagcgcgcccaggtgaccgtaggtctcccgcatcacgtcccggtacagggccctctgcgcgggccgcaggcagccccactcctccggggagaagtacacggccacgtccacgaacttcagagccctcggcctcctgccccttttccgactgggtctggcctttcctggtccctgcgcagggagcggagccgaaggtggcgccatgggacccgagaagccggcgccacggccttccgtgtccaggcctcggccctcgggcgctggcggcccctgggatcgaggagcccctgccggaccagggctgagcgtggccggggaggcccggagggaatcggaattggtcgcccgcggggctaacggaaaccttttgctgttattcaggaaactcctgcccgaacttgggtgaaaggcaccggaagatgccttcggggaaaatggcggcgctgctaccgcaccgcctttgcctggaacacaggcagcttccagctatcgattttattgaccggagcgccatgccggcttcctaacctctttgccctcaagtgtaatggcgctgcgattgggcttcacgccgtcttttttcccctccccaatacgcgcgttcattggacgagagccgaagatcgagcgttctgattgggtgctagcaaaggcggtccgtttgaacgaagccaagagctgcataagggcaggaagctggactgctaggatcaggcgactacaaggagttgtgaagcgacttgcaccgacctgggggcagcaagaggccccggggctgctttccgctgttcgactctggcaggctcagccaatcactgaaggagggaacgatttgagcgatggagccactctggccgagttagagctgagattatcctgagttccttttactggtgttctcagagcatccttgactttggagaatggttatcttctttgtttgccctttaggggagggaattatggttagcatttcctgggggcaggcgcc

SEQ ID NO: 63218 - DNA, 2081 bp, Homo sapiens
cgggatttcgccatgttggccaggctggtctcgaactcctgacttcaggtgatccacctgccttcacctcccaaagtgctgggattacaggcgtgagctgctgcgcctggtgtgtttgagtttatactgggtagggagtcatggttaacgcctataatctcacccagagtctgagatgggaggctccgttgagtcctggagttcgaaaccccgtcactacaaaaaaatatatataaagaaaaaaaaattaagcgggcgcggtgtggcacctgtggtcccagcaactcgggaggctgaggtgggaggatcacttgagccagggaagtcgaggctgcagtgagccaagatcacgccgctgcattctagaatgggcgacagcctaaaaaaagtcagccttaacaataacaaaaaagacaatggctagggcccctcccaacctttcatgccctacccggagcccctgcgcggcccttacatttaaaagcccctttgggaggctgaggttggcggatcactggaagtcaggggttcaagaccagcctggccaatatggtgaaatcccgtctctacttaaaatacaaaaattagcctggcgtggtggcgggagcctgtaatcgcagttaccctggaggctgaggcaggagaattgcttgaacccgagagacggaagttgcactgagccgagatcgcgccactgcactccagcctgggtgacagggcgagacaacgtctcaaaaaaaaaaaaaaaaagccctaaaggaccactcttggatctgatcctgagaaagtcccttagaaaacatggcgacgccagcctcaccacctgtttccaaaagcagtgtgacgcccttcgctcccttagtcaagctaatcttactaaataaggaacaagcttcccctgaggcttgcccttcagcgcactggcactgcccacccgaacgggcgtcacggatcctggtcagtctctaggatcgcgctcgctgataggacgcttctggtcgaacgtccaaacaaggtgtgcggtgattgggccgcggagggcggggcgtttgaacggcgcgtgcgtgggagttccccaggccggcgtcattaggatcctggtgggcggtgggacttgggttcaaagaagaccaagcaggcagacgtgttcgggggcccgcgggttccgagactggagactggacctttggctgtccccacgtgcattctaggtcaacggtgcggtggcagaaccctggggctctcccccgcggaactcggccctggccgaggccccaaccacgctagtaggaggaggccgagcatccctcctcgaaatcgcgaaatcccggcccgacaatgtagccacggagtcgaaagccgcgtgcgaacttggcactcacaaagcctagataaccgtctattttctcctgtaaaataggagggatggacccccacagatcattgtaaaaggttcttacaaagaaaaatcctcctggactgggcacggtggctcacgcctgtaatcccagcactttgagcggatcacacttcgagaccaacctgaccaacatggagaaaccccgtctctactaaattagccgggcgtagtggcgcatgcctgtaatcccagctactctggaggctgaggcaggagaatcgctttaacccgggaggcagaggttgtggtgagccgagatcgcgccattgcactccagcctgggcaacaagagcggaattctgtctcaaaaaaaaaaaagagagaaaagaaaaatcctggaagtcaagtaaaaatgtgtgaaggtgttttataaaatatgaaatatctagaatacacaaatctatagaaggactcggggaaaggggagtgaatgctaataaatacagaggttctttctggggtgatgaaaatgtactagtactgattgtggccgcgctagcacaaaaatccgtttcattggccagacgctatggcccagggaaaaaaagaaggactagggggaatggggagtgaatgctaatgaatatgcagtttctttttgtggtcatgaaagtgcactaaaattttcatgctagcacaaaaattgaattgtacacttcaa

SEQ ID NO: 63219 - DNA, 2513 bp, Homo sapiens
agtactggtttggaccagggaatctggggaaggagaactagtgcagacatgggctttggttaagcggtcagggcaccttcatagcgctgcaagaagccactacatgcccacttcctccccaccaacagcccagcttccagtaaagggtccatgacgcagctcctccaagcagcagcgtcccaccctgatcccttactcctcaggactatttacacctcccccatcctgcgggccccacttgagacagtggttcctgagagccgggccccactagcaagccaaggtatattcttggcctcctgcaaagatgcccctgtcctatagacctctgcgcggaccgtgggcacccccacttctccaggaagaagtaggtgggcaacactcaggggaagtcaagcttagcgcccccagtctcctccccacttcggctcggtcccatctctccaggacaaggcgccagcaacggagccacaggccgcaccagcccgtctttgatcccgggtgttcggactcagggcctccaccaccccctcctaaactcggaccctgggccgtgggaacccagtttaggaacccaggaagatgccggaaccttcctcaaacgaggccactctaggaaattgggaatttcacatatcgttagcactcagtcgacgtttattggcctaagaacgaaagaaccggaagatgcccttaaaaagcgtggcggcactctagcttcaatcggttgcctcaacatatcaagaaacctggcattgtatatggccctcaaaagatgacgccacccggtccaccacggttcaacgaggactaagacatctgccctcaaccatcatggcggcgccactcagtttggcttcctgcccctagggatgatggccgccaggtggcttcacttagtttctcaccaccccggaagacggggaccggcgattgggcggtgtccagaggctccgagaagaaggccatcggcggttgggcagcgttgggtaagcttggtttttaaaggagccggaggtgggagctgcggaagacccgggatccacgggaggcggcggtgagcagcccttgggggagggcaaggagtggctggagagagggcgggagtgggggcggggaaggaaacttctgaaccatctggtcccgggccgggggagaccgctgggcggggacgcgaggagggaaggggcgtctgtgggcgggacctcccgggattggagtgaagagggtatctgcttgacagtggatccctggggatctacgctgagttcggagatgctccagctcgggccgcccctgtctgagcggagctttgcggcgctgaagcttacaggggaaggaaaagcctcgcccggcgtctgattggcggaaccgcgctgtaggattctttcctcagggatccagtctaggggatctggtgggatggagggtcgtcgatgtatggagtattgctttggagtcctcggccactcgctgggagaggaggaggatcgcagagggatccagcggaaatagcctcccaggaccgggatccccgtggatcccgggggatctcggggcataatctgcagggacaaaggcctcgggaggctcgggccgcgggagaactggggccgctgcattctgggttctggcggcaggtgccaggcagggcgcgagtgatccgctgatcgaggcggtggcagcgggaggacacccgctccgggcgaccggccgggggcgccctttcgcgccccagggctgcggccgctgggctacggggagccgcgggcggaccatgaagggcggagccccagggaaggggccggccctcaccccccgctcccccgctccccccttaccccaggccgcagcctgggattccccagggacccccccggagccgccgcgtctcccatggacttgcccggggactccaggtgagagcgtacccgggcggcccgcctgtcttgaccccgggagatggggatcctggcgaccgtgccgggaaactacagagccagcgacaggttcgggcgaccgtcctctgcttctttcaccctccagcccgcctggccagccgcgtctgtgccgccagcctctgactcgagcattatggggagccaggagcccgaaacggccgaggctgcagctcccgggggccccttctcccctggaaaaggcctctcggcgggtcctggccgtggtgctagaagatgtcatggctgttcacatggtgagccccctgaaccaagagactctctattcccccatgactttcctcactaccaaactcgggccagatccctactgaggataactgaagtccaaatccatcattgttgtactcagccctcaggcagcctccctcatggtagagtcctgcttggctcccacttactccaacctagaattgggcagtgcccattccacccaccaacgattttgggctggaaccacatccctgtaactctgagaaactcttctgcttctttttttctatcttttttttttttttagagacagggtcttgc

SEQ ID NO: 63220 - DNA, 3916 bp, Homo sapiens
ggattacaggcatgagccaccatgcccggcctagagatactctcttgcttagaggattctcctgtgtggagggacacttctgaatcagtgccagatgatactgtgaccctagaccgtggtctgggttctcccaattcatttatatcaaggagactgaaaggcctatagtgggtcaaggccttgaagatcaagatggccctgaattcctgctaacatgcaggccaggacctgctgctggattcaagagctacggctaggccaggtgcggtggcttacgcctgtaatcccagcgctttgggaggccgaggcaggtggatcacaggagcctaggagttcgagaccagcttggccaacatggtgaaaccccgtctccactaaaaatacaaatattagctgggtgtcttggtgtgtacctgtaatcccagctactcaggaggctgagccaggagaattcacttgaacccgagaggcagaggttgtaatgagctgagatcgcaccactgcactccagcttagggaacacagccagactctgtcccccccaaaaaaacaaaacaaaacaaagagctaagagtaatgggccataatgaagcactcacgacgactgtcataggtgcttgacctgcacatgtccctgcgacagggaattagtcattttatggacgagaaagcaaggcaggcatgtcagcgcgctgtccacttttaaaacggtaacccgggcaaccgaaggccagaaatggctgtctctttttttttaagccagtcacattgagcagtggggtgcatctttcataactgagaggcatcacagggcagtggctgacatagacgtggctaggagactaccagcccgtctgtgcgcgcattcctttccgtcccagtaaaatggggctgacagcatctccttcatggaattattaccaaacgcagtcacaaacgcggagaagcgctcatgcaggtgcaaggcgttttcgaattgctagcactcgggaccgctgccagcagccgcgcctggaagggacgcggctgcctgttagtgcggccggcgcaggcgcaggcacagcacgcggccgctcgggccaccccgggccgcggaacgactcgcaagcagccagcctgacggcggcgccgccacgcgcgtgcgcgagacgccaggctgtctgtgggccgcgccgagcggcggaaaggcggcgatgacttaactggctgtggaacggaacctcttgcagccgcgcgccccccggcggccaaccgcccccaacgcctcaggccccgcgtctccgcccctcgcctcgacgccatcaggagaccggccaataaacaaacagcaggaagaggcggggccctgtagtaaccgccccaaacacctacttctaaccagtcgagtcacaagactggggggaagggcggagccaatccgacgtaacccaatccaagatttgagggcggttacatgcacccactccctcgggtttggctccgcccctcaccttgacgtagccctcccagcctatcaacgactgcgcccgttgggggtgaggggaagggggcggagcgtgggaggaggccgagagaggaaggaggcgtaggctgaggaggaagagggaggaggggtagggaagtcctggcggagaagcgccctaagactccaaaggagacaacaggagtttgtgctggagctcccccgctgcccatcggccgttccggatcccctaaggcccaagtcggacagagacggaggaaaggaggaagagacttttatgtcggcggacaggggagctgtacccgtcaccgttgcctcacatccggggctttggagggctggcctcgctgccccgccccgcctcgcgcctttcatggcgaccggaggcggaggctggaggagctgggcccggaggaggcccctttaaatctccttaaaggggtggccactgaactcggcggactgcaacgccagccttaaaggggaagccgccgagcagacgctgacaaattgagaactgtgccgttgggagaactggggcgagtggggtttttctttacgtcctcctcccccacacacaagaagtcttttaaattcaacttaaaggggaagtggccgcttgtggaggactagaaactaactccgagcccttaaagggacggcctgctgttagaaggaccctggactccttaaaggggtggcctctttgagccggaggacttgagacacttttaaaggggaggtctgcgtttcggggcgagctttcggccccttttaaaggggtggcccttcctcttcctcggggagacttgcatcgacccctggcagggggtggccaccgcactaggccgccggacactgtcgggtcgtcttaaaggggccgggagctggacaacttggggcctcgccttaaagggacggccgccccgttttcgccgtcgcggccccgccgagcccgcagggggggccctcgggcttgtcgccccgggggcggcgccggctccccgggccgtggccttggggcaagctcggggccagcagatccggctttaaaggagaagccgtggccctctcgtcactgtgcagccgccagcgccgcgcctgcgaccccgggcctgcggacaggccgcttcgggccccgccgcctccggatgcggcgctgagggcggtcgccatggagacggcagcggccgcggccccgggtccgggctgggcagcagagggggagcgccgacggcggcgctgctcgcgccgagaccgagaccgggagcagcggcgccgccgaggtccaggcggcgacgcgccccgggccctgttggccgccccgcgcggctcctcgtcctcgtcgtcgccgccgccgcccgccaggccttggtcgtcagcttcgtctggagagcggcctgggggcccgagacgccggcggccccgtccgagacctcgacccccgcgaccccgagctcggaagcggcctgccggctcgggcagccgcggggaggaagaggaggaggaggaggaggaggggggcgcagacgacggcgaagccgaggaggagcctgaggaggaggaagaggaggaggaggacttgatcgatggcttcgccatcgccagcttcgccaccctcgaggccttgcaggtggggcctaatggggctaggagactttgggggtttccgaggggcagcaaggagggggcagtgcccctagtgggtggagttgaggggggaatgctggcaccccaaaccagagcaaccggctcctctggccaggcctctgccccgccctggggtgggaggaggtagagctcgtctctggggacccggtttcccggcccgaggggtacttcggcaacctggtcacccctagaggggttgggagcttgcccttttccatctatctcagccccacctcctcctccacagaaggatgcatctcttcagcccccagagcgactggaacatcggctgaagcattctgggaagcggaaaagggggggctccagtggggccaccggggagccaggggacagctctgatcgagagcctggccggccccctggggatcgggcccgaaaatggcccaataagcggagaagaaaagaggtgaggttgtcccttaaaactctttaggcagaatgtatttcccacagccccgtttttcatcagcaacgccactgccccttgtaaacagagaccccagtttctaagggcaaagaggcaagcagggcaaatttgagcccttactcatccgggtctgacgaaggcctgtctacagtcaggtgcacctccttttgcctggttctgtgtctacttcaaacgttttgataattcagagaggcgtcaaaggaatatagttgggtcgtaaattaattgtggttcctgcccttcctcgaggtggtggcagtccagcagaaaagaaatagccagcaagcaaacac

SEQ ID NO: 63221 - DNA, 2678 bp, Homo sapiens
gtctagaaaagatgggcatcatccacttttctttcaacccaaacttcatctgtaaaatgggaccaacaatcctcttcgcagggaagagctaaactgaatggaggaaggggagcttcatcagggcttcctaacctggcctcttagcgggggctttaggtggtaaaattttatgacagcgagtgcattcttgtggcttagactgcttggctaggaatcttgacttcaggatctgtcactgtgttttaacgcctgagcctcaattcgtttgtaaaatggagcagttaggattaaaagaaataatcaaggcaccaagtagtgtcagtagaaggtagctgttatttattgttctattctggggtaaaggtatcagattctcaaagggattcttaatctagaaagtttgcgaagagatggcaaaggtgtttgaaagctatcaggaaaccatcctcgcgtaaaacgaagcagcgctacagaagtgggctgccatgggaatcgggaggcccaggttccactgctaacttgctgcagcttactgggtgatctgtaaataaaaagggaggtggcggtggtccgagctggcagccgcaatgcagccccaggtagatctaggggcaaacggtaaaggcgctccgaggaagggcgagcgcgcagcctctgggagactacacctcccaggctgccttgcgcaccgtgctgcaccctacgctagcacgcgagcctccccgttcccccaccctccagttactgtctctcgcgagaagacgggccgcgccggcgatagcgattccgagcgagtggtggtggtagtggtggtggtggcggccgagacggcggcggccattttggtgaggcctcgggagcggcagcggcggttcgctgggagtagcgtctgccctttttcccacccaccgtccgcatctgtgtgctgcgcgaagaggcagtggaggcaaggcggtggcagtagccgcagtctccaggggagtttaaaggccgcgaaggcggtggccaagagggggccctcccccctcctaggcgggagggggggtggtgcgcacgcccccgaggacgcaggtaaggagagggagacaagatggcgaacgccccacagttccccctcccatgacggctgactgcgcgcgcatctttccgccaccgcctcccccccaccttcccggggtgctgcgcgcgcaccctcagccggggccccggggccggtgcgcgaggctgtcggcgcgcgcccatagagacagactgagggggtcaggccggccggcgctgggccccggcgtgtctcctctcccttcccgcccttctgcgcacgcgtgcctgagcgagcgagcgagcgagcgagccctgagaggacggacccaggtgcgctcctgcccgcccaccaacccagtcacccctcaggggcgcgcgggaagaggaaggggggcgtgggacgagtagtcggggcgcgcgcccaccacatctagccgggggaccaggacctggtggcacgaaccctcccttctctcagcctttcgcggtcgggtgatgggggggctccctgacgggcttggatgacgagcttcccagccccgcgacccttgtgtgcgtgggctcgggttctggcgggagcccctgggccgtgcgcgcagccggctcgctccgcctccagccgcgcacgcgcgggcccctcccccgcccggcgcgcacgttgggtggggtgggagtctggagggggcggggctatctcagggctagtggcaacttgggcagaggtcaggggtcacgcgaggtcagtccgtcgggagggctagggagatggtcacgaaacctgaagtcaagagttaaggcttgttggcttctggtgagctcgggtcttgggaacgtgtggcggagtagggagtgaatcaaagccggcactgtggtttaggaatttccttaaacactggggaagcatttccgggcctcctgcgggttcacactgcctgtttccggcgcgtggttcttggcagtgcggcctctcgcttttgactgctcctgagtctccttttgctgtggttcttgtatttggggaagtgtctcaaggcgcaggtatgggatatacagcgccctgccctgaatcctgggcggattttcctgtgaccagcctgtttgttgactcttcccgggagttccactctcacttctgcgttcagccctcactggaaaggcccgcaggcaggtagcacctttctgaggttctggatgtgacagcttttttttgctgtattttttttttgtcttccattctgtggttggagcctttacacttaaaatttttgaactttctttcttcactcctttcctgctcctgcccccaggcaggatcgtatgtccctccggaattcacaaaacatgatttgcatttccctgaaatgtgagattttcctactactgtagtttttctgtttctagtcttttaactgatttgggtatatttaaacgtctcaaaaaactggagtaaataatacgctttgatggatgtttcaggtgtgattcccttcagtacggcggcaccgtggaagtgcagactttcacagggggtgtggtctcagctcacacaggtgagggatctgctaccattttgtgtgctgatgctaatgggagaaatgtttgagataaagcaattataggtccgtattggggatttt

SEQ ID NO: 63222 - DNA, 547 bp, Homo sapiens
gcagccagagacgcctgctcctgacaggaactcccttgcagaacagcctcatggagctgtggtccttgatgcactttttgatgccccatgtcttccagtctcatcgcgagttcaaggagtggttctctaatcccctaactggcatgattgagggcagccaagagtataatgaaggtctagtcaaacgcctccacaaggtagggcctgcaacagtttgtcagggtattgggaatggtaaggaaccattcctgagcacctgggcagtgcccaggaaacccttggggagagggaagtcagtgccaggctaaactcctttgtcaagctgcagtgttctagtgactaacccattgccagattgagtgacctcatcttagtcatcaattctgtttttttttttttttgagactgagtcttgctttgtcgcccaggctggagtgcagtgttgcaatatccattcactgcaaactccgccttctgggttcacaccattctcctgcctcagcctcccgagtagccaggactacaggcacccgccacaaagcctggc

SEQ ID NO: 63223 - DNA, 2445 bp, Homo sapiens
gagggaagattggtgaatttgatgtggtagggtgcctttccccagtcagtttgaagtcacagatatccttttcctctcatttcttttccctcggttcctagacgttcctcggagctctttgatgcctcagacctttcccttttatccctcttgctcaggtgcttcctttcacaactttttccagagggcaggcgtcctagctccagttgctccatcccttgggccctcccctgctcttcatctagccaaactggtttgagtcagccacaccccttcccagctccctgggctcttcacgtggtggctggccactcaaccccacccctgggcttggcttggagccctgagtcagctccatcaccacccaagccaaaccaaagctgaggcaggagccgaaactcagagtccttcaaggcctatagccaggtaagagccctgttcatttttacattctctgttcactccctgggccctccttgtgtcctcctgttgactctgtgcttacctcatctgagttatttctttgtatctacttccctgcagcttcttggcacacatcattctttgctctctacttgtctcgcccctttcacctttcctatccttcgttacttgggttcagggagccaaggtggtttcattttgtctgggttgtaggggaatggttggagataagggtagaaaggtggtttgatgccagggcctagaggacctgagaagtagggagacaagaaatgattaagtagggcatcattttgcaggtttctgtgtggtaatgaggtcatttagactcagtgtactagtctgattgtgttatgtggcctgggttaaattggagagaggaggtggcagggaggcagcatagcagaggaagccctgacttagggaagtaaagtctttctgatgtttggttttagtggtaataaagggcttacttgggtacattttccttacctttctccattcccataactgttttcatgtaaaatggctgctttgcttgaaacgggttgcagtacctagggtcctgctctctgacatctataatactcagggggcagcctcttgggaatttgggggaattgtagagtcctttgaaatacagattaaaataacagattcatagcagctttcaagagtttgtatttttcctccttctcggtgtgcacctgtcatttggcttcttcccacttgttgaaacactaaataatacagataatgccttgtctacactggcttgctttcaaagactcagaacctcaagcttaggtaaaaggattccagccacacatttcctctcctgctctgtgagtcactagaggaattccccagtaaggcaacattcctgagtgccaggctaggccatgagaacagaatgctctgagaggggtggagtctgagcaagcaaggccaagggctctgttgttgggctcacaagtaccttgactatcgcccacaggtgatggaggacgaggagaaggcagtggagatcttgggcaacacggaagctgctcatcctccatcccccatccgctgctgctggctccgcctccgctgcttggcagctactagcattatctgtggctgctcttgcctgggagtcatggctctggtgtttgccatcaaggtgaggagtgcaattcccatgggaatgggggtgggtataaggcaatggtttcatgtatctgatctatctacattgaccagtcactgaatacctatcagtgctctgggcctagtgccagaaataagaataagacagggttccttgtcgtcagaggacccataatctaatgaaagaggtgacagtgaaaatgggtaattaatagaatgcagttcatcagtaccgtaatacaggaagcacaggacagtgtgggagccagggaagatctatgtatgtaattatatatgtgtatatggtagaataggtgactggaaaggcatcctaggagaggtgacaggattaatcttaaagggtgagtgagtaagtgtggaagggcattccagataaaaggagcagtgtgtacaaaggcctgtggagcatgactggaccagtgaggaatagtgagagatgaagctagaggacccagattcccaagggcctccagttctgtgcttaagagttttgactttatcttgaaagtactggggaggcattgaatggctcctgcaggggaaagtgacatggtcagatttgagttttaggaagatccactctcaaggcctacatcgagggtgaattggagggggcaaggctggaggccgctgaacggtgatgagcgcaatctctaggagtctgaaagacacttgggtttttgagagggcttcaccatttcaaaaagcctattagaaacagcacatgtccgccgggcgtggtgacttaggcctgtaatcccagcactttgggaggccgaggtgggcagatcacgaggttaggagatcgag

SEQ ID NO: 63224 - DNA, 907 bp, Homo sapiens
ccagagctgagagaggagtgaaagagttgggtaacagcaacaaccatcctgtacatggagatttgagtgattaaaatggattttcatatcttttatcttggacctcataatatttcaaattttttttaaaattatgaagtatatcatacatataggaaaatacccaaaacaagtatacagttcattaacacaaagcaaacgtgaataaccacattcagtaaagaaattggaacactgtcaacacttcaaagcctcctttatactcctcccaatcactgctacttcctttcttcccacaggtaaccaccattctgacttctagcagtgtcatttaattttgtctgcatttgaactttatataaatggaatcatgtattcttttcatgttaacattgtgagattcgtcaatatttggaataggtgtagttttcattgctgtgtagtattcagtcatatgaatgtatcacaatttgtccatttactgttggtggactttgggatgtttgcagtttggggttattatgagtcatgccttttggagtacgtctgtcctggcaagcaccttaccataattcagagtccagaagagcacctaaaggaactggagatgttgcacactgaagagactagaggggaaggagaggcacatgatggctgtcctcagtgttcccaaatgctccaggaagaaggaagagaatagattggtggtctcagaagttagaattgaaacagtgggtagaagataaatatacagggcagtgttctcaacatagcttcacagtggaaccacctggaagctttaaaaagtagttaggcctgggctttatccagactacattctgacttaatcggtgtgaggtacagccttggcatcaggatttctcagtttcccaattaattgtagtac

SEQ ID NO: 63225 - DNA, 1605 bp, Homo sapiens
caaagtgtcatttctaagatagctgtagggagataagttaattcttttcctctttggctggaacataacctccacagggtaggggtgtgtgtgttgtttcattgctctcagtctagttcctaggtcttagacggtcataaaaatttgttagtgaatgccaggtttgagctatgcactgagtcactcctggcagaatctaacaacctggtgggtttagaacagagtgtgatacaaggcttttgggagagggtggaagattgagaaagtgtgtaaatcccagatagtaaacgctagggctttggatgtatttaggaggagttgaagcggacacagaaaaggcttcctctggcattttaagtccgaactaagaggccaagctggagtccaagctgcgtgtgtccaaatgttttaagggctggagtgtactcaggacaggcgctttgggccaggctgctaatattgaaaagagcttgctgggcgttgtggctcaagcctgtaatcccagcattttgggaggctgaggcgggaggatcgcttgagccccgaagttcaaggctgcagtgagctatgatcgcgccactacactgcagcctcagcgtgggctacagagcgagaccctgtctgaaaaaagagaaaatgctgaattcagttagggatgcttggaggagaccgagggaaccctgctcaagtctgggaactagaggcgcgggaaggtcctgcttccccgccacccagagatcacgtttcccagtaaacccaacttccgggtcccattccaggcctccaagcccacgtgacaacaagctccgccctctgctgtcccgcagatgccactcggtgattggccgcgtctgaagccgcgccccggcgtcgcgttgcagccttaggtccagccgagcgccgactcacgccccagccccaattgggcggccggtttccaattggaagggcttctgagcctcagtcttcgggcggcgctgaccattggcgggcaggatggaggcggagccttgggttgtcgcccgccgccgggggttaaggtgagcgactgcaggcaaacccggcgacagcgcagctcgcgtcgaccctggctcctctgcctgccccctcaggtgagcctgcgctagacccccgtccccttcctgcgcccgcccgaatgcgcctgcgcggcaacagccgcctgcccttgcgccccttccccctgcctcctgggcacatctccccactcccctccctgccctgccatcctcccgcccccaggctcttctgcggggtctccccagtccgggtccttcccccacccccccccaccccccaggaccctggcgccccagctgcaagggctgcgcccccgggagccgccatgcgggtcgtctcagagcctgtgggcctccctgccctcactgccctcctcctccgcgcaggcccccgcctccttcaggatgacgctggacgtggggccggaggatgagctgcccgactgggccgccgccaaagagttttaccagaagtacgaccctaaggacgtcatcggcaggtaaggccgcggccagggaaacggaggtccaaagaggtcgagccccagcattcccgcttccgtttgaa

SEQ ID NO: 63226 - DNA, 1628 bp, Homo sapiens
aaccctgctttcatcctggtggccttaactacagtggaggtggaacttcccaggaggggaagggacagaccagccccagccgctgggccaacttccaatcattccagctagaagagcttccccctgacaccctgtgactgagcctgtgtcctgtctgcctgcccagccatgctccatcggctgtgagggcagtgcccggagaggccagagggttggagctgcagggacccgtttggacccacagcctctgttctagagatgcttgtataggctgttaattgtgatgaataaacgttcaaccctcggcctgcagccagagtagccaggccgcgcaccccaaatgtagtcccccgattttagctgcagcagctgagcagcactttgctggcttggtgtgagcctgggagggctcagacttaacggccggcagggatcccggactgggcctgaaggggagagcgtggtggtcgtcgcggagccgcctgtcctgctcccaccgaccccggtctgaccacgtccttggctgtcatggccgggggatgccgggactcctcgggctgcatcctgggaagtgtagttcctggtccgcacatggttaggaggttctcggagagagagctagtttcccggttgcgctggccaaaggccggcctgaactggatcctgcggaccgcttctcagcggcttcacccccacaccactcgaatgcacagatcgggacacctcagctgggtgacttccctcgttgcaatcggcctcgggagcggtgcggcgtgtaccgagcggcgcccctgggctcagcgcgctgcaggcgccccgggcggatccttcaccgaggcaggactggggctggcgccagagccggtgcggagcggtgttggttcaggcgctggcgacagtgctatggccacggcaggggccgcgtgcgtctcagcggtggcgccttcggaccctattggcgcccgggacttaagcggggccgccgctgctggaccaggacgaactggagaaggagacgcgggccgccacggtgacctcgggcgtagggccggcggcggcgggcacgctggtggaagcgcgggccgcggcaggggaggacatcgggccgcagagaaagtgccgatggcctggggcagcggtgcgagggtgggaaaaacgcaggatattgcatcatagagacgcggccaccttcgcccctggagagcgccagtctcaggagcgccgcaccggtcacgggtggaggtcagccaggcctccgtaagcgcggtccccttccaggagtagccttcgcctgggctcttgagtagatgccaagtaattccgcatcgtctctctagatatctgcgctaaaggccacccggtctccttatcagaggggcaaaactctcctcgtgggtcttcatacctaataaaagtcggcatcaaaccactttttcaaggtcaagtccaagggaacggggtgaagatcccacaatgtcagtgaggcagcaaccactgatgtggtggcaggaaccaaaccttttttttttttttttttttttgagacggagtctcactctgtctcccaggctggagtgcagtggcacgatctcggctcactgcaacctctacttcccgggttcaagcga

SEQ ID NO: 63227 - DNA, 1801 bp, Homo sapiens
gccacactgggggctgcctgatgtccggtccgggaaggatgccctgctgtgtttgctcgggacaggtaagagtttgtggacctcgatggtctccaaaaaattctcccctagtggtccagagtaggagggaaagggttaatgacagggccgacacagagcatggacgtgggaagaccgagggaggccgaggcgctgggagcccaggcgccaggcacgccagcctgagacctcgcgatggccccactgcagagggagggaatgaggagccgcctcccgagagatgtggggaacggcccagggtgaccctgacatggaggcggcgggaatgcggccgcccggcccggcccccccaccgcttggctccggacttctgctcccccggagccgcgacccccgtcccgctgctgatacagagcctgggcatccgcccctgccccggcccccggggtcccggctccttccagcactgccaggctcctccagggctgcgctggcagcgctggtccccggccccggccgatccctcttcccagaatccccaggctcccctcccccgccaccgacccccgcgcttcccagaatcctcggccctccgcgccccccgcccgcccccaccccggccacagccccgggcgcgggtggggggctcaggcccgggctcccggcccccgcctcccgggccccattgttccccggcggccgtcccgggcactccaggccaccccccgggaacccaggcgtccccaactcacggctctggggtctgggaaaagccggaaggcggaatccagccccaggggacttaaccccttcagtgccctgcctcgggggacggactgggcgccgaggactctggggtccttctcaaggggtgattccaggctgaggacccggggaccagttcagggtgactgggacggagcaggaagtgaccccagcttcccgggcccctctagcctggagtcagagcatcagctctatgggatttaaccctttgcctcccgcagcctggggaaaaaaggggacagcggtgggagcagggaggaggctgggacgacgcccctgtccccgtctccagtgggagcaggcagcgtgggcatctgggagagccccgatgcccgcgagggtccctgggcttctggccgctcttcatttcgcaggggctccgccggccgcgcccggaaagccctatctcagatttggcggctgctgatcccctgaggccagtctttgtttggactaaccctgggatggggctggggtgggagcaggggctggcagagcagacctgagagggaacaccctacgcactaaacatggccttaatgcttgatggaagtcatggctgcaggagttgggactgcaggaacaagcacagccgggaaggatttgcaatagcctgtgttccagcccctcttctccaaacacctcccctcagaggaggaaactgaggctcacggtggcaggaaagaagccagtgggggttccctggccaaggagggagaacctcttttctcatagctcagagggcacccggctcacagcagaagaaacctttaaaaacccaggaacactggtggcctctcaacgtccaagttatctatgctcgcaatttttacagcctttctttcttgtcttccttatcacagtcccatgggataaggttgcccatcatccccatttcaccggggaggaaaccaaggtgtgagaagcgactggtgtacttaaggccacctgattctttcagttcaacacactgcattattattcctgggcactgtggttaacactggggtgggca

SEQ ID NO: 63228 - DNA, 2082 bp, Homo sapiens
ccacgcctggcctaacccgtttcttaatccataaaatgggaataatattaacattcccttcacagaattgccctgaggttatagagataaggtgtgtaaggaacctagcacacagaaggctctcagtaaatagcagttattactatcatttttatcatgtttcttattctcatgtctcaaacgtgaccctccaccaaaagttcttttatagcagagtataaataatggaaaaaaatgatatatagcttttttgtttcccctccagacagtgtctcactgtcacccaggctgcaatgcagtggcgtgatcatagctcactgcagcctcaagcctctgggctcacgctatcctcccgccttggcctcccagtgctgggatcacaggcgcgcgccaccacgcggggtccagcctctcttctgagtgctgcacatgcattaattcatggaatccttacagcaaccccttgcaaggaagaaagctgtgactcagagaggttgaataacttgtccgaggagctcagccatgaggcggatcggggatggaaacccaggccgtgggccctgcgcggttacaggcattcaatcctccaaatgtccccagagtgactagcggccatcattcggcccttctcaggaggaaagcgagcgaacacctcacgcggcgacggcctcccggagctgaaggggttattcccactgagacgcggtcgcctccgctcctagagaggcccacggagggcgccgcacttccggcctgggtccagctttggctccggctcccgctcctgacctgctgcttcccgggctggcgtccgggccggcgtccgggcccaggcgaccggggcctccgagctcagaggcagtgccgaggaccgaaggaggggaagggattccccaaaggcatccctgactcccgaattccagcaagggagaatcaggcgctggggaggcaaggagagggccgcggctctcctcgggggccgcggggcgcgactcttccaggacctcggctgcttttcccagtaaagcccaggcggcccgaggctggccgagggagcgaccctctcctgcctcttctggaagggccgcttccccgccctgctgtagaccccgagctccctgggggaaggacccgctccttccatcctccaccctcccgagcaccagcctgggaaggaggggatcccagttcctccttagaggcgactcctttatcaagtctgatttagacatgggctcgtccaaggtcgttcagcagcgagtagcggagctggggctgcaccgaggagctcaggccccactccgtgttgcggtcaagaccagattttggggtcagcttctcaaactcagcactaccagcaccaaactaaactacctggcccctcctcccgagagagggttcattctcaatcaaatcggaacctcagtttttctctcctgctttccgtccgcttccctcgtcctcccttgaccatacttttatgcttcatcttttccatccaacccgtctttccagccctccctcagccgtactgccgcaaacctgtgtcgttgcaacaacctgcaaccttgcctgcctctcccttttatttcacgtgaaactccactacaaggagtccccaaatccttgcctcaggccacccctcgttccaaaaataccttttagtgatttactcactgcctgtgagttcaagtcaaaactcagcttggcattcaagacgatttgaaacctggctcaagcccacctctcaagaggatttgaaacctggctcaagcctacctctctaacctgatctatcttggttccctaagtagaggtcacagattggcagatgcaactgggaaatgtgtttcaactggcaaagagtgtttcttttctttttctttttcttttttttattggagccaatggccaggcgcgatggctaaagcctgttatcccagcactttgggaggctgaggcaggcggatcacttgaggtcaggagctcgagaccagcctggccaaatgacgaaacttcatctctactaaaaatacaaaaattagctgggcatggtggcttatgcctgtaattctagcactt

SEQ ID NO: 63229 - DNA, 989 bp, Homo sapiens
gtggtgcatgcctataattccagctactcaggaggctgaggcaggagaatcgcttgaacccatgaggtggaggttgcagtgagctgagatcgcaccactgcaatccaccctgggcgacagagcgagactcagtctcaaaaaaaaagaaaagaaggtgaaggtggctaaatagcataacatgtcagagatttacgtgtcagagatttaacatgtcagagatttccacatgttatcaagtctgtttcatggctaagaactggaagggacctttgaggacatctaaccctcataggacttaacaataggatgaggaaacaagctcagaaataggctataacttgcccaaggccactcagagagggaatgccagagccagggccagctctcaacttcaggccagagaagcccagggtcttccatgagaaatagggcctgtcagactggacaggctccttggaggtggtccagtgagtccaatccctttttttgctgcggcttagacgaggggccgctgaggattctccgaattcgctggatctggacccagacttccgggtccacagtgcagcctgaatgatcaacaggggaacgtgcgttcgccagggtccccgggggcagaggcacctctccctgggcggggccggggagattacgcaacacgggtcttagttgtctgggccgctggggtcgcctccacgggcaggagccacggccaggacgtgcaggccgccccctgctggtccgtttcggaaccgggcgggtggccgcggcgctgcccgggttgggggcatggctttacaacggtgagccaatcccaggccgcaccgtggatggggcgggcgttcacttctcctcccagtcctttggttctctccgcggcggaagctgtgcggcgacctagcaaccgtccttgccgaccctcccgccggtgacgtggctgcgacccacccttcttgccatagccctttggaaagcgaaggtcccttcag

SEQ ID NO: 63230 - DNA, 1218 bp, Homo sapiens
gtctcaaaaaaaaaaaaaaaaaaaaaaaaaagggaaaaaacaaacaaactagcagccttacaaatactaatttgctccaagaaagatactgtatctgggaacagcagctacaattggagtcaccatctgataaagtttatgatagtccacagtcattctccgagatccatctgacttctgcacaggccacactggtgggttaaatgagcatgtgataggtgtcatcacccttgcttcttttaattttttgatggtggcattaatctctgtgcttccctcaggaatgtggtatttctactggcttcttttctctgtagggaggggaagttccaggggctttcacttaggccttcctgtcatattgaccttcagtctatgagtcagagagcctatgtggggattctggcactatgtcagttttcaatcagttgtctcagctctaaatgtcaccctccagtacctgctctaagataacgggctggacttctaatacatttctccttgcaaagaacatgatgttatgctttgtcagtagagggcgctggtgggacattgcaagaagaaggggaagctcttcctggttctggtcctgttgaggtttcatttttcttgctcttgctgcagtttttcaggggcagatcccagtggttctctgccctagatgcatgtccagagtgaaaagtccttgggaggctcaaagaccccagtttgcaacactttaccacgttccctcccccaatatggacaccacaaatcccataccacatgccgcctttgctgtgagtggctcctggcacttggatagtttttgcacacccaccactggtcctgacctttattggctttctctagcactgaactctggcagagcacgcttctccagtacttggcttctgtagcagtctagctttctccagcactgtgctctcaccaagcgcactttatctaacaggtagaaagcatggctttctctgccacttggttcctgtatgggtagagcttcctcaggcactgggctctcgctgagtctgcatgctctcgtgcttgactcctctaatagcctgactctctacagtgcttgatccttgcactggcaaagctctttccagcaatgggctcctgcagagtgagtttcctacagttcttggttccaacagtgcttggtggaatagcagcttcacctgataccccagagggcagatttctaggaggtctcat

SEQ ID NO: 63231 - DNA, 2359 bp, Homo sapiens
agccactgagcccagcctaaattcaattattaaactccttgagttaattaaagggtagccaggtgcggtggctcatgcctgtaatcccagcactttcagaggccgaggcaggaggatcgcttgagcccaggagttccagaccagcctggacaacatagcgagatcctgactctacaaaaaacagaaaaattagccgggcgtggtggcgcgtgtttgtagtcccagacactcctgaggttgaggtgggaggatcacctgagccctcgggaggtcgaagctgcagtgagcggagatcgcaccgctgcactccagcctgggggacagtgaggcggtctcaaaacaaaacaaaaacaaaaggggagggcggggggaagacttaaagacccctgagccagggccattattatttaacttggtcgggtctctgaaccattcggaggaagcttgggtttctatccttcccgactgagccacagacctgagtcttgactccggataaatcaccccagactgtttttctgtctgtgacacgggaacggcagcttctgcctcgcgaggtggagagagaatgagaagcgccgtgtgtggcgcgcctgacacggtcagctcgcgggtggaggcccggagcagaacgccctcgggcgcccgctcttgcagccgcactggagaccgggaatggctccggccacgcctctgccgactgcggcaacgcgagggacagctggtctccggggttgcagcgtaacgccctccttcccggcctcatctttcctgactgcataacgggcatacagtgggttccatggcgcaagggagctgaagaagccgcccgcccccagctcgcccgggatcctcacgcccctataacgccccgaggggccacgatgctgcccacagcccagatcgcgagtgcggaccctgcgggagggtctggcctagatgcgagtttcccgccgcagaccaggcgaggccacgcgacatatcccctacccgcttactgcaggccgcagacggagacagtgcagccctgcgcactgctgaggttgcccgaggtctcagcctcggcgggtcgggaacacgcggcgcgcgcccgcgccccaaccggaagtccgccaccggccgctctagcacgcgcagggctgcgtctgtggccttaacccttcccaaggctgcgccgccggcctttgtctccgcggagcgtcacaaaggttggaagggtcgcggggcctctgggtgccgagctgcagatgcctccactgcgagcacagccctgagacaagggcccaggcgcccagcggggctggtttcactcagtccagccgcacctacccgtgccctcaccagatcttaagatacagacattaaaacctccaccgggccgcggcacaggacagcagttttactttctgtttttggcattgcattgcctccatttcctagagtgcacgtaataaataccgctggtgattccaaaatataaaggttgaaaatatttactttacaaaaatttggttcccatactgcttttaaggccatcctctgcacttggttcccgctgctcctgatgtggttgaaagatggatgaccccaaagacgaggaaaagattattggctccattttttagatgcggcagccagctaaggtctagacaggggaagggacttgccccaaatcacagttagagcaaatcagtctgaatcaggaataactccattcctatcccgcatcctgccctttcactacgccacagctgcctggctgcctggaggaacaaaggagggccgggcaagaacgccattaccaactgcaaatccacaggcaaatgcaagaggacagaaagtaagttcttgggctctgcccttgtgccgtacccggaggggttctggggtcaccagccaggtgcatccctgccttcacagccatgcacagcgacacccagttaactaatgggggggattatgccacttgctgggtatgcctgtgccaccagtgcactcactctgtgcctggggaaataaccacggatgaatctggggatcccctgggcccactgtgaaatggacctgagctaaaactccattgatcacaggacctcagggatcttttgggtctcgagaacagaattggatgctacaggagaaatgtaaccagaaaaggattaggattttgccagtagagaaagggagatgtgcttgctttcattcatttatcattaatgagcacctactgtatgccaggcaccacactaggccctaggaagacagagattatgagacagatgtggccttattctagcaggggaagtgagatgaaggaggtgagaaagaggaagtatagtgactaaccagggacctgacc

SEQ ID NO: 63232 - DNA, 1354 bp, Homo sapiens
tctccctgtgggagggtggggggctgggtcagagaggcctgaggggagacccacccccctaggagctggacacatctgggggtacctgcagaggttgaggaggcacaggaggatagcaacagttttgctaatggggcatagttacatggaggaagagagtcctgcaaaccccagggcataggcggtgggtgcctctagagagaggatatgatttggggccctggctctgcggacccctggggcacacatggggggcgtggctatgggcctggcccgggatcagagccctgcagatcctggggcgcacctgcaggaggggtgtcaaagctttagggggcggggcacaagagggggctcccgctctgggaggacacggctggggatcacgctttgtagacccccaggagtagccaggcgaacggggacagagccctgtggatccagggcaaagctagtgggtggagatacaccgaacacccggggcccagagctggcgagggcagcgtagacgcctttggtgctggtggtcccgctgtgtcccgtccctggcccccgagcagcgctcaccatctccggaccttctcgatggtcgccatcaccttcttgatgtcatccttggcccggctccgggtctcggcccgtacagtccggccggccatgctggcggggctggggccggggccgagcccgcggcggggccgcctcccgtccggcgggctcaggctccgcgccaggcccgggcgccgcgctctcggcctgccgtcccccctggagttggccgcgccctctctcgtccccaacgcctccgcaagtccccgccccgtttcctgccgccgcgccccgccccggcctgtccccggagcggcccggtggcgcgggcggccagagcccaggcctggaagcccggccggccccgccccgacccgggcccgcccccttggagcgcctggacgctcagcgccccctgcccgccgccgagagcgggagttggggacggacgcgcgagttggggacggagagcgggagttgcgaccggacgcgcgaggcagggccgaggccgtgtgttcagaccacgtgggcgcggggtgcgcgacagggtctgtgtcctgcgctgcgtgagccgcggtgggtgtccgcgaaacgctgtgtgtggagtgcgtgcgtgtgtccgccctcgccaggctgttggtctacaccgcccaacttactcagtcatccattcattcaacagtcttgttaactgagtgccaattacgctccaggcgctgcgaatacgagtgggtctccaccaccagaatggctaaagtgaaaaagaccgcaccgtgtggaggcgagaaagtagagcgactggacc

SEQ ID NO: 63233 - DNA, 1375 bp, Homo sapiens
caggctggagggcagtggtgccatcatagctcattgaagccttgacctcctgggctcaagcaatcctcccacctcagcctcagcctccggaacagctggaactacagacatgcgccaccacactcgctatttttttttttttttttttttttagagctgtggtcttgctgtgttgcctaggctggtctcgaacccctgggctcaagtgattatctcaccttggcctcccaaagtgctgacctaaactggcccagtctgggtccagtttagggaggaagaaacaggcattggtgtcaagcgcatgccactttgttttgccttaaacagagcagctctgttaggagggattatcatctgcaagatgaggaaactgacacccccagagagcgggttggagagcccagttaacagccccctgcccgtgctccggggccccgctgacccgccggccgtgtctccgcaggtgcagctccagggagaccccttcgggctgcccagcttctcgccgccgcggctgccggtggccggcctgagcgccccggctccgagccacgcggggctgccagtgcacgagcggctgcggctggacgcggcggcgctggccgcgctgcccccgctgctggacgcagtgtgtcgccgccaggccgagctgaacccgcgcgcgccgcgcctgctgcgccgcctggaggacgcggcgcgccaggcccgggccctgggcgccgccgtggaggccttgctggccgcgctgggcgccgccaaccgcgggccccgggccgagccccccgccgccaccgcctcagccgcctccgccaccggggtcttccccgccaaggtgctggggctccgcgtttgcggcctctaccgcgagtggctgagccgcaccgagggcgacctgggccagctgctgcccgggggctcggcctgagcgccgcggggcagctcgccccgcctcctcccgctgggttccgtctctccttccgcttctttgtctttctctgccgctgtcggtgtctgtctgtctgctcttagctgtctccattgcctcggccttctttgctttttgtgggggagaggggaggggacgggcagggtctctgtcgcccaggctggggtgcagtggcgcgatcccagcactgcagcctcaacctcctgggctcaagccatccttccgcctcagcttccccagcagctgggactacaggcacgcgccaccacagccggctaattttttatttaattttttgtagagacgaggtttcgccatgttgcccaggctggtcttgaactccggggctcaagcgatcctcccgcttcagcctccctaagtgctgggattgcaggcgtgagccactttcccagcctctctttgctttgc

SEQ ID NO: 63234 - DNA, 2831 bp, Homo sapiens
aacacacacaaaaaaaaccaaaaaacggcagaaagatgagaagccgttccatttgcataggcagttgaagtgtctaggcagaggcctccaaggctgactggatatcaggcaggggatgaggctggacagcctgcaatgcctccaactccaggttgcggaaatcgtgtttgtagtacctcagtcgaatggagattgagcgccccctgggagcagtgctcggtaacagacgctggaggaccccgatgaggaggggcgggggtcggttcaatctgggaggagcctgcgggtcagttttcttctcacaggagcgaactctgtccggcatcatggattcctgggctcccagaacggctgggctggaagggaccttagaaagggatctaccaccgcgtgccccgtgccagagttgggcactttggtgacaagaacattggcttgtttaacactcacaactgtgcttcgaggtggggatcattatccccattgtccccattttgcagatgagaaaaagcaaggtttggtggcttcccggggcggggcggggattcgctgtgactccaggtccttttccccggagcccgcacgtcttgtaagacactgattcccggaggtctgaggagcaggaatcgagtgggaggtgcccaggctttctagggaacaagagtgtgaatgcactctcgacgagaaccacgcccccctgttcgacaagactgattcctgctgccttcctttaagggccctcccctgaaacgcgaagtcctcgccccatggagaggcggacattctttattcccggatcgcccgacgtttttctcccccacccgcactgatccccactggtgacataaatccttcccctccactcgcgagtgaaagcttgggactacatttcccgccaggctgttcagaagccggtggcggagagaggagaaaagagtctttccgtttccgtcgcctcgcaatttggcgtgtccgccgggattcacatttcaacagcgacgtcctttctctgttggactcggcaaggaactacatttcccagcaggcaccggcgcagaggtcgaggggcgaggtcgccatctttttcgtagtcctctccctcatttccgcagggaagaggccagacgcctggactacacatcccatgtcgcagtcgccccggccctgcagccgccatctttgccggtggccccgccccatccccttccattgtctcgacttgagatgatagacgggagccgggagactgcaactcccgtcaggccgtgcgccactggtgggggggatttcgagaccacaggcgggcgaggtgcccaaggtggtggaaagcggagaccgggagaggctaggtagcctgccatctttacggtagtctcctcgtcctcctggttccgccattcttaaggaacactggaaggctataaaactactaatcccatcgcacctcgtaagatcgactactagtcaggtgtatgtccctcttccgccatcttgcttgtagtcctctttccttttcacctttccattgttcctgacgagtagaaatggcagcgggaaggcagcagatggactgcgactcccgtcaggtaccacacacgcggagggttgtggacaggagggcgtgtgagtgcctgggaaggaggtcgggtcgggggagaaggccatcttgtttgtagtcatcgttccctctccttctcgatgttctgcaactgggagcctcggggcaacgggactctaactcccggcatcctcggctcccggctgggcacgccctccgccgtcctgtttgtagttcccgctgtccccagcgtcctattgttcccccgtagcatcagtggccgcaggactacaactcccgtcgagccctgcgtgcgttcgtcctggaaagtggaggtggtggaggaaggagggggaagggggcggggttcctctgggagaaggagggagtaaagagggggaggaggaggaggaggagggaaggaggagggaggggaggggaggggggaagagaggaggaaggaggaaggagctgaggagggatgagagaggcggccagggccccgggccgtagcagcgcggggctgggggaccaggggggctgagacaccccaactgcccccttcccctttccctctccccctctatcctttccttccaccctcccgcttgaggagggggatttattcaaattttatttaaatccctatctcccgagggtcgcgcgcttgggggagggggagaggtcgggggtgcgcgcgggctggggggggcggggccggagcagcttccttcacctccccctccgctcgcctcgcagccgtagggcagggggtcgcagtccaggggcgggcccaggggaggggggcaggttacagcgacccccccctccccgggaaccggcggtgggcgggcttgaaccccggaaacggtggggggggcccaggcctggcactggacccctgggcagtggggtccgggaaggggccagttaaagggccaggggcgctggggagaggcggggcggggtggggggaggggagctgggactcggacccgggactgagtgggccccgggcagaagctgagcaccctgcgcccaaggagcccccgttggcctgggggggctgagggactgagcctcccagagcaggacctccccctggaagggccgcgccgcagcccgtgggagggcctcgcccccggcgccccccatctccactcgccgccgtcccggcctccgccggagggaggggccgagcgccctcggggggccgtggaccccggcgttctgagcgttccgcgccccgcgccgcccggcccccccgccgccg

SEQ ID NO: 63235 - DNA, 2918 bp, Homo sapiens
atggaaacttgtatcccatttgcccagggaactgccactcctggttgccatggaaatagcagccaacggacacctcccgatgccagtgctaaggctggaaatggccccctcttagttgccatgggaacctagtaacagactctgctggccctccttccctgccccttcctcgagcgcggggtggggcttcgggaccccggggatgagccgggccaggtcccgcccctccgcgcaggcctccggggggccggggcttaccatgtaggggaggggagatctatccacatacctcaggtaacagggaggtgcgcgggtggggggagggctgggcggaccaaaggccggaggggtggggcctggggatagcgagaggcttgagaatggggccgcttgggggagggaagaggcagcccggcgaggggcaagcgggggacccagccgggctgggcccctgggccccgggtctgtacaatacggtttgctataaaactcaaaatcttccagccggggctgcggagttcgtgtgtgtatctgcggggtccctacctacagatgagtgggctcacctctcctggactcattttgggagggatttggaagtgtggacacctggggtgtccagctgtaccttggagggggctggggttggcgtgcacctcggtggggtccgggcgcttggataacgttcttggtgggtaggggtcgcggggaatctctgcgggcccgggactgcggggacttggtccccggctccaccccatcatgtggctagccccggctccgcctctgtcccagttcctgttttggcctccgctgtcccgctccggctcctggggctccccgcagacgctgcttttcttgctccactgggggtgcctcttcctgggcgcccgccgcctgcatcctgctcgtcctgtctgggaatggggccgcccccgggcttgggccggcccggctggggcccccgaggcgcttccgccccgtagtgaccgcctggtgccgccccccccccaggatgaagggcggcgagggggacgcgggcgagcaggccccgctgaaccctgagggcgagagccctgcaggctcggccacgtaccgggagttcgtgcaccgcggctacctggacctcatgggggccagtcagcactcgctgcgggcgctcagctggcgccgcctctacctcagccgggccaagctcaaagcttccagccgcacgtctgccttgctctcgggcttcgccatggtgaggggccgggaggggtcacacccggtggggcagagcaagtggggggcacaggtcggggggggggcgaagtaaacaggtcccaagggagacaggttaaagggggctttcgtcaaagggggaaggaacaaggtcccgcgggactgagcaagtcccttcttacggatgtgtgtgtacaggggaccccaggagacggggccaccggaggacacgaaagtcctaaaggtgtcgtagtgggagtggggtgaacaaatcgctggtggggttgactgcaacagtgaggcagagtggtccagatggagcctgtacctggcagaagtggttcctaagtcccagtgccagcttcaaaggcaggtcagctgggtgggggctgcatcaacaggtggggggctcgagatggattagctgggtggaagggtcacccagctgaaggtgggcccgtcccagggaaggtggccactctccagcgggcccaaggggtgctagtgtcaaccaggaaaactgacaagagatcatgcccgggagggaaccgctggggaaggaggctgatgaggaaactgataagcgagtctcaagctgataaaccccaggtgcaggaggacggtgttggctaacggtctgccccagcagtggcctcacaggaagtgggatggagggaggtcccagggtgaggatcagcagacacagtcctggctcctccctgcttgtggccagctgtgtgaccctggacaggcctccaccccgcttgcaagccagtgggaaactgagatcatggagggtgcgccctctgtagccagccaagtaaccgccccagggtgagccaggcatgtcagagcaggtcacgtaccaaggatggctcagactagcctgctaattggacaggtgtggaaagtaaaagccttgcctctgggcaggagcgaatgaactgggacccagggttgctgctctgttagtctggggttgccccaccatcaccccaggaaaaaggagaaagtgagctgcaggaggtactttggggaacgcactcctgtgggggtggatatcagaggcggttggggtggggaccatggcgctaggggatctgggctagtccctgccctgtctgtgccacaacctccatatttgaacaatgacagggaaactctctaaccctaagggtcatcataagcctatggtcttctatgtggggtcccagaatccacagaccagcttacctttcatgatgggggcatcacctagggacaggatgttggctccccttcatctgcacagcctgcagagggaagggagcagccacccaagctgagggaggtcaaccccatggtccagcctgttcccaaggagacaatccctccacggcagaatatgcaggtgcaggttgctggggtgacagcttaagggcccgagccttctctgcaggaggaaggggctggaggtttaggttccgggggcaggactggccgcagtcctagcaggggtgaccgaggctgggccaggctctgggagaaaccaggactaagcctggcccagatccctgtctgtggaaaacacctcctgacacctgccatggcccaatttcccaaaatactcagccctgttttcctacctccacccgccagcctctacacctaccttcttctttccccaggcccagagcaatcgaatggaccctaca

SEQ ID NO: 63236 - DNA, 2374 bp, Homo sapiens
atttccctcaaaattgtagagtcctaatcttcttctatcttgtggtgtgagaccttggataagtctcccttccaccttttcctattacttaaaatggtgaatttgcataaaccaggctctaagggtcttttctgcactgttcggatgtgtacaaattgacatccaagtttaaaggaagactctgaaacttaggtcaatgacttgcccaaggccatatagcgagggcctgatgtacacatatcaggagcttggggcatcctcagctcaggaaaagggacctcctgggagtgcctgcgcccacacgggatcaaaacggtgcccagccttcagaaacctcagcccgagttccaggggtaggcctgggccgctgctgcccttgtgcggaggcatcccgtgagcatagggcgccatagccaaagaagcgggcagtgggaccatgacgccaggaggacacaccagtccagtcccgttcctgtaggacctcgtttattattacaaggcccatttaagggcacttaggccccactaggctcatcagaaaaccttgaggcggtccctggatttaaccactaatggtgggtttgagtacggcaaagtagggcaccttctacaggcctcactctccccatctggcaaatgggcatcctaagcagccagacacccaagggcaataacgggaaggaaaggtaccctgcatttatgtgcgaggcggggcaaaccgcctgagtcaccgctcacggttgtgtttttccacctcccggccgtccctcccatccgggtgagtcctcgtgggtcctcccggaggcgccccctagtcccaggctctgcacgccctggccccgccccttgactcggccccgcccacagcggaatccgcagattcgccaggtcggatcctcagaattcctcgggtccctcgatactcggctgaaaattctcatcggactctgagaggagcgctgggctggaggcattttccccagggacagaagcgggctattctctcacttgggccagtaagaaaaatccaaaaaaagttgtcgactctgccagcagggattggctaacgggccgttattttcttgactccaccaaggcggatgaaggggaggctacggctgaggccgggaacagtggcgaatctgcagcctctcagaatttggcagtgcaaggaagggacggggaagagaagcaaagcggcgcgcatcctgtccagcgattcgccccgcccgcccggtgaatctgcgtctgcagaacgcgccactgaaggttccccagcgctggctggcctcctcccctccgccccgccccttttcctcagggactagtcgcagctttcgtcgccgccgattcgtcaaggtcccgggccgcagcatctagatcgtcgtggcgaagccgactctccgggggatgcggccaatctccaagctccctgggccgcaacttccgagcctcccagggcgccggccgaggcgaagccgctaccctcggccccgtgggtcccccggcagcgcctgtggcgaaagtgcgaatgcagaccctgtgcccgctgggcctcgcgcaggtggcagtggtgtttggtgcgcgcgccggggaggtggtggtgggggggcgccgccgccgccaccgctgcggggccgggtctcgcgctgccgctgccgccgcctcgcgccgctgaggtgccgcgcgaggtggggggagggggagccgctcgccgggagcgggtgagtggggccgcgcggcgcgcgtgcgcggagacctgctggggggggtgcagaacgcgccggggcgggaggagagggcagcggtgcacgttccccccacccccccgcccggattcggggtcgaagccgggtctcgggctcggtctcgcggtgtttccaacgccccgaagaggtgccacctttcggccggaggatcggggcgcggggaggagagcgggtgtgtgggagccgtggccgggctcggcccgggccgctggccggtgaggaggcgggagggggcggggcctgcagggggcgggggaggggtcttgctccgaggccaagtggggcgcgcgctagggagagcgggaaggtaagggggctcgagacgggcctgggggcctgacagtagagttgggaggtggaaagaggctgggttgttgtggcgaaacagagggtacttgggggagaatccgggggagccccgggtcagggtgagggttggaaactggagtgatgggagaacctggaatcggggctagccaatgaggaaaggcaggggagtcaggccccaagtcctgatccttcttgcgtgtccctcttcccctaacagtgtaaatgagcaaagatggatcaggaaggtgggggagatgggcagaaggccccgagct

SEQ ID NO: 63237 - DNA, 2287 bp, Homo sapiens
gccttcaggcaagagcccagacctgcagagacagtccgagactgtctcggaccccctgacaggctgcagcagccgcacccgcaccaggaataccccaccagtgcccgccagggtggtgccaaggtcaggcctccccttcctacaatcacagctgcagctggacctccggcctcctgggaagcccagcaggagggaaggcctgaggtcacactgtgggatgaggtcaccgctggctccacccacagccccagaccccttcagcccactctgcaagttcgagcttcatccccaccaagttctccgctggacccagatgccagtggagcacagagcggccgccagggggcgccttggggcaagagtggtgggggttgtggctgggcgggtctctgttcctggaatggggcaggagggagaaggaggagccagcggaaggacggtgtgcgggccggccagccctggacgaaagaagagggcccctccaggccagtctgggcaccctgggatagcggctgcaggtaggcagaggcgctgccagtgcccaggtggcctttccctccatccggcccttcccaccttcctataaccttccctccacctccctcaactcctggcctccccacccttttactgccttcaaatctctctccctaaaccctgaccccttcctgcaccccaagcccgcccctctctccgtaactcagccatcagcaggggcagacggcaggtggcctggttgctgcagctcccaggatcagctctgccctccccgcaaacgccagcctcgtcaccgctccagggcacctccagcagtaacaggtggttgcagcaggtggcagccagcccctggatgagccaaggtctcttccccagccaggcatggccgactctgcacaggcccagaagctggtgtacctggtcacagggggctgtggcttcctgggagagcacgtggtgcgaatgctgctgcagcgggagccccggctcggggagctgcgggtctttgaccaacacctgggtccctggctggaggagctgaagacaggttcttgttgggggagcttgtggtggagagggtgtggacgcttccccaacccttcccaagctgggatccccacccctgcagtggaacagatgatgctggtttctgtccacatggatgggtcgagtgagtcacattgggaacgtgactccagggtggaagatgaacccagcctctggcctctggccccagctctgacatggcctgtgtcctccaaccccggccagggcctgtgagggtgactgccatccagggggacgtgacccaggcccatgaggtggcagcagctgtggccggagcccatgtggtcatccacacggctgggctggtagacgtgtttggcagggccagtcccaagaccatccatgaggtcaacgtgcagggtgaggagctctggacactcctggccatcttgcctgtttgttccccactctgtctttggccttgacctccggtgactcccctgggacaagttgtcctattgacagccctgcccccgcctcccctgacctgtcatggttttccctggacctgggatggggaggaggaagatgcagagagggaagaagctgcagcttggatacgcctcctcctctgccaggtacccggaacgtgatcgaggcttgtgtgcagaccggaacacggttcctggtctacaccagcagcatggaagttgtggggcctaacaccaaaggtcaccccttctacaggtgagtggcaggccctcttgtcctctaagagcccatttccctcagcattgagtcttccttctcctcccaccaggggcaacgaagacaccccatacgaagcagtgcacaggcacccctatccttgcagcaaggccctggccgagtggctggtcctggaggccaacgggaggaaggtgagcccagaaaaaggaggcgcagagatggggctcctgccctgcacacccccttaccctgccagcccaaggaggccggggccgagagcaagctgtcgggtcccaggtctcagcagtacctgcctttgccaccaggtccgtggggggctgcccctggtgacgtgtgcccttcgtcccacgggcatctacggtgaaggccaccagatcatgagggacttctaccgccagggcctgcgcctgggaggttggctcttccgggccatcccggcctctgtggagcatggccgggtctatgtgggtgaggactgggctaggcagggggaggctgagaatatggcaggaggacttgctctagaaggggg

SEQ ID NO: 63238 - DNA, 5545 bp, Homo sapiens
attagctgggcatggtggcgcctgtggtcccagctactcaggaaactgaggcagaaggattgcctgaccccaggaggtcgaggctgcagtgagctatgattgcttcacttcactccaacatgggccacagagtgagaccatgctgaaaaaaaaaaaaaaagaaagccagtggggaagagaccgtgacccacagtcagatatgcctcctctccacaaacacccagcctcagccaggtgactcacttcccaaattactcactgttcttaccacattgagccactcctctgctctacagcctgccatggctccccactacccaaggctccacaccttcccttcagcagtcaaggcccagactccctctcccctcatctcctgctcatcctatgaccattctataagccgaaatcatacaatggctgtttggacagtgttcagtctccccgtcttttttttttttttttttttggtttttgttctttgttgagacaagttcttgctctgtcacctaggctggagtgcagtggtgctatcatagctcactgcggccttgacctcctgtactcaggcaatccttccaccttagcctcccgagtagctgggaccacaggcacacgccaccatgcctggctaattaaagcaggtttcaccatagaactgatttgcctacattaaaagaaattgttttttaaatcaaaaaaacattttttttgtagagatgggggtctcactttgttgcccgggctggtctacgaactcctgggctcaagccctccatcctccttggcctcccaaaatgctgggattacagatgtgagccaccacaccgggctgctcaatgcgttttcaacaaagatcagttctccaaataacaatgagctgaaaacttttaagacagtcatagcgcatcctttaaacctggtctagaacccttaaccagagtcattttgccaccagaaacagaaacggagacaggagtgggcaggccggggcaaaagtccactgagagaaacaagaactaggttcggggaaagcccatcctttctttcttttttttttttttaagagacagagtgtcagtctgttgcccaggccggagtgcagtggcaagatctcggctcactgcaacctccgcctcccaggttcaagtgatcctcctgcctcagccccctagtagctgggattacaggcacgtgccaccatgcccggctaatttttgtatttttaatagagacagagttttgccatgttggccaggctggtctcgaactcctgacctcaggtgatctacctgccttggcctcccaaagtgctgggattacaggcatgagccactgggcccggccagcccatcctttcatatgtaaaaggacaagggcagcacaggggacaaaacctaagcaaaactaaaacttgttttaaaaaaaatattcaaaatgtaggcaaattaggctggattcggtggttcacgtctgtaatcccagcactttgggaggctgaggcaggcagattattcgagcccagaagtttgagaccagcctgggcaacagaggaagaccccccatctctacaaaaaaaggtttttttaggccgagtggtgggcgcctgtaatcccagctactcgggaggctggggcaggagaatcgcttgaacacaggaggcggaggttgcagtgagctgaaatctcgccactgtactccagcatgggtgacaagagcaaaactccgtcttgaagaaaaaaaaaagaaaaaaagttttttttaattaaaaaaaatttcttttaatgtaggcaaatcagttctctggtgaaacgacttgcttcagtagcagagtatgtcgtgtatcctagggctcgagagttctgactctgaaactagacaggattcaagtcctggccctctccctcgctctgagatcttgccaagtgatttcatctctctgggccagttttcctcatctgtgaaatggggtttcctcgaaggggatgtgtgagtattaaatgagttggtgggtgaatgtgaagatggaaagtgcttagaacagtgcctggcacacgaacgactccgtcatctgatgggggtgccttcctgctccgctcccatggaattccccagttcccggctcaggcttcccgctgctcatttttccagggtggacttaggaccttagttcaacctgaacttagggaggggaggcaaaaattttccaaaagcagagcccgccccacccgcggctcacgtcatctgtgaagatggccagcttcccgctctccagcatgtcttccagttcttcgttggtggtggtccttccagctgcgggaagaaaggactccctgctcgggggctgggacagcctgggggcctgaggtggggtgatggggcggggacctggggcccaccctcccacgccgccttaagccaggggccccctccagagaggaaatgcctggaagggggcttgggcagcctcaaggagttcggggtcctggggtggggggcacacgcactgatctccagttgccgctggatccggtccttgcagcggtcccggtacttggactgggtcgcgttatattcggtcattacctccacgaacttccgggacagtgtggagtgctacggtgggggtggggggacagacggatcagggaggtagtcagggatcagggagggagtcagggagcagagaccgaggcaggtgaggaggcagtgcatgggcggaataaggaggaagcgctgaattagtttacggtcccttcttcagctctggccgcgatcccaaaccctgacaagttcatggttccctacccgcccggcacccccatcttaggccaacaccagctagagacactgctactgcgctgagatgcggctcgaccccgccctccccgagagccccgcccagggccccgcccgctctagcctcgcccccagagccccgccccagccctccctgaccacgcccccgccggtgcttggccctggcccgccggcctccagcctgggctcctcccgagctgggtcccgacccgacccccaatgggctgccgcctcctacctgggtcttgcggatgcgcaggtccgcggaggaacggttcagcccctcctcctgttcaatgctttgctcgatcgctgcgggagagagggcgcagcgatgggcgggagacccggggcacatggggcgagggtccggggcgtacgaatggtcaacaccccgcggcagcgccaggcccggggagaaacgtcatccccagggcgagttgcgggcagcggtgccccagggtggtgttaggagccagcagataaacagacgaacagacgtttgagggggttccgaaggcaggcaggaagggatactgagggtcagagggtcaccagacagaagggggctatttgttctagtggcagaactgggtcttggaaagtcccatcagtggtaattcctgtccaactccatgagggcgtgccggcccagcccgcgtgaaggggccatgtatgtggggtgctccctacttcctacagcctctggacagggggcaagaacacagcctgccttttttctgatggaaggcagtcacctccaggtggatcaggttctagtggcccctctttcccaggggaattcaagggcaaacacatggatattccaagggagaaagcagccctctccctgccctgtaaggtgatccccgatccgggaattcccacttctgaaggacgttctggaaaagtgcacagattaactgagattcctgcttctggatcaagcactcctgacactatcgttccgattttctaaaaaagagattgtggcaaaatctacctcggtgagatcagaaaatgcagcagggatgaatcaccggccctctcagacctcaccagcctccaggccattcctaagagcctcactcctccgttctgttggcagtgggggaggtacggggccggatggcaccccaaggctcccccgattgagtgacagctctggctcagcaacacatggcccagggatattggaatcggctggcccagattggggcccgactgtcagccttggggctggggtcaagtccggagggaggggtctcttacaggatctcattgactttttacaacattcctgggagttcagtgatatcagctcatgttttagactagaaactcagtttccagtgggcaaaaccactcactcaaggtcacacccaaagcctgagctcatgccaccagctggaagaggactaagagaatcctctctcctttcctggaggtctgaaaggtcagcttctctaaaccacggccacttttccagcttctttcttggtctattcctgaacccctcacccacagagccctccccagggtcttacagagagtgttcaaggtcaaggcttgatggacctagagaaaccattgagcccaggggattttaaactgccagcaggaaccttgtttctgagaaggaatttcaggggctgttgcagagaatgaagagaggtcaggcaggtaggtgctcccagctccagctcagctagaacaacctgacttttatgttttatatattgggattctttgtatgactttggaaaaaaaagtattttgatgccctccaccccccacccccaaaacaagctaattttgaaattgctttcatttgtcttactgtactgataaggaagctgagagtaggggacttgtccagggtgagctgatggtggaggttagactctgtctgcctggatttgcacttaacatgctcccagattcagacagtttccatccagcagactctcctgagtacaaagggcttgtttttacaaatccacatctgaggctcacatatggcctcccctccagtccagagggcatggagttactacccttctctctctgggccaaggtcagtgttctccaggccaggtagctgatatagctcctcttccccaaagcctagcaatgtgcctcggacattggaggtgctcagcatatgttttctgatactgacttaccaggagcatgcaaaacagcatgccagtaacactgctatttccctggtatgagcagacaaggaggttcccaacccacggtgctttgggggaaggtggttattaccagcacccaagtccttaaattagagtgaataaatgaacatttggcaagtccctcttgaaagctcgccagcccctgatgtcagccacacaagtccaatctgtcctgagccaaggataccgattcagaggcatttgctgggcccacccactgggtgctctgtgccatgccgggggcctgctcaggagagatgaggacttaatgaaatcgaagccactcggaagatcacctttttctggtgaaccttcatgctggtggaaccagcagggctcagatgcaatttagacagtctcctttccctcatttcctatcatatatctttctccaaagaactggagcaagggggaaagctggggttttgtgctttctgactgtttaataatctggctcctggaactttgtagaaattccttagagaaaggcctgttttgctcaatgg

SEQ ID NO: 63239 - DNA, 2127 bp, Homo sapiens
gcttggacaacatagtgagaccgcatctcgtaaaaatttttaaaaataaaaaatgagtgaatatctagatagccaggattagagaagtgtcacagtcagaaagcctgaagcctaaagaagaccaaggaaccaggggctttatcctcagatacatgaaagcctgaaattctgtccacaagtatttatagagggcccgtaatgttcttggtactgggctaggaactccccagattcagttaagaacaaagtcattacctggcctcagatgcaaggcaggggctggggggtgtgagtggcagggaggcagcgtgatcaatacaaacacttttcttagcctgagctgccctgacatggtctgacggctcacaaggtggtgagtgcagccgggctgcagtgttcaaggagggcgccggctggccgcccacctgtcagaggctgcgccagaaggatgcggaagaagagatttctgccttggctgaggtcacttcccacccccagattccctgcccacacaaccctgcaattttctgacgctgacgactcggatcctattatttcccgattttcaaggtcccatgatgctgacagccccaaatgctaagtcgtcagtccgcccacgccctggacccgaaagcaataaaggcgaggtcagcaagggtcctaccacccactgcctcgaaaggcctctgggggtggtcggcgcgcccctccccacctcgcgggggccgtgtgggcgtcgctcggtcgttggggtgccggggacgtcgtgatgagaacggcgtcccagagacggcggtgacagagccgggacacgtgacagtcacagggtcacattctgcggtccacgagtttgggaccgggctggtcacgtgacgcggtgggggcaccatggggtgatgtgagatgcgggtgtctcggattacgtacaaatgacgtattcctaccccttttggcaaccagatttccgttggaagatgcaacggttccggtgacggtagcaagttctcgcgtccaggcatctccgcttccgctcggggcgcaacaacttccgactccaccttcccagcctcgggcaaggaagagacgcgaccatgtgcgcatgccccgaatttatcacggaggggcggggctgaggctgcgggagctggagcggggaagaaaagggaattccaacctgtggaaccttggggggtccccggggtcggcgccttcccattgactgtgggcggtgcaagggacggagcctctggcggctcgtgggggtgttggggtccgcagggggagggaggggagtgtcagagtgtgagcggggtacgggaattccaaatttgagggcctcccggctctggcgccggggagggagagctcaggccgccatgcgggacaggacccacgagctgagacaggtgagacgccagggcagcggggatggggacgggcggacgaactggaacgcaggacttctggtcttcgggatagggaggggtggctgatggccaggaaggaaagtcccggaagcctgtgggtcctgcggggtaagagccgcagcgaaacggtggtgccaatgactccgggcctggcagggggatgacagctcggacgaagaggacaaggagcgggtcgcgctggtggtgcacccgggcacggcacggctggggagcccggacgaggagttcttccacaaggtaaggggctggggtctccgcctggattcgcgagggtgtaggaggacccgaggagtagcgtggtctggagtaccccatatctctttcagccctctcggtcaccctccccaggtccggacaattcggcagactattgtcaaactggggaataaagtccaggagttggagaaacagcaggtcaccatcctggccacgccccttcccgaggagagtgagtgaaaccccggctgcagggcgcatgctccgccccagggattgtgggggttgtagttccacgcaggtggtggccagagtggtttgttgaggtgggggctgctgtttgggagtcttggccttctcttattcaggcatgaagcaggagctgcagaacctgcgcgatgagatcaaacagctggggagggagatccgcctgcagctgaagggtgagctcctgggacctcag

SEQ ID NO: 63240 - DNA, 1348 bp, Homo sapiens
ttcattgattcattactaccattaatagagacaattttctgcaccattcaggctggagtgcagtggtgcaatcataattcactgtaacctcaaaatcctgggctccagcgattctcctgccttagccccaacaaagtagcagggactacaagcacatgccaccacgcctggctaatttttctttttcttttttgtagaggtggggtgttactatgttgcccaggctggtctcaaactcctggcctcaagtgatcctcctgcttcaccctcccaaagctctgggatgacaggcatgagccactctgcccctccaggtcttttttatcttgttgctgttccatccctagggcgttgccctcacccacatgatccaatatgattcaccaccacttccacagtctggcccttctgaggggtgatggtttgccctttgccctaaagagcatgattcagaagtacagatcatttttgctctaatccccatagccaggatgtagtcatatggctacatcccgatgaaagtgttgctgagaaatagaatctctaccctgagcagctttttgcccagataaaagttcagttactctgggagaagggtagaatggatactgggggaccataagctgttgccaccacacacattgaatgttaacccatcccaactgtatcaatttttccttcctttccttccttcctccctccctccctccctccctccctccttccttccttccttccttcattccttccttcctttgttcctttctttcgacagtctccctctatcccctaggctggagtgcagtgttgccatctcggctcactgcaacctctgcctcccaggttcaagcaattctcctgcctcagcctcctgagtagctgggattacaggcgtgctccaccatgcccagctaatttttgtatttttagtagagacaggatttccccatgttggccaggctggtcttgaactcctgccctcaggtgatccacccacctcagcctccaaaagtgctgggattataggcgtgagccactgccttggcctcaaacggtatcaattttctgttactgatttaaccaattatcatacactcagtggtttaaaaccacacacatttactttcttacagttctggaagtcagaagttcaaaatcagtttcattgagccaatgtctggtgtcagcagggctggtttttgttggtggctctggtggacaatgtttccttgccttcttcagctcttttttttttttttttttttgagacagggtctcgctctgttacccaggctggggtgcagtggtgcaatcatagctcactgcagcctccatctcccaggctcag

SEQ ID NO: 63241 - DNA, 2904 bp, Homo sapiens
cccaatatcccacagtgggctccctgtcgtggcgatgaagccttgctttgcctcactactggcttaggaaggggatgaagttctgctgtctcactaggcaagcaaagattcaatttccaaaaatcctaggctaggaccctggggcagggatgaggagaaaaaggaggcacctcaatcttcccatctctaaacaagcagtcaccacacaggcctcacggccaggagtgacgtagtgagcggatgaaccctgcagaagtgagcgctaatcatatcctaggcctcctaccgggccagttcacaacctgatcccaacctacttttccagcctcagctccagcgacagagtcctcctcccggcagcgaccgaacctccagccacaattctcaatcctccacctctagatgcagtttcctgggctcggggagcccttgcctgccttctccaacgggaaagcccctttacatccttcaagaacccccttccctagtgccctcaggaatactttatggcagtagagaggtaagggccccacgccgctctggacctcagtttcctcatcagtaaaatggggtcccttaagtttgtgggagtttgaagggcggtggggcctacgaagcgcgccgaggagccgagagttgcagaaacccggagctcctcgctcctcgcaaccgtctgtacgcggcgcccccgccagccaggcagcccctggagggcaggaccccggttataagcctcagaaaacgtggcttcggaggacgtggcaaggaggactgaacgaaggatgaggagatgaacaaatgaatggacggaaggccgaatgagggacaaaggcttgcaagatggcgttctctaggaccgcgggagtggtggccgggcctcagcaggggagggggccgccggcgcctgggatcttgcagcgcgggccacgcgaccgggacaaaaacccaaaacatggcgggctctaggacccccgggaccacaccgcgccgggccagcagccgcgcgggccgagcctgggtgtccgcagcccagaaccgcggagacagccggcgggttctaggacctgctgggcccgcaatgcgcccggggccgctcacagcccgccccgcccgcgctgctcgcgctgggccaacccggcccgccctcggcgcccgcagggaaactgaggccagctcggatcgtggccgcgtgggagctgcccggggccctcgcggcttcccgccgacgtttcctacctgatgagacttgtgctgactccgtggcgtcggcgtcggctcctcgcaccgacggagcccggaccctgccaaacaggggccggcgctaggacccagcggggggcggggaggtgggaccggtggcgcggcgagcggaagtgagggatcttcctcagctaggaaggaagggaaagttcccggggaacctccagcctatggcggcagagaagcatcttgcaagaggtctctgtgtgtgctgaggcaaggggacgccaggcaggctgacggtatacgcccgccttgtgttagtctggggccaggtcaccggcaatgtcttcaagaaccagaaggtgggaggacaaaaaggccatgctcaagctctgcaaaacctaagtccaattatattccacaacatttcctttaatagcaaggagtgggtttcacgaagttttctccatctgccttgggaaaagtcctccagagagccccacgaaaagtgtcaccaaagtactgtggccagggctgtagaatctttttctccctttctgcgcctattcaatatgcaccggaacgattctagctgctcttgccggaagtgtggctagcttagcgtgcaaagacgccgcgttgtgacctacgtgggcggagtcagccgtgcagacctagaacttagcgccggaagtgtgtctgcgtaaaactgcggctcggaggcgggacaggcagtgctcccgaagcggaagtttcgcggggaagcttttgcacctaaggacacttcctgtttcctagtaacaataggaagtgtccgtagagctgggagtagactcctggctcatgccagctgcgccctcttttctctacctccttcctcttccccccttctcctttccctctttcccttccctcccacctcccgggaaccctggctgagtgtgcgtgtgtgggagcgcgagagccccccgacagccaccccttggggcgcgcggctgcagttagggtaagggtcccagtgcgcaggcgcgctcttgttcgcggtccccaactgacgcgcccgcggcgggaaggagagggggccgccggtgcgaggtaggcgtcctgagaggaaattggcagacgagatgagtgaggtcagaggacttcattggtggttgactaggggaggggacttttgatcaaaggggctttgtgaggtgagaattccgggggcaggttcagtgaaggggtttacggtcggagacagttgtactggggtcccatgggaagaagagtcagagttggagaaggacaagacgatgtagggggcatgagagagcaagggctttgggatgaagaccgcctcagtcagggggtttgctgttacgtgaactagaataacaggcattgccgtgtgttctgaggattgagtaacacaatgaatatagttagcacagtgcctggcacatggtaatataatactcttcatgagttgctgtcatcatcagtattaagagaggaggcagaagaaaaaaatgagaaagactggtgagggtaagatcaggaggcatgggagagaaaaggtaggcaatgaagtgacattacaacctggtattgatgttattcccaagatggaagatagtttgagttcaagggaagtagataaaagaagtcgctaagagagtcttttggggttttttgtttttttgagatggagtc

SEQ ID NO: 63242 - DNA, 1944 bp, Homo sapiens
taacagtacttaaaccaattaaaagactcctgttagttacctccccacatccccacccgcaggacgctccgtgatgagcagctagctggctgtcagctgtgtggatcaccaagattgcatggagtggggctgagctgaccaagggggatgaggggcggggcggggcgggcagggagggggcggagccactcacctaacaatagctgtagtgtgtagaagatgcaaccgaatatgctgttggattgattgaggatgctgtcctgtcccagcacatgctccaccagcccgaaacccctgccccacctggcagaggggtggggtggggtggaaccaggttaggactgtcaacccagtgccttggaccctgcccgagaaaggtgatttccaagaagccacctgggctatcctctgttccccgacctcccatcctagtccaagggtcgatgatctcctggcaccgggcacctttggccacgtcaggattccatgtcactgaccctatcctcccctctccccagaccaggcccggacgtggctactccgtaggccctgcttttcatcttagaccttaagtaagtctctttttttttttttttttttttttttttgagacggagtctcactctggcccaggctggagtgcagtggcgcgatctcggctcactgaaacctccgcctcccgggttcaagcgattctcctgccttagcccccccgagtagctgggattaaggcacccgccatagcgcccgattaatttttctatttttggtagagacaggctttcaccatgttggccaggctggtcaactcctgacttcaagtgatccatccgcctcggcctcccaaagtgctgggattacaggagtgggccaccgcgcccggcccttaagtaattcttaaaatggcaaggctggtataacggttcactcggttttgcatcagagactgggagtcgggggcagattatctttgccctggaccccagaatctccagctccctggccactcactcgcctcctctgtattccgtcattatgctaacgcctggccatcacgcacagccagaccgggccaccttgttcctgggcgcagccatcgccaacaccccccttcacctgcgcgccgtccttgagaccatcgtcaatctctaccgccatcctgcctccccgcctttcctggtcaccgttattccttggcatccaattcacgtgcgagtccccggaataatcccagtccccagcactgtctggtcccttgcctcgcactcttatttcgaacaccagtatcgctgggtagctcagcccctgtgcaacgaccccgcgagcagtccagccccgtgtccgttccccgggcacaccgatcccagactccagaataatcatctggcatcctggccgccctgctccgaggccccacgcctcccactcccgtgcacacctggaggagaagacgcgcgaacagctgatggcggtgcccacgtcgcagagcgcgcggtaatcccggtcccgggcgcgcgccgccttcacgtgcagcgcgtagagcgagagcactaagcccgtcaggcaaagagcgagccgcacccagccagggctcccccaggtgctgcccattatctccaggttccgcccgaggcgcccgcggagaaaaccagccacggagcaggggccgggcggcgaatggccgcgcccctcctggccctctgactcggcgattggccggccgtgctcgcactccacgacccaaatggctgttccagggcgctagtcaagcgggcgagttaggaaaacagcgaagaatgccgggactagtgaagcgggtaagggacgtgcggaatcgcggccccagcggctgccaggcatgatgggagttgtagtcggcgcggctgcaaggcatcaagggaaatgaagtctccacagatttaaaaactgttggccgggcacggt

SEQ ID NO: 63243 - DNA, 943 bp, Homo sapiens
ctgctgaccttccctccactattgtcctatgaccctgccaaatccccctctgcgagaaacacccaagaatgatcaataaaaaataaaaataaaaaaaaaaaaataaaaaaataaaaaaaaaaaaaaagaaagccgcctgacctgtatacagtattctgaaaagggggtcgcgaggtgcatgtccaacctccgccgccgggggcagcagcgagtccaggccgagccggggcctagcgagcggggtcaaatggggtgaggcctgtgccagacctctccacctcggtggcagccgcagcctcctccgcctgcggctcctgtccacgccgcggccacgtgagcgccagattctggcgcacagaccactgccagtcctttgctgctttgcgcagcctgtcctccccgccaggagcacccttcccgctcccttttaccacgggctccagccgtggctgccttggggctgccgccgcctggctgtactccaggacgttgggaaagaacgggtgggaatggtgtgggtgggggtcaaagaggaaacccagagatgcagggcgcccctttcccgtggtctgcccccaattgctcaggcaggccagtcacggtgaggcgtcctccctccaagtttatatttattattatttattatttatttttttcaccttcaagtttattatttattatttatttatttatttttgagacggagcctctctctgtcgcccaggctggagtgcattggcacgatcttggctcactgcaacctccgcctcccgggttcaagcgattcttctgcctcagcctcccgagtagcagggattacaggtgcatgccaccacatccggctaatttttgtatttttagtaaagacagagtttcaccatattggccaggctggtctcgaactcctgacctcaggtcatctgcccgccttggcctcccaaag

SEQ ID NO: 63244 - DNA, 1237 bp, Homo sapiens
atgatatctcttcatcttaccaagcactgagcagttaaataacttgctccagatattaaggggtcgagctggggtttgaagcctggttacccataaatgaaccaagaactggaaggaggacaagagctccgagaaggagtcaggtagggcgtgatctgtgcgctttacatctaagatcttccagctcccagggagcccgtttcatagagcaggagatagaggctgggagggacacggagagcctcgagagccgtgtggaggaagcggtgctgtttggggtccgggagcaagggcgtggcctggatgcgcgggcgcccgggacggcacgtcctcagaccaaactacaactcccaggacccagcgggcgctgccgcccacgcgacgtcacggcggcggagggcgcaggcggctgggcgcctggcgagtggactgttcgagcccttccgctgggacccgggccctggctccggccccgcggtaagtggggcgaccccagcctactcagtccgcggaggccccgcggcgcacgtccgcagcctccatcacagcgcgggcgcgcagacggggctggcatctaccatatggggggcatccgggccgaaccaagtgacccgcgtggggggtcccgctggggactccgtgccgcaccctcccaagccggccccaggggcccagggctggtgtcgcacgttcgctggccgcgctcccagggcccgggtttgaaggcgctgggcaggcaggggcagccccgccccctgagaagggtacccgggaccccggggcgctggggcgaggttttcgggctggaagggtctgaggggctcctcccccgacagccctcccaccgccagtagagcctcgggttggggaatagaagcccccgggaggctaggtcctttgggcgcggcctgtgtgcatctggggagacggtgggagtggtggggagaggtcgcccgggtctggggagaccgatgcacaggtggagagatggtgcgggttctgtggattcggatccttacaacttcctcttccccgccccggtagatgggagctgctctccgcgggctgagcctgtcagcatcctcgacgcaccctggtccctgaagtcggagaagagcccctacccacccacacccccttgccccattttgggtcgcctgggtcctcagtcctagcggatcctcagtcctagcggccaccgggtctgaaaggagcaagacgatgatcctggcgtcgg

SEQ ID NO: 63245 - DNA, 496 bp, Homo sapiens
ggcctgggggctgaggctgtggggctggtgctttggggcagttccgaagttgccagcatcttggggtggggctaggggcgtgggtagtcctgacctcctttctccggccagcctgactttgtcggcatcatctgtactcgtctctcaccaaagaagattattgagaagtgggtggactttgccaggtgaggcaagaatggctcagggggtgggcagacatctggggcagggaaggcttgggtctgagcccttgcccggggcatgatctgcggggagcagggtttctcaaccatggcactattgacatttccagccagataattctttgtcacaggggctgccccgtgcacgttaggaagttcagcagcatccctggcgccagcagtactgcctagttgtgacaaacaaaaatgtctctgcacattgccatatgttacttaggggggcagaattgtttccagttgcaaaccactggtggaggggcccctgactgaac

SEQ ID NO: 63246 - DNA, 1872 bp, Homo sapiens
ggggcagcgcccgctgaaaattggcacatcttggcttccgcaggtaccagggcctttaaaaaggttcagctggccgggcacggtggctcacgcctataatcccagcactttgggaggttgaggctggcagatcacgaggtcaagagatcaagactatcctggacaacatggtgaaaccccgtctctactaaaaatacaaaaattagatgggcgtggtggcgcgcgcctgcagtcccagctacccgggaggctgaggcagaggaatcgcttgaacccggaggcggaggttgcagtgagccgagatcgcgcctctgcactccagcctgggcgacagagcatgattccgtctcaaaataaataaataaataaataaataaataaattaaaaaaaggttgagttgagtcatcgcatgaggtaagtctgtctcctctcctcacccataggctgcagccacaggtccgcacggaaaaccaggagctccaagactgccgcacactcaacatccaactcgcggggccgcggggacggccacagaagccaatcggctcctgctacatcacagaccccgccctcaaaccttgaggagcccgccccacgcactgctgacccggagccaaaagaactgcgtggcgtccgattctggcgtcacttcccttcccgcgatggcggcacagggagctgctgcggcggttgcggcggggacttcaggggtcgcgggggagggcgagcccgggcccggggagaatgcggccgctgaggggaccgccccatccccgggccgcgtctctccgccgaccccggcgcgcggcgagccggaagtcacggtggagatcggagaaacgtacctgtgccggcgaccggatagcacctggcgtgagggcggggcccagggctgggggcggggcggagctcagggccagggggtggggcggggcctgaggacaggctgtcagtgaggccaagatccgggggctgggagtggagaggaggaggggcggggcttgaggaaagaacgccgcgttccgggcgctgagaaaccagccgggttgtgggaggctgttgaccttgaattatgccgagcgacgcctacaaacccaccgctcaggccttcaccaggattgttcccattccacttccttgcccagtcttaggcttcattcctttttcttgctaacgctgcttcctcaccctctcttgtctctgcgtcttctttttccatttgtccctggcagccatccgcagagagaagaccttccagaaacaacaggcttccctttcctaaagttctgctgccttctctcattttcaaaattaaccccaaactccttagggtggcattcatttttgtgacctctccagtttctagccaacactaggaaagggcattgccaggccagaacacactgtgccctctgaagaccacacgccctttaccacctgtgccctttgcttggaatgctttttcttccctttctccttgtttgcctgcctagctcctactcatcctcttagcttcatatcctttgtgatgtcatccttgattccccttcaggcaaagtgagtggttcccttctctatgttcctgcaacatttttttcctacctcagtcatagtttttgtaacattatgttgtaattttctctctctgtcttcctccatcatactgggaacttctggagggcagcacttcttgtgattcatcactgtgtcctctgtacccggcaacaacacagcatagggccagacacgtagtggttgccttactcatttattgaatgctctgctaattgtcaggtgcgctgctaaaaattttggaggcattaattcaccttctaaggttggtactattatcccttttgtctttttttttt

SEQ ID NO: 63247 - DNA, 1217 bp, Homo sapiens
aaaacaaaacacaactagctgggtgtgatggcatgcacctgtagtcccagccactagggaggctgaggtggggaggtgggaggatcacgtgagcccgggaggctggatcactgagactgcagtgagctgcgatcgggccactgcactccagcctgggtgacgacagacccagaccctgtttcaaaagacaaaaaccaaaccaaaaaaaccacctcgattgccccactttgggagtcagacgtggatctgaatcccagctgcaccttcactggcagtgtgccctgggcaagtccctgcttctctgcccataaggtgagggctaaaaccccccactctgggagccctaagagaatctagttggaaggcagcccagctgaaggccaggcactggttaaaccccaggggaatccgatccaagtcacctccccctcccctcctccctctccgaggaaagtctcaccttctgccccttccgctcctagaaagaaagagaaagaggaggggtgagtagggaagactcgggttccctgaccccttagtacccaccactgctccagagggctggccccttccctgacagagccaaggtgggaaagagaggccaagagctagggaggccgggggttttcttgggccccagacaagggcacaccccagaaaatgatcacgccggctccctccagtgcattgtccccaccctgcccccacgtcctcacttacctgtccccgaccggagtaatccaagatagagcagaatggccacagcccccagctgcccaggccccaggacccccttctgggccatggcccaggacaagggcccctggggcagactccaggcacgcaaggtaggaagccttggggtggtgtcgaaggcaggacccagatgttggctcagagggaaggatcccagaatccgggctggaaaggggcagcaagtgtccaaggctggcctctaaggcagggagcggccgcaacgggagacgcctggagtatccgaagcgagcagtgtggacgagtcaccagcaccgtctggccacgcagggtcctcccaggagtggctgcacctacctgcccgcccctcccctggccccgcccactggctgggctccgccagctcctcttgccaccaaagtcatgagtcctttcagagctgcaggcccgtgtgtgtgcatgtatgtgtccgtgtgtatgtgtgtgcacatgcataggccttt

SEQ ID NO: 63248 - DNA, 1603 bp, Homo sapiens
ggcaacacagcaagatctcattgttaattttttttaaacaaacaaacaaacaaataacaaaaacaagtctttggctctgttccattctcccctcccgtctctcgcctaggagacgagtgagacccacctgaggacacagtgagtggctgccaggacccagcctggggccaggaggatcccagtgcagactcgatcaccagccacatgcacctctgccagccagggccacaggacccccactggagcagcctccagccgcaggccacaggctagggagaggaggtggccacctcagttggggccccatggctgacccctgagcccctgccatgggtctgtgcactcccaggagcccctagggcccaaaagcgtcctgctcaccaccatgctctgtgtgtgggggacaagtctgtgtctcagtctcctccccatcagggccccaatcccaggctagctggtcctccaggtaggctccccgagtcacatggctgatccatgggccatgagtctgcagagggaagaaggctcggggacgtagacagccactgggaaagtctctgattccagccagaaaccaggtcccctcctcctggcacaaaaggctccaacgcgagtcattctgcagcaacaaagtgtgtgtgttacttgcctctgcgtgtgtgcagagaatatcagagctcctggggctttccaggactccagattttcccatttgcggaagtatcaagttccaccttctccaaatcagactccaaatactaatttgtgtaagaattcagccctcactttaagattctccttaaatccagagatagagagaaaccatagcaccagctcagagcccgcctcagctccctcccaaaagttctctaggggcaggccccacccccagctcgttctggccccgcttccaccccggctccgccccattcccagttccgcaagccccgccccttcctagagcccactcggacccgccttccccaggccccgctccctccctagagcccactcggacccgccttccgcaggccccgccctctccctagagcccacttggactcgccttccacaggccccgccctcttcctagagccctctcgggcccgcgttccgcgggccccgcccccgccgcttacccagcagctgcccacctcctccttttcctggtaggcagggcagagcgcgtgcggcgggtctccgggcagcggtactgccgccccctggcggccgtacaggcagtggcaccaccagccgcctaacagctccgcctccagcagcgcgcctgggccaagcgcgggttctggaagggaaaaggcagggagcccgcgctgcggcccagacggcccctgcaccgcccggtgccgcccggcccagcgccggtccccagctcacccccgcggccccagcgggccaggcggcagcggctcccgggcaggaagtagtgttccgggtggggtaggcacacgggccgcgaagccgcgctcaggttcacgggcgtgcgcagctgcagcagcgccaggtccgaggcgttgtcccacgaagcgttctcgtgctgcaccaggcgcgccacccgctccgcgcgcgggcgcgagggcagcag

SEQ ID NO: 63249 - DNA, 1793 bp, Homo sapiens
ttccttatctagaaaacggaggtatctttacttccttcgtaagactgatgacaaggaaattatctgtgcattttgaaaccacttaagccttgtacacgttttatttctgggatcgccctggtagggcttcagaaaaataaaaaggaggtccctgagaaaaggctgggtaccgtacatctgaggtcaaccctctctggtcccaaggatggcctgggctgttccgccccgtggctccccaggggcaaagccatgaggatccgggtgagagcccagtgctggacgagcccggggcccaggggtcccggccgaaatccctgctgtctttcaggtcaaacgtcataatccccgaaccccagaaaggccgaaaggcaaggcaaccctgaaagacgacgaagtcaacctcagggcgcaggagagggagggccagtgtgctgccgacgagggaggctggagccgcggggacgaggcgccccatacagcggcaagagggtggagggcaggagctcgccatcctgggtgaaagcggggcccagcgaaggggcccggccacaggaatctcggttccaccccgctactcccggctgtgactccagtttcgtccccagccgccgggaccgccccctcgccccgcccccagcgggcactcaggccgtaccactgtgccttcatgggggtggagatagatcgtgggctagtcctgccgaggagagaggggttcttcctcaaaaaatatgattatgtatagtattcgcatgattctagttaacttgtttcccttctgcctgctcggaccctctacctgccctacgaagggggcggagtgcgttcctgcctccccctgctcttccgcgtttggtgcgcgcctgcgcggtgcgtaggcggcggagcgtacttaagcttcgacgcaggaggcggggctgctcagtcctccaggcgtcggtactcagcggtgttggaacttcgttgcttgcttgcctgtgcgcgcgtgcgcggacatggcctcaaacggtaggtaagggcgcgaggcgacggcggcggcgcacccggccgaggcctcccagctgggcttttcgttttcagtgggaccggggcggcgatcccgtgtgggattttttggcgcccctgtggcgggaagccgcggagaagagtaactggaggaggctggtgtcgccattttgtttcgctcctctggccctcgcgcgcggggcgggaagtcttttctttgcagtccgtttgcttggggtgggcgttgggagggacgcttcttaggggtttgaagcgtcaggtgagggtggaaaacgcccattctccgtggcctcgcctcccccaactcccggccccgcgctcgagcccgctttgtcgcagtgctgcatccgggcactcgcggcgcgcacgcgctctgcgggcccctcccccttcgcggcgcgggtaccccttccccgcctcgtgttggttcagctttctgtcgcgagacccttcgcggaagactcggcggcgcgcgtccggtgtgagccttgtccctcagtggtccttcgcgaatgggcgggatcgctccgttcccgcctgggttgccacgcggctgggggcggaggctcgggatcggggccgccctctagcttaacggtttggcggcggtggtcagggttcgaccaacggacttggggacggcccgagagtttttcccgcctaaatttctttctttttttttttggagacacggtcttcctctgtcgcccaggctggagtgcagtggtgcgatctcagatcactgcaacgtccacctcctgggttca

SEQ ID NO: 63250 - DNA, 1014 bp, Homo sapiens
ttgcgggagcacagatgcaggctgtgcaggagtgcggtggggccgggctgggtgtggaggcctcacctggcttggctgccgactgaggaggggcctggatcccagctggcgcggctccagagcctggaaggatatgggccaagtgatccccttcccttcccttcccgccgtggggccggggtcccgttggtcggtaggccaagcgtggggagcctcctttccggtagagcagctttgtttaggggtaggaggaacagaaagcggaagagcccgcggggtaagcgctggtgtgggtggaggggaaagacggggtggaggggaacgggggcggctcaccctggtgcgtggccgcctgcagctgcccggccatctcctgcaggcccatgtcgcgcagcacgttagcggtgagctcggcgccgtaggtctccaggtagaagctgaccagcttgtcggtgaggtccaaggcgtccatggacagcagcgcgccccgcgggatgcgcccgtagccctcgcgcagcggcaccgacagcagcttcagcttgaacttcttgagctcctcggcggtcaggttctccagcgcatccaggatggcgtcgcgcgcgcgccccatggctccaggatccccggccgctgccgccgctcaccccgctgcagccgccgaccaggaggaagtcggctccggggcggaacctggactccccgccttcctcccactctggtctcccgactccccgccccggtccgttgccctccagcaaaaggcgcttccttactacacccttggtcccctcccacccaggcctctggattggggccccaggccgtcgggggacgccaggatcgcgccctccagctggcctgcgaggtgggacccgggagggggccgcagaggggctcatgggtggcgcctgcttgtctctgggcttgcaccagcgggtacagaccggaaacctgggctggctctcactgggtttattggagcacctaggcttagaacctcggatttctagaacc

SEQ ID NO: 63251 - DNA, 1758 bp, Homo sapiens
ttaaaggcatgagccatggtgcccagcttgaattgacctatttttatttttaaaatttattcatttattttttgggacagagtcttgccctgtctctcaggctggagtgcagtggtgctatctcggctcactgcaacctctgcctcctgggttcaagcaattctcttgcctcagcctcccatttagctgggattacaggtacgcaccaccacgtgtggctaattttttgtatttttagtagaggcggggtttcaccatgttgcccaggctgatcttgaactcctgagctcaggcaatccacccccttggcctcccaaagtgctaggattacaagcatgagccaccgcgcctggtcctatttttaaatgacttctggtttttgtgtcattcttaggaagaccttttctcattctgagtcttaacattttcccatttttttctttgctaattcttcctcctagtcataggaatttaggaatccgggtatgggcccccaccgtcctctgggtggcagaacttcctctgtggtctccttctctccccacatgtcgaagttttctctgttcccacttctccccacagggtggtggttggagccccccaggagatagtggctgccaaccaaaggggcagcctctaccagtgcgactacagcacaggctcatgcgagcccatccgcctgcagggtgagtcactgccccgccgggctgggactgggattcccctgtgaacacatagggactttccaggcactcctgtgtcctggggatctgtggtggggacacaggtgcctgcctccgtaccctctcctctgcctgcagtctctaccctagacatccccaggcaacccctctgtgttcctttctttcccaagatttaggatcccccttcaccgtcagacctccttgtctcccgcatggaggtgacccctgcccagctcttccacagccttctctgtccccccaccagggtgaccatgcccatatctgtccccgcagtccccgtggaggccgtgaacatgtccctgggcctgtccctggcagccaccaccagcccccctcagctgctggtgagtggggctcgatcagaggagcatcctaatgggggtgtttgggggcccacgcatggtggggctgggggtcttgtggagggtggaggtgctggggtacaaggacaggaagcaggggcagccccttccactggctcctgtcccctaggcctgtggtcccaccgtgcaccagacttgcagtgagaacacgtatgtgaaagggctctgcttcctgtttggatccaacctacggcagcagccccagaagttcccagaggccctccgaggtgggttgcctttggcagagggaacagatgcgcagcaaaagaccaggggagggggcaggactgaggtgacgtctgctcaaggtctgggctctgggtgcagaagagtgggggaactgggtcccattagagtcagaagctagggaggtgctagggtcttgtactttaggaaaacgccttggctaggcacagtggctcatacctgcaatcccaaagctttgggagcccaggagcttgagatcagcctgggcaatgtagtgagatcctgtctctaaaaaaaaaaaaaaaaaaaattagctgagtgtggtgatgagcacctgtagtcttagctatttggaggccaaggtgggaagattgcttgaggccacaagttcaaggcaagcctgggcaacatagggagatccccgtctctacaaaaaaaaaaaa

SEQ ID NO: 63252 - DNA, 611 bp, Homo sapiens
taaactataaactaagtgtctcccaaagttagctcagcctacacccaggaatgaacacggacagcttggaggttagaagcaagatggaatcagttaagttagatctctttcactgtctcagtcataattttgcaaaggcggtttcagtaagatttatttacaaagaggggggtttatttataaagggagtaattataaagctgtgacaggcctaagggagccatcagggactttccaagccctgggcaagcaggtctgttgccacccctgggtttatgggttgaggagagggagagctcaccagggtctggagagagtcatgtggagctggcttccttctgaggaacagttggtcttttgtgaaggacatagctgtccccaaacaacctcaatgggagaacacccggacctcactgccctcctccctctagtcttctgttgagccccctcatctgccaaatccaatgggaatccagagggcaacagagtcctggtgatggggtccctgcaggttgacctcccaggccacagagctgagcggcaatgggtagaaagtggatttggggatggggcagaaggcagaggagcacattccacatcactttatatgt

SEQ ID NO: 63253 - DNA, 1504 bp, Homo sapiens
aaggtgctttttaaagtagcaaaagtaggtacaagtcacataatttccaagaagcttgtagaaatggcagtagagttcatacctgtattgaaaggttgcttttggctgcaaataatagaaaaaaacaaaagcatgtaagagcagacagaagacctttactctgcaagaggttcaggtgcaggttagtgtttaatgcagagtctcagcattgacagattctttctgatcttccaattgatcgtccttgcgggggcggtttagttctttcccactgactaggattgggtcaaattccatccccttggttgcatgcagtgctgagaaggtgagcatgtgcttttcacaggcttaataaaaagaggtagctccagccaggtgcagtgactcatgcctataatctcagcactttgggaggcagaggtgggtaggtcacctgaggtcaggagattgagaccagcctgaccaacatggcaaaactctgtctctaccgaaaatacaaaaattagctgggcatggtggcaggtgcctgtaatcccagctacttgggaggctgaggcaggagaatcgcttgaacctgagaggtggaagttacagtgagctgaggtcatgccactgcactccagcctgggggacagagtagaactctgtctcaacaaaaaaaaaaaaaaaaagagaaaaaaaaaggagggtagctccaccagccaggaaggtggcagcgctggtggctgttggataggctacctacagtgtctggcaaatactatgcttgaagactatgctgtgagcaagattcctttgtgaaggaacagcttggacattgtgtatgtcagaggtatacagcagaatagcagtgactaacgcttgtgtgggagagcaagcatgtcacctcatacttggaataagtcactgccatacaaagtctgaatcagctttcatctttgtgcaacacatgtatgtgggagcttttcagctgctgaaacctctagtgacagaaaaggaggttttgttgttcatttgtaattaatgttaatcctatgagtggtgggagagatagtgaggtaggagatcagcaggacctgttttctggtcacaacccagctaatcagagcatgatctggtcaagatgggatgcactaaaaaaacagcccaaaccagcagatggccaggaaagcaaactctcattaccctcgccacttattagcataaagacactcccaccggtgccatgacagtttacaaatgccatggaaacacaccatagcaacggtcagcaagttacctcatatggttctggaaactccccacaccttttccagatagttctgaataacccaccccttaatttgcatgtaattaaaagtcggtataagtacagttagccagcagcccactggctgctactgtgggctcactgcctatgggttgtcctgctctgcaaggaacagctaccttgctgccactgctgcttcaataaacctgctttcttccaccacaggctcgctct

SEQ ID NO: 63254 - DNA, 1414 bp, Homo sapiens
gaggattcggtgtacgcggaagcccattacagcctagagccctaattattaataggtgtgtgtgagagggaggcctcattattaccaggtgagagacagggagctgggatcgcctacctgtgagtggaggaggctccctcgagcacctccgtatcagcggcgtgggaaaagcacgtggagcgcccaccgcgctaggcgcatgcgcggagcaggagcgcttaccaagctgggcgcatgcgcggagcgggcgcctctgggcgcgctccccgtggccccgccctccccacagagccgcagactcgaagcttcacacctttattgtgtccgggggcgtccggggcctcaggggtgttcgtagcccgtgggcagagggttcacgtggctattgtggaacagagtgtggttgccgtccccccaggggtagggctgtggagagagcgggggagggagcgcgcgtgagcgccgtgagtccggagtccgcgccccgcgcgaccccccccccgcagcacccccccccgcccccgcagcacccccccccgcccccgcagcacccccgtgccgcccgcgcgcccgtcccgcgtaccttggtgcggatgcggaggtgttggtagggacggaactcggggcgcgggcggtggcccgagtggagataggagttgaaggtgcagagggccacgctgggcagcgccagcacgaaggtcagcagacgccaggtacgagctgcggacggagcggggtgagcgcggcggtcctggggcggcgggcctgtgaacaggtgggcagggtaggggagcccccggatccgcccgttccccactcacctcctgctcctccgtggcctcctttggcagcgctggccaagccccgggtcaggggcctcagaggcaaagccatgatggtgcggggagccgggaaccagcgctgtcctcgctccctttcctggggcctggggtcacctcccctctctgggccaatcacctgttgagtctggagcactggcggctattcttaggggtttctatatttaaaatggggcctgactggcttgaggtcatctccagacagctgttgtcctgtgcctcttattttggcaaggaggcatttaagtacaatatgccattctttttatatagttgcagggaaactattttgttccctattctatgcctggtggctggcacacagttgggctttaataaatatttgtagaatgaattaagtgtctttttgagtctcagtgttttcagctgtaaaatgtataataattcgtaccttaaaagattttttaaatactggagacggggatctcactatattgtccaggctggtgtggaactcttgagctcacgtgatcctcccgcctcagcctcccacagtgctgggattacaggcatgagccactacacggccctta

SEQ ID NO: 63255 - DNA, 1115 bp, Homo sapiens
gttccccaggctggagtgcagtggcgagatctcggctcattgcaacccctgcctcccgggttcaagcgattctcctgcctcagcctcccgagtagctgggaccacaggcgtccgccaccacgcccggctaatttttgcatttttagtagagaagggatttcactatattggccacgctggtctcgaactcctgacctcgtgatccgcccgcctcggcctcccaaagtgctgggattacgggcgtgagccaccgcgcccggccccttcgctcgctcttacccggtgaggtcccgtgcccgcgtacctcccgcatgacacttgggcgtgcggccgagccgggagcgcccctgccccgcgagccgcccccgagagacacggcggatcggaacccagccgggcgcgtagctccgggaaggggacgtggcgaggacccggcagccgcggggcctgtggggaaacatggtccccgcaagggaccctgggagctggaggcgtcctggcccggcgtccggagcccacggcccaggactaggatgccgggggtctcgggcgtcctccctaacctcagtcatagggcgctccgtatccagcccgccctgcttgcctctcgcttcccccaaatactgccccgacctgtcccctggccctcaccaagacagggagaaacgaccgagacactgaggactccgctaacagctgcctgagacccaacccctccactccctgaccaggatgagggagtccgcgccatgcgcatgcacacacgcgggcctctcctcctcccaccttttgcgcgtctcgcccgggcatcgaaggaagggaatgacggcgcgacggcgacccctaggggcgggaggaggcgctaggagcggggctgggaagcgccatggtgcaggttgaacggggacattgggtcaccgggatgggtggaattagggtagggcgagtgaggcactggcttctggcacagaatttaaggagacaccccaaaatttagtaatcaggatacacagactgagcgcagtggctcacgcctgtaatcccaacactttgggaggccaaggcgggaggactgcttgaggccaggagttagggatcagcctgggcaacaaagc

SEQ ID NO: 63256 - DNA, 791 bp, Homo sapiens
tagtctcgaactcctgggctcaaagcatcctctcacctcagcctctcaaagtgctgggattataggtgtgagccaccgcctttttttttttttctgatttactataatatttctagtaagccattggcttagaaaccagattcactaattaattcatttaccctttcatgatacaaaattttttaactgagtgaggcctttcctgagaattgagcacatgagctttggtgcatggacctggaaatctctgcttcttgaactcctaggggcttcctttacttcattcactcctggtgctcagcaaatttctgaatgggggaggttggccagcctgggagaggtcacccacgccaggaagtctcagtacctctctatttatcctatcacttgggaatcctctaggatctgtttcagggagtctctggttagccctgagacataagtggtgcgggtgagactcctggggcctatctcagaggtcctcacacccctgagattaaatcagtcaggaggcagggtggagagaggagtgtcctatcaggtctgaggaggttgtcaacttcctggacttcttgctaaggactcctcttcccacccttcatgggtagctgaggtcagggaatctgtagggacaagactttcttttaaatgctaatctgctgactaaccctgagtctgggaatgcctccaaaatgtcaagctgatgtgtttttttattttttggttttgttttttttgttttttttttgaaacggagtctcactctttcatccaaactggggtgcagtggc

SEQ ID NO: 63257 - DNA, 840 bp, Homo sapiens
tcccacagcaccagcctgtgtgtgtctcgccaggctcagagctgggaacctggaacccaggactgggtgagctcagagacataactgtgactgtactggagtcagtcttatgcccagagctaagcagaagcagggccagcccagaggagacgatgttaccgactcccaccccgtcctgtctagcgcttagagtacctctgtactggcttgcttcctacagttgctctgggaggaatgtgtgccagagaccctgacctctgacccaggcatgcaagggtctgccttgcctagttgagcctgtgcactctgtctctgcctcccttcagatagggaaaggagcttcaaattacggggtgatgtcatagcacggagtggagatggggtggcagggagacagggaggctcagggaaggaggccaggtatttcacagaggagttctgggggagaagaaggaaaacggcagagaagggaacaggaaggggtgaaggaaaggggaaaagtgccttcactgcatggaaaggtccttctcacccacagtggggtgggatggagactgtaacctcaagtacttttctgcaggggacaggcaagtaacacatatgaaacgtgctgagtcagggatgcaagagggagtgtccctgttcctatgtccaggacagccactactcaacgaactgctgccataaaaatccaatgttgcagcatcttctgatataaataataaagcaggccgggtgtggtgactgacgcctgtaatcctaccactttcggaagccgaggtgggtgggggagggaagggccggggcaggggatcttttctttttttttttgaaacggag

SEQ ID NO: 63258 - DNA, 2756 bp, Homo sapiens
cgctcactgcagcctccgcctcccggggttcaagtgagtctcctgcctcagcctcccgagtagctgggattacaggcgagagccaacacgcctagcattttttttttagtagagacagggtttcaatatgttggccaggctggtctcgaactcctggcctccagtgatccgctaaccttggcctcccaaagtgctgggattacaggcatgagccaccatgcccagcccagactggggttccttgacttagcaaagggttgggcaaaaagatgtggagaccccctcgccccaaccgaatcccatcattagctctaaaatcaacagccctaagggagcagaagggggtctgcttagagatcctggttccttccatttccttgaagtccgaaccaaagtcagagctgaagtttcagctaaaattgaagccagggctatttgcagaggctgccgccctagtgcgtccgctggtgctggcccaggttggagctttgcgctagggccctgccacactgcaggcagacgcaggggtgctgctgtgggccgcctagtggatgggcaggtgggagctgtggccgaaggtctggccacactcaccaccaagcatcaggtttccggactttgtgactgtgctggtgccgcagcagattccaactgtgcacaaaactcttactacaaacaaggcacttagaggccttctcacccatgtggagcgcaggtgctgcaacagggtggagccaaggctgagactcttgccgcagtcccctcagcggtaaggcttttagcggtgtgagcgcgctggtgctggatcaggttggagctgacgctgaaagtcttaccacactaggcacaggcatagggccgaagcgatggtcacactcggggcaggagtacggcttttcaccggtgtgtacccagtggtgcttaaccagatcagagccacatcggaagcttctgccataacccggacaacggtaaggcttgtcaccagaggggctgccttggtggtgaatgaagccggggaggcaggctgtggtcagtccacatttccggcactcgcaggttttggggcttgtagacggttgctcttggcaaaggcttcttcctccccagggctagagcctgaccattttccgggcgggcagctgccccgaccacaccaggaagggctgctcaggcggagccacctcgcaatccaggggtgacctgggggctccccgggacgcgaatgtcccgctcccccgccgccccgccccgtccggattctccctcgcctcttctggcgcggccgactgcgctgcgagtgaagaactccccgtttcctagatgccagctcctgagctcacgagcacgtccagagcggaggacactcgggacaccggggtccagctccggaaacggaaaattccacaagcccgtcactctaggaagcggcagcgaacgttctcggtaggtttaaccctcttcttcctctgaccgagcgagggctccccgtctgcggcgcggtcaggaccccgcactttcggcccggctcggggttctcggagtccgtcccaaggccgggccgcaccaccgctggggggcagcgaagcgagcctagaggagaaaaggcggtccccgccgagtgcacgccgggggcggggcacggcacgaaggctccgtggtcggacttctgggctgttcggaggccctggcccacctggagggccctggaagagtttccagcgcttcccgaggtaggcgtgagaagctcgacgcggaccacatctccctcatgcaccgcccgcacgtcccaggatgcgctgcgattaaggtactgccgcgcctcgtgtgcaaggacagacttccggggtcgagaactacaacttccgacttgcatcactgcggtggcgctaaacagcgtcagcgaggcggtgcccgacgatttccctgtcttccagttccgctccctgggatcagcggcgagaagcggggcggagtctgaggcccgagccaagatggcggctgcgaagccaaccctcacggactcgctctcgttctgcctcgcgcagctcgcggcggcggccggggaggctctgggtggggaaaaggacccagcgaccaacgagacacccctgagccgcgcgctcctagccctccgcacgcgccacatcaaggcagcggggggaatcgagcgcttccgggcacgcggcgggctccgccccctactcgcgctgctacggcgagcggctgcagcgggttccgccccgtcccaggcaggccccggctccgccccctcgtcggccgcgtcgggagcttctagccccgcccccgcgtcgggccccgccccctccgctgtgtcgtcgtctagtcctacgccgccagtgcgcctgcgcaagacgctggacttggcgctcagcatcctagccgattgctgtacggaaggggcgtgccggaccgaagtgcgcagactcggaggcatactccctttgggtaagtgctccgcccccgtttcctagaaagattaggtttgcaactcccttgctctctagacccgggcagtctggagttctttgtgtcctatcccggaataacgtgctttgtgatggcgcatcgctcctgtttctcaatctgttgtgccccgtgacgtcactgcactctctatagatgagagagagccctcccagaccagataattgtagccattatctaggaattggttgttgaggacttctttcgaagctggactagcggaggccaaagagttatttggtgatttt

SEQ ID NO: 63259 - DNA, 1016 bp, Homo sapiens
cagacagcatccagaaccgaacggcccgtgccctggggaacttagccatggaacctgagagctgtggggacatccactgtgctggtaagaggctgtgaggttggggtctgctagggcttggggcagaagaaaggcttgagtgtctgtccttgttcaccctctgtgctcccctttcctgccctcaggtgctgttcccctgcttgtggagagcctgacagcctgccaggactcgcagtgcctacagagcgtggtgcgtgccctccgtaacctggcagactcaccccagcaccgcctggccttggcacagcagggagcagtgcgtccgctggccgagctcctggccactgccccagatgctgcactgaccttagccctcgtccgtgccctcctggaactcagccgaggctgctcccgggcctgtgctgagcagctaagtctgggtgggggattgggcccactcgtcagcctggcttcccaccccaagcgggcagtacgcgagggaaccattctgatcctcgccaacctgtgtgcccagggcctgattcggcctgcactgggcaatgctggtggcgtggaggtgctggtagatgagctccggcagcgccgggatcctaatggagctagcccaacctcccagcagcccctggtgcgggctgtgtgcctcctatgtcgtgaggccatcaaccgggcccgactgcgggatgctggtggcttggatctactgatgggcctgctgcgggaccctcgtgcaagcgcatggcaccctcgtattgtggctgcccttgtggggtttctgtatgacactggggccctgggccggctgcaggctctgggacttgtgcctctcctggctgggcagctgtgtggtgaggctggtgaggaggaagaagagggaagagaagctgcttcctgggactttcctgaggagaggacccctgagcgggcacagggtggaagcttccggagcctcaggtgagtccctgcctcagggcttgggagggtgagcagtgcagtga

SEQ ID NO: 63260 - DNA, 1912 bp, Homo sapiens
tccctgcagaagatggtgaccgccttgggcactcactggcacccagagcatttctgctgcgtcagttgcggggagcccttcggagatgagggtgagagtgaactcgactcccatcttaaaagctgcgggtcccctcgacgtctcgccccagcccctccgacctccggagtcctcagggccatggttttccttctgctctcttctggccctgccctctcctacacagactccggacccgagccctccccgctctgtcccgccatagacccggctcctccttccccaaggctccctcggactgcccctccttcggccccagatctcaggtcttgtgggtcccccgtcccgcccgcaccctttgctttcagcccactcggttccctctcctaggtttccacgagcgcgagggccgcccctactgccgccgggacttcctgcagctgttcgccccgcgctgccagggctgccagggccccatcctggataactacatctcggcgctcagcgcgctctggcacccggactgtttcgtctgcagggtgcgagctgcggggcggggcgttggaggggcgggtcaagggtacagggctgtggggcggggccttggaggggcgggtcaagggtgcagggcagggggcgggccctcgggggggcgggtcacgggaggtgctgctaggaacctcgggtggggcgagttttccgggcagggtcccaccggacgggattcttcgcgtctagggcgggctgcggggtcccagggcgttatccgctagtaacgcgcgttgtctggcagtggccgctgacctgtctgtcctctttcgcggcttcccttccccaggaatgcttcgcgcccttctcgggaggcagctttttcgagcacgagggccgcccgttgtgcgagaaccacttccacgcacgacgcggctcgctgtgcgccacgtgtggcctccctgtgaccggccgctgcgtgtcggccctgggtcgccgcttccacccggaccacttcacatgcaccttctgcctgcgcccgctcaccaaggggtccttccaggagcgcgccggcaagccctactgccagccctgcttcctgaagctcttcggctgacagcccgctcggctcgccctctcccccggaggccgcgccctcccggaaaagccgggtcctccagaccccgaggccttgctctcagagcgggaggccccacccactggagagccccgcccctaaggtactatgagtcctcaggggtcaagttcagaaacggcccagccagacctaaacccacacgcccacaaagtggattgcacacagacaagaactcccgtgcgggcctccactctattcccacccttgagggagcccccttactgggggagggtccttgcaattccagcgaatcggaggccaggccaggacgtccttgctccctgcaccctcactgttctgtgcactttttctacctacataaacacacgcattccacctctccctggtgctgtctctgaatgcgcgcaggagcttggccctgactccccacccccgcgctggctctgtccccggccgtctctaggtcactgccctgtggccgcagcgggacctgcagcctcagcccttgcaggtagccactcctgcacttcctacttcaagtatcagatgagcctgaggctggaaagtgtggcgactcgcgcaggactgtacagatagtggcagagccaggacaagagctccaactggggccccaccgaatattcccgccctcattactctttcttcagttctatattttgttttgttttgttttgtcctaagagatgaggtctcactttgtcgcccaggctggagtacagtggtgccatagctcactgcaacctcgaactcctggtcttgagcgatcctcccgccttggcctcc

SEQ ID NO: 63261 - DNA, 797 bp, Homo sapiens
ggcatgcctgtagtcccagctacttgggaggctgaggcggaaggatggcttgaactcaggatcaatgctgcagtgagctatgatcatgtcactgcactccagcctggatgacagagcaagacccagtctcaggaaaaaaaaaaaaaaaaagatttgaactgcagctggggttgcacggcagagggacaggcctccttaggctgggcagagtaagagaagtctctggaatcagtgggaccttcgtttgcacaacaaatgctttctggctacctaactctctctgccaggtacttcatgaccacagtgaccaagatgatcccagggtcaaaatccagccaaagagcagataacaatcagtatagaaaacactgatttagaccaggaatcactaaactgtttctactccctggttttggaaataaagtattactggaatgcagccatgcctatttgtttacagattgtctatagctgtttttgcaagacaatgacagaactgagttgctgcaactaagattataaagcctgcaaagcattaagatctggccctttacagaaaaagtttgtcaatctggaccatccattatacagagagcagcacccattaagcctggcagaaatattttagaacgagacacctgggagggactcatacagtggacatgggagaggacagataccatggggagaggatttggacttgtctgagcttgagggcactgaccctgaggtggggatgtaggagaaaggacactacgttatgggaatgagggctgggagcttcccacgaaacataa

SEQ ID NO: 63262 - DNA, 1943 bp, Homo sapiens
tctttccaggctctcctctctccttctcaggaccaactatatcttttttttctggagctcaccaatttcccctatcctgggcagctggcagttttattccatcaattgcattcttatgcaatcttccacaaagagaatagggataaaggggaggggacgggatttgggatccagatgattgagactcagaagtctgtgtggggaatggagtgcggctgctaggctggtgagtgggatgagggtcttccagatgtgggaagtaagactgggttacaaagcaccactctaatcactggggagacctgcctgaattctacctaatggggcacgagtccatacatatatacacataagagcccagcgaaagcagggctgaaagcagcaatacgtgaggctccaggggtgcagctcacctttcacgagccaggtggccgtggcagctgaaacagtggcttttgcgttccccacccctatgcccagcaagactgcctgggtggctagggagccggagaggctggaagcaaacgcctggagaagaaaacaagtagggtgagaagcgggcgtaggagcgtggcggtctaagtgccttcatctgttcttgttcttggtgtatgaggcatgtcagaccccccgccccccgggctccgagtctcagtcacccgtccattattggggagggaggagtggcctgcactgtcctctgccccagacgaccgagctgacctgcacggaatcccacagctggtagggcaagtagtccgggctgacgctatcagggaagccctgaggcaggaacacggcctggagcccggagaggggcggtgagggggccccggaagcccccacttcgcccgcatctcgtccttcaggtttgaccgtgaaggccctggagagcccccaccagcgccagcccccgacctcccactgcaggctcccgtccgcggcggcgcggcagccccgtgcctccccggagccgaactgctcggaacacagcggggtctccaaacccgcgtcgtcagccatgccgagcttttggatcccagccccgcccctgccgcacggtggacgtggcaggcggcacttccggctgggctaccgcggctgcagagggacatctttcaagaacaggcgccggcctcggcgtccgccgcgcagttaggaaactgactgtcgctctctccggcctcggcgctgcttcggacgccccggcaccggcccccgttgctttgtagcattctgcagctgggctgcaggcgccgtgggcctccgccagttgtgttcgagacgcggttcggccacagaagttttagcttgtgacttttggcaagtcagtggccctctctgggcctcaggtgccttttttgctgtgagaccagcgactgtatttttaaccctgattttatccctagatctacccaacacatagtaggtgctcaaaagatatttatgagtgaatgaatgcatcatgagaagaaattggaccagatgaggccctgtgaagctgcttgggtctttttttgttcttttttttttctctcttctgagtgtccctggcctggactagaaattctccatccttcggccttctgcgagactgcaggaacattacttttgaaggatgctaaggaatccgagggatgaaaaaaatcaagagattgcaatgatgtcacaaaacaaggaaacaaggcaggaagttcttgtgtgtttttttgcgggagagagtccatgaaattggggggagtccaaagagggagtgtttctgtccttggaactcaccttttcttctttccatttctcctcttctccttcccatctagtgcagcatcttcactccgaagcagaaatttgccaaaaaagcatcctctttttatcagaaaataaaatatcctggtttcttagcctggcattcttggatccccacagtttgatcccaaccgacaact

SEQ ID NO: 63263 - DNA, 1414 bp, Homo sapiens
ggaccagaggccatgaaggttatgaaatctgaaattttaaaagaatcgttattatataattttcaattttacatattacctatattactcataaattgatataatcttatgagcaaagttaaataccaatgtccggagcagccccaggtcccagcacagggagtcagccctgcctgaaaagggctgcagacaatcattcattcaggcctcattcagccacacctgtgatcgcatctcctgtcactcgggggtaagggggcgggacctggagccctatccattcagcggcgccgttgtcgagcctgtccaatcaggcgcgcagccgaaaaagggggcgcacttcctgtgttctgggctggccttttcctctcccaggtgcgcttccctgcttgatctgtgtaccctgctctttctccttcattccgcagcctcctttgccctgtgacctgcaggtactggacggtccctagagaggataccgggacgctcctgaagccgcgagatggtgagtctgcggggctgagcttcccgagacgcggcaggggtcggctgggaaccgggcctgcccctggcggctccggggtcggggcccggagtctcctcggtcacacggtgcggctcggccggcagctgggaccccgggcgcctcgtcccgtccctgcgcgacgaccttggtcctgccttgagccctctctgggcagtttcgcgcccgcagccccgtgtctccccgcgttgtgcggtgatgacgggaggggccgtaggggagaaccccggctcggggttcgggcgtgggaggagctgtggtccgtggggtccgtagtcctttctttcttttgttaaaaattaaactgaggtttggttaaaacgttaaagattttatctgagcaaataacgacccgtgaatcaggaagccacaaccatggattgtggtttggggtccaccggaggggcttgaaggaaagggtttaataagatgcatgaggaagcaaagccaattcagtaattgattggctacaattacgtagtccccttatttgaactgtccaggcggaaattccctgattatgtaatcaaaggttaattggtggtttgtggttggttaagagtgttttcttttcctttaagttatttctaagaaatgcatgagttacgttttggttttcttaggtagaaacccagggcactacagccacttcagtcaaattgcctcccatttaattattttaacaccccacagggggactgattttccctgcattttccaaatctatggcaaggagggtctcaaatccaccaccctgttcccccaacctaattcttctaaggctttcagtaaaattctaaattttcacttccttctcctgattctcaactgccagcttcccctctgcaattcacaacgttatcaactatt

SEQ ID NO: 63264 - DNA, 1317 bp, Homo sapiens
ttaaacttaattagctaataagatgccttatacaagcaaaaccaggtacgggaaagcaagtgcatttcaagtccaagctcaccccttaaattagctgtaataccctcagcaggtggccccacctcaatgagcctgtctcccattcaaaaagcagaacgagtgagagggcggggcctggagctttacccaatcagtggcgtcggagtggaaatcctccaatcgggagtagccggagagcaggggcggcttccgggatttggcggtggcctttgttggctgcagtaagagctcagtctcttcaccaggggctcccagtccttccatctgggaggccaaggcggcttcgcgttctgagaatagacagaacctctgttactctgtgaccggcaggcaccgggagatccgtagctcagacgccaggacatcccggaagctgggaaatggtgaatgtgccaggtcgggggtccccagaagagggagaggggcggtcggaagcggcgggaaccctctttgaggttagcttcggggtctgggccctgagtccccgcggacgcaactcggcccttggtcccctccgccgcaagatggcggccgggccggcagccgggaccccgcgcgtccggtcccctcccgaccccgcagagcgacctctgccatggccggagccgtctttgggtcgccgcagcccggcgtctcccgagattgtgcggtgagaacgtgagggtcttaggggaaatcccgggtcggcgtgtgattcgtgtgtgggaagatactgtgccccgtggtgtcccagtctcctttttcctcttacaaattaaggggagtcacccttaaagcgttaaagggttgatttaggtaaacagcgattggtgaaatgggaagcctgccgccgtggtttgtggtttagggtcctctggagcagcgatttcaaaatcccagggctcagcttaggaatgctgctggggaaaagaaatagggacaatctctcttccactttggctgtagaaaacgaatacatttccacagaaagtgtgctagattaattggtcaattacaaacattcattaaaatatcaggtcctctcttttgcagtggaggatttgtgacagtggatatctgtgttccatattctactgctatctggatgtccgactttaatgccaaatgttatgagacaggacttggcacctcctagaagtgttcacatatactaaatgatctgctattatggaaataattaaatgacatgtttcttgctcgaaagaggtattttggccttacctgttgaagtataaagtgtaagtgccttacagtttc

SEQ ID NO: 63265 - DNA, 3047 bp, Homo sapiens
attagaagaataggccagcccctcttccacgttccaccacggcccgcaacatcctcctgggaccccagcctgcatgcccctataagatgcttttgcactggttcagtctatgtatcatgcgagggcctaattgaaaacacgtgaatgaagtgtacggccttctgttcccagctgaggggccccctcccacggtggcgttagcagtggggtacagtgcggtaagagaggtgctaagggacgggatgagggtctttcttgctttaaaggtgtctaaatatacttcttcttaaacttaattagctaataagatgtcttatacaagcagaaccaggtaagggaaagagcaagtgtatttcaagtcgcagctcaccccttaattagctgtaatacccgcagcaggcggccccacctcaatgagccagtctccctttcaaaaaaaaaaaaaaaaaaggcactaataatgagggggcggggcatggagctttatccaatcaggggcgctggagtggaaaccgtccaatcaggagtgaagccggagagcaggggcggcttccgggatttggcgggggccttcgtcggctccagttagagctcgggtctcctcgccacagctccgagtctttcgttctgggaggcccaggcggcttcgcgttctgagaataaacagaacctctgttgctctgcgacttgcaggcactgggagattcgtagctaagacgccagggcatcccggaagctgggaaatggtgagtgtgcggggtcgggggtccccagagggagggagggcggtggtcggaagcggcgggaacccgctgtaggggcacccgggcctccccgcagtcagcctcggggtctgggccccgagtcccaactggtgcagctcggccctcggtcccctccgctgcaagatggcggccaggccggcagccgggaccccgcgtgtcctgtcccatcccgaccccgcagagcgacctcgtccctggccggagccctctctgggcagctccgcgtcgcagccccgcgtctcccccagattgtgcggtgaggacgggagcgtctcaggggagacccaggttcggtgtgtgggaagaaaccgtgccctgtggggtcctcagtcactactcctcttaagaattaaagggagtcactgttaaaacgttgaagaatttgagcaaatagcgatttgtgacatgggaagcctgcagtcctggtttgtggttcggagatccccagaggggcttgaaggaaaggtttttataaggtgcatgaggaagcagaccaaattaaccgatgggttacagtttgtagttgccttatttagactatgcaggtggaggtgaattggagctttgtggttcgttaagtctgaattttgttttcccctaaagttgtaatttacaagaaaagcatttgagtttggttttggtttttctccctagaaacctggggcactataaccacttccgtataatcgcctgctcattaatcatcttaacactgcccaggggaactggttttccccctgcgctttcctaacgtgtagcacgcagagtctcaagtccaccactgtgttcccccagtctaactgggcttgcaataaaatattaaatttccagttccttcccgacatttccaaaggccaacttcccctctccagttcacattcttaactattggtcatttattgtacatttcagacagtattttactcattaatcatgatttcacagagcagtggatgacacttttttaaagatttgtgtttttttggcatacatttcacgtgagaggaaagcagagaataaaaaatccctgacactccactgcaaaaaaaactgtgcctctttttcattcatcttccccaggcacagacacgttatcggaaagaatgtcttttgacttgaggttttgctttggaaactttacagggccctgtatagccaccctctatccagtcttttcctgttcctgaatttcagaactgtctgggatgactcaagatgcccacagtggccatgtctcctggagtgtttagtgactgtcagccccaggtcacctcctgttagaggaccgcccaaggtatggaaatgtagtccctcaggggagcagctggatgccctggggctgagagaaatctcctgggacacccttaacctaaaaagataaccccttgggacataaggattttatttcttcaaagctagttttcatcccttggagacacattgctggtcagccaatcgtttgctggtattgaggggaaacagtcacaaatgattcctgccccctagattcattcagatttgtgaagggagaaaaactcccaaaggaccaaaaaacaaaaaccccaccccagtgaggtggtgcaaactcggctgcggtgtccatggggcacagtgcaggatctgggaggatggtccctgagcattttaatgagcagtattggggtaggagaatgtctcaaatgataccgtgacctgacttgacacttgagccagatatgtctgtattccaacagcattaccactccctgagtttgctgccttagattgttcatttatttctacttcagtttttcagttagtgtaaatttcatcagtagagcttgaaagataaaaaacatttccaaggccatgaaaggtggatttcagaaaattaaaatatcaagtcatacttcattgttaaaaattcttactatcttttttttcagcagaatgagtgtagtaagtttctcaggtttgttctttttttgggagtaatttaaaacagaatctcagggctcaccttttggaaatgctgccagggaaaagaaacagagaaaatctttctttcattattggctgtagaaagtgaatacattttcacaacaacgtgtggtaaattggtgaattacatagtttcatcaaaacatcagtttcttttttttgtagggtgaagaagttatgacagtggatatctttgttctttatcctcttgtctggatgttgagtttattttttattttttgtttttggagacaggatctctcctctgtcacccagactgaa

SEQ ID NO: 63266 - DNA, 2444 bp, Homo sapiens
tgttatcatggaaataagtaagtggcctatttattgtctgaaagggatagatactttagtgttttctgttgaggtataaattataaaggcgtttcactttcctttattctataaacactgtttgagtagttttgctttcttccaacactgggcattctcattgaatactaattgaataaccctgactgggaagcagaagcctgagctcagagagtgcaaactaacctggtcttgagcctgcaagaagaggtcactgaagcccagttagttcttccaggggagtttcccctgcaggtttcccagcctgctcaccccatccatggaaggagccctttatactgagaagctacagagccctggaaagctgaaagctgaaaatccacagaaagaggcatttggggttgggatggaaggagggttgggaggctctttctgagggtagaaattgtgattgtcctgattttggtttttcttcccagaaacccagggcactacaaccacttccatatagtcgcctactcattaatcattttaacactccccccacccgacaactggttttccccctgtgttttcctaatgtgtggcacgcagagtctcaaatctaccactgtgttcccccagactgaggcttgcagtaaaatattaagtttccagttccttccccacattttatttgattttgtcaaataaaacaaattcaggtttaggtaagaagttccttaattctaaaggagtattgcaatagggggaaagcaacagctgtaagatctttgtggatctcaaaggttaggcagacaaagactttctttcacagggaggagcaaacaagctcagaaggtaggaggggaagggcaggattaaggtgccaaaatcagattcgagatcagagaatgtttcactctgatgtcagcctgttcttaggaggggcttagggaggggttgaatgttgaccaggctgtgagtgtgtcaaagtccagcaacctggagaaaaatacaaagttttgttaagtagtttattctgaacactgaagacagagctgttcagctgagtcagaaggggaatttggagagtctgtggctttgtgatgactaaatcagggagcatcatcgaagtcataatagggttgttttttgcagtaggctgttcttggaaaacacaaaagatgggggatttctttaatcacagctatttaccaggttactgttcctattttttcccactacttttttttttgccctgtatgtatttatctcatttggctgttctgaactatatccttatgataacctgataaacataagtaaagtgatttgctgagttatttgagtagatctttgaaatgattgaacttaaggatagggttatgggtgccctcgatttacaggcagtagcttggaagtatagatagggccccaggcattgtgactggcatctgaagtgggggcagtgttgtgggactgagccgagaacttgtggggcctgcgctgactctgcgtggtgtcagaattaagtttttggcacccagttgatgttggaggattggttggtgttcagcaaactctacacatttgatgtcagaagacagacctcacagaggcctgggctggagagagactcccaagtgtctgtgggaagagaggctgtgttctgcacacaggctgccccactgtgcattgtcctttgattccaggtctcctgctagggtgagaagggactgaacactgagaggaaaggagttctgagaagagaccccctccccgacccagctgccaccacatgattcccacccactcctgaacataccaactaggcattgacatgtccccgtccatcccaggagaaggcttgactgtcaggaattgcacccacagcacctttgcttccggtttcctgccaaaaacccacacaagtgcctgaggactcctggcttgttgtaatcccagacactgaatccgtagcagcagcctagtttctccatcaacctaggcttgtggaccatccaatcataatctcatctgcctgcgtggacccagggatatgtcagagcatagtcccacctgggccagtatctgtagcacaaaccagtccttccaccaacttggtactgccccctgctcatggctcaatagcaccttcctctcttctgccttttacttccccacaagccccttctttatgtgtacacggtgttcccaaggtcaccccacaggtgcctgaatccagcacctattggaactcagatgtctgtgagctcaagaccatggcgctagatctggctgttgtaagagcaaatacaaattagaaatacaagacttaatccttcttgaaaataaggaaagaaatttttctttttttttttcttaaagcatttactttggaaaactttcatatgtaaattatttttctgttttacaacctgtctaaatcactcttaacagct

SEQ ID NO: 63267 - DNA, 578 bp, Homo sapiens
aggaggtagtgatgaaacataacaatacaggactctttcgaggtcctgtaattggaatgagtccactttaaatcctttaacgaagatccattggagggcaagtttagtgccagcagccgcggtaattccagctccaatagcgtatattaaagttgctgcagttaaaaagctcctagttggatcttgggagcgggcgggcagtccgccatgaggcgagccactgcccgtccccgccccttgcctcttggcgccccctcgatgctcttagctgagtgttccgcggcccaaagcgtttactttgaaaaaattagagtgttcaaagcaggtccaagccgcctggataccgcagctaggaataatggaataggaccgcggttctattttgttggtttatggaactgaggccatgattaagagggacagctgggggcatttgtattgcaccgctagaggtgaaattcttggaccggcgcagtttggaccagagtgaaagcatttgccaagaatgttttcattaatcaagaatgaaagtcggaggttcgaagacgatcagataccgtggtagttctgaccataaa

SEQ ID NO: 63268 - DNA, 616 bp, Homo sapiens
agggcaccaccaggagtggagcctgcggcttaatttgactcaacatgggaaaaatcccccgggccggacagggacaggattgacagattgatagctgtttctctgttccatgggtggtggtgcatggccttagttggtggagtgatttgtctggttaattccaataaccaacgagactctggcatgctaactagttacgtgacccccgagcggtcggcgtcccccaacttcttagagggacaagtggccttcagccacccgaaattgagcaataacagatctgtgatgcccttagatgtccgggactgcacgcgcgctacactgactggctcagcgtgtgcctaccctacgtggcagaggcgggtaacctgttgaacctcattcgtgatggggatgggggattgcaattattccccatgaaggaggaatttccagtaagtgcgggtcataagcttgcctgaagtccctgccctatgtacacactgcccgcctctactactgataggatggtttagtgaggccctctgatcagccccgccgggtcagcccactgccctggtggaacgctgagaagacagtcgaacttgactatctagaggaagtaaaattcgtaaca

SEQ ID NO: 63269 - DNA, 507 bp, Homo sapiens
ttctcggcgtcatggcggggtgggggtctcggtgccctccctgccggagccgtcgtcccgccctgtcccaccagctcggccccatcccgccggctcccgttggggccggccgggttcccattgctgccgctgccgccatccttgcctctgccacaccgcgccaccgggcccggcctggcccgcttgctctctccagccttcccgctagggcgtctcgagggtagggggccggacgcctgtcgccccctcctcgtccgcccccgccgtccaggtacctagcgcgttctggcgcggaggtttaaggaccccttggggggttgtccgtccgcccatgggtcgggtgcggtgggcccgcgggggagtccgttcgggaggggcccgcccctccctcgcctcccccgccgactccatcccctcggccagccggggccgcgcctcactttcaagtcgccgctgacgctggtgggggctttaccggcggccgtcgtgccatcgcgcgcctgccgc

SEQ ID NO: 63270 - DNA, 922 bp, Homo sapiens
agcccaggaaaaaaagaagagtcatatgacctaggggatgggcacagagatatgccacaatgccctctcaggagggattcaggcaggagagttacatcacctagaaaatatggcccaggtatatttcacaatcccaattacaggcattgcttaaacaggagagccacatcagctgggtgcttggcccattgatttgtcacactcccttctgtagggagagtctaggcaaaaaaaaaaaagaacagtaaaatctaccaggtgctgtccccagtaatacattaaaattccccaggtaagcaggtccaaggcaaaagaggagagacgtatcacctaggagatggaccaagggatatgtcaaaatttgaaatggggtggggcccaggcaggagagaagagtcacgtcacctagcacatggaaccagtgatatgtcacaatgccctttgtgggctgagtccaggccagagaggagagtcacatcacctagctgattggtgcataaatatttcaaaatctcctctgagagaatagcccaggcaagagagtcatatcacctatgtgcttggcctaggtataggtcataatcctgtgtttagacaggaccagcagaagtgtaaaaataaccaggtgctggtaaagggtatgcgtcaaaaccacacctgcagaaaggtccagggaatgagattcacaacactgcatgtttcctggctccaaatttgaaagtcaacacctttttgagttctgtccaagtacatgagtcacaatgtcaacagtggactggatctgtgcatgagagcccccatctcatctgaaaacagtgtcctaataaaatagacacagcctcacagggtgtttaatcttcatccaaaagtcaccatcctacctatggtccagatccatttatgagagtcagtttcacctttc

SEQ ID NO: 63271 - DNA, 747 bp, Homo sapiens
aaatctatctatgtgagtcaatatttcttctattttgtggttccacatctgagagacatcatgatgcctgggcctagtaaagttcacaatcctacctgtgggtgaacagaagccaagagagtcacatcacctgggtgatgggccagagatatgtcacaatcccttctgttgacatgtcccaaaaaagaagttacatcacccaggtgctaggctcagtgatatgtcacaatgcccagtgtaggcagggtacaagcaggagagtcacattacctgggtgcttggcccagtggtatgtcacaatcccttatatagggagggcagaggtagcaaaagagagtcacattacctaggtgctggactcagctgtatgtcacttttgttttggttagcagggtctagcaaacaggagagtcatatcacacactagtgggctcagtgatatgtcaaaatccccaagggaggcaggacataggcaggaaattagagtcacatcactttggtgatgggcccagagacatgtcacaacgtatcctgtgggcagagcccaggcaggagagtcacatcacccaggggctaggaccaggtatattccagaatctcaactcccaattgtttgttaggcttccacaagagagtaaaatcaatcaatcaggtgatgagcaaaagtatatgttactatcacacctgcaggaaagtcaaggaatgagattcataatcccacacactaccaggcttcaggtaggagag

SEQ ID NO: 63272 - DNA, 1025 bp, Homo sapiens
caagtcaaatacttggattttatcaatggcgagacaaaagaggcaaggtgcgcccaatgcacaaatgctaaagtaaacaatcagtctcctttgcgaccgtcaggattagaagacagcctgagtccttccaggaaattcatgtaagcaggtccccagaactcgctgacaaacactgcagccgaaggcgggtatgaggccaagaaaggccaaggaatcactgcgacccctccaggagggcgtggggacggccgagcacaactaggcacaaaggtagaaacgcaacatctgggcgggtcccggcgccacctccgagtctcagggcctccacgcgccccgggggccagacgctcagacctaggactaccggtcccctcgtggtaggcaggtgaccgattccacttaaaggaggccgcaggccttcatggaccccaaagcctacatgccaagtcaaccccacagagaggccgccccgtctctcagcaacggccgcagccaagagccgccgcccaccccggcccggatcagcctgcccgcggccttcctcctgctgtcccctatcccgcaggccaaatcgggctggtcttaatcccgaacggtctgtggggccccttctccactcgctggagtgcggggcggtgggagagagcaggggctacaaggagggtcgacccaggtgccactgccccctcagcactcaccatggcgactccccagagcctgcagcaagcagcacccgccccgcgcgtagcctcccgcggtcatgtgacgctgcggcccctccaagccccgccctctctagccccgcccccgggccctacaggcggctcattgattggcctacttctaggaacccgagtctcgcgtgcttattggccctgtcacttaacgctagatggacggacctgagcgccagccaatctcaccacagcgtgcgagagtgggcggagcagtgcagggcagtggggatcgcccggcggcaggcaggagacaacaggagggaaaggcagtgtgtgatgagtttgtca

SEQ ID NO: 63273 - DNA, 407 bp, Homo sapiens
ggctttattaggttcccgcctgagggaggatagagaatcaggacaccctgacggccagcctcagggatctgaacttccccagcctggcgcagctcccatatctgagtgcagggacagtgcgcagcagttacacaataatcaggagaccagaagtaaaacatgactttacctctgaggaagcagccacgggaagtccacagccagacagagaagaaaacagggagcacaggggttcaatgatgccacaaagggtatcctgccctgccccccacccccttaccccttcggtgcactccagcctcatttgggtttttattttgttttgtctttaaacagtgcctcattctgtcacccaggctggagtgctatggtgcaatcatagctcaccgcagcctcaaactcctggg

SEQ ID NO: 63274 - DNA, 967 bp, Homo sapiens
tcctcttcctcctcattcttattcttattcttcttttttaagatacaggatttcaatctgccacccaggctagactgcagtggtgtgatcagagctcagtgtaatcttgaactggcctcaagcgatcctgtcccttcagcctcacagtgctgggactacaggtgtgagccaccaagcctggcctacacattcttaagcacacacaaaacattctcccagatatattgatcacgttaggccacaacagaagtcttaacaaatttaaggtcaaaatcatatcaagtatgttttccaactacatggagtgaaattagaaatccgtaacagcacacacacaaaaaaggaacattcacaaatagtgaaaactaaataacatactcctaaacagccactggactaaaaaggaaataagaaaatggacctcaccctctgcctgccaccgcccacccagctccgcccaccctgccagctccgcccaccctgccagctccgcccaccctgccagctccgcccaccctgccagctccgcccaccctgctaccgcgatgagctgctactcccgaaaggcccggccagctccgcctccgcgctcagccccttccccgcctcgggagggtgagcgggccaggtgcacaccaagggccagccgctccgggaggtgcgcgcgctcgggggtcccctgcatcccccgcagccaagtggattcgtggctggtgcacagcgtggcagctgaggatgcagacgtggctcacgggctgctcggcgccaccgccacgttggccagaggagtcggcgccagccaggctgcacagtgggggcggcggggatccccaagcagctcggagtagcccctgggccggcggggaagaacgagaaaaatgaggcactaagaaaagagcatgaagctggggctcccagttcccagcacgaggaaaatgtgtcaacccagaagaactcattacaaagc

SEQ ID NO: 63275 - DNA, 306 bp, Homo sapiens
tcacaataacacatgaagtaggaggaatcttggaagagaaaacaagtttcttcatttggcagcttaaatttcagcctctacaagttcacacaattccatagcaacctttctgcctttttcttcctgtttccaagctaaaaatagtgaaatattaagaaaggaaaaaaactgcatgcccttttgccctctacctgagttaaagattaaaatatgtgaaatatgcaaaagcaaaactgatcttagagataacgtattaaggttacaataaaaatcaaacagaaagcatccataacaaatataaaaacc

SEQ ID NO: 63276 - DNA, 2549 bp, Homo sapiens
catgtgaggacaccaagaagacagccatctgcaagccaagaagagagccctcaccagaacataatcatgcttttgttatggcagccaaagctgggtaagctgattttatatgaaagaataaatatgggggagggggtgtataacaaaatgaatgtgatctttccaaataaaacgctgatcttgttttgttgaacagtttttcagaaactcctataagtttattatcctttgctcttttatataaaaatagccataaaaagtggctatttttcccaaaaggttgctttatgccaattagaacaaagtcaggatttgcaaatacttgtgccttacagaaattggaatgcataacgcataccatgtaaaccttacacttctacacaattaactggaataattggaaatgatttaaacactgaaataatctcccgcaaagagtcatattgcaaagtccagttttgtcaaaatttaacaaatttagttcagtagtaagaatgaaagtaactctttggaaaacatgactaaactgtttttatactgcatactggtatagctcctacactgtatttcttgcacaacctttttctgataagcatttttactacagcccataaaggatacttaataaaacatgtaacatgttttctgttaaaagatttgaaaaacctacaagaattctccttgaaaaatgcactaaaatcagcttattaaaaagtctccagccatttcaaattactcttgatttaaaaaaaaaaaaaggcggtggggggaggggaggagagaaaggtagtcattttgaaaaaatccactcagtggaaaaggaaaaaacacacccagatctacatgttggtaacaaacgagggccttacgaatggttttaactgaagtagttttaactcattagatgttaaggcttaaaggaatgtctattattccagtaaagaattgagacacgcttcaacacagcgatcactgaaatgagatgttttaaattacaactattacaccatgaactcaatgtagaaaggaatcgtttcaaattcaagaaacgagatagagagatagagagatagagagagacagacagagagagagagagagagagagagagagagagagagagagacacacagagacattcagacagacagggatacagatctggaagcagacaggccaaatttgtaacagtggatactgcgaggggtggggaagttaggagcgcccaaaaaggaggaagggcttaaacaggggctttattcaatcatgacccattaaaaacgatgtaaaggcaggattcgcgattgcacagcaaaaatataataaatagatgaggaaggggaaaaaatctccaaattcgccgaaactcaaaatcattacacgcggccccctttgtcccactcaggcgcccgccccggtcgcggaggggccgttttggggaagccccgcacccgtcggaaccgggaacaaagccgccccggccgcaggaggggttctcggagctagggcctggcctcggaggcgggcgtgcggcacactctcgccggggctgcggcccgcaggctcccaccgctgtcaccgccgccggcgaggagagtctggggctccagacagccgcccggtgagcccaccaaaggcgcgctcctccagtggccgggacacagcaagaaggggcttggccgtctggccgccgccaggtggacgctggcgggccacggccccgggcttttcccgggaaacccctcggtgcagcccgaccggccccggatccccgccgccgccggcgggccccaggatctgcccaccgctcggcctccgggagcccggcgaggcccccctccacagacaacggccgccaagccactgccgcccgcccgcgcgcccggcccccggcacccacctgttggtcgcactcggggcatgatttggtggccatcttcactttcttggctcgagttgcagacatgctcctctcccttagcggcggcagcagcgacggctcgggctcctcccctcacacttcggcagcccggcctccgcccgcccagtccccgcgggcctcaaacaagcctctggcgggtgcgcgcgcgcgcgtgcgcgagctcgcgcgggacctgggcgccaagggggcggggcggagcgtcggccggcggctcctggggaccgcgacacgcgctcccacggcggctcgcgacccacagcccgcccgcgagctcgcccagagtatcacgagacgaggggagacctcccccccctccgccagaccgccccggcgcggcagtggccacgcctcctctcggcctggccgactacgagggggcaaggcctgggcgggactcggcagtaacgggcgtcgagttcgaccaacgaatgcataggtagggcgggccgtagtgctgggcacgccccatccccacagagaccgtgggagcgaaggctggggaatgaatggtgaagggcgtagcgtggatcctggcatttaataaacttaagtagatgttaccaaggctaatcattgagaaattatgatagacattttatgagaccac

SEQ ID NO: 63277 - DNA, 1271 bp, Homo sapiens
tgcgtgcctgtaatcccagctacttgggaggctgaggcaggagaattgcttgaactcaggaggtggaggttgcagtgagccaagatcacaccactgcacttcagcctgggcaacaagagcaaaactccacctcaaaaaaaaaaaaagtcatggagaattgctcccactgagttctattagtaacacagggttaggccatattcactggcctggtggaagagagctacacaaagacatgcagttgattcttgttatttgcagtagttatgttctagaaagtcactgcaaacaccgaattagcaaattctgaccattgctcccagggaatatgcaggattcgtttcctgcaagcctctggtcacgtttttctcaagagattaatccagaaccttagtctatgtgtacttctgtttaaaaacacgatagttaatacatattgttcattcattaacattgaactcatggccagcagcacaacaatttgtgcctgaagcttctccaacacatgtattttttctgtaaagcacatcagacttctcgcactttggaacacgaggcagcacttcagcattgtgcttggaggggttttttgtttgtttttgaaatggagtcttgctcttgttccccaggctggagtgcaacggtgccatctctgctcactgcaacctccgcctctggggttatcgcgattacttggaggccattttaaacagcaaaatcactaacaacacccccccacccaaagtgtcactaaatagaccacaaaatgggacgtttgtttacagtatgagagccaaaacaagaagcaaagcgtcgactttgaccactgctgggaatgggagtgtcagtcaactcaatgtttttactactctgaacatgtccacgaatgaccgcaaaagcacttcaagtattgattttgggattacaaataaattttagtgagtaggctaatttgcaaatacagcatccatgaataacgattcataaataataaagatatcaggacttgctacaagctactatggcatgcaataacaattgtttatgatcaccttccatattatcacctaacaaaaagaataatctcaaatttaatgcattcacttttacataattcacaatttttactatatgcctaactgcactgtttatttcagctgacttttttttcatagcatgactttcttaaggaaagaatcattgttttcactctcattttgatctttgctccttaaactggctacctactccagggtatttttttgttgcag

SEQ ID NO: 63278 - DNA, 1512 bp, Homo sapiens
cgtaaatcagaactagaaaaatatagcaattaggtgataaaactcaaggaaaaaatagtaataaataaaaaatttatttcagaaatgaaactaaaccagaaggaaaacaaaagtaaataaataagctgggcacagtggctcacacctgtaatcccagcactttgggaggctgaggcaggaagattgcttgagctcaggagtttgagcaacatagtgaaaccccatctctaccaaacattaaaaaaaattagcccggcatgatggtgtgtgccaataatcccagctattccggtggcttaggtgggaggatcacttaagcacagacttcagtgagctgtgattgtgccactgtactacagacatagtgaggccctgtctcaacaacaacaacaaaaaagtagataaatgctacaagtattgcctgataagaaatagaaggtgaaaaaaattaaaattgaaaataaggaaaaaagaaaacaaaaagtatgtgcaaaaaagtgacaaatattgaagccatgcaaataagatctctgaaaataattaaaaatctaagctattggaactctaaattattttgagccttagaggaatgttacctgacaggcaactgtaacttaggcagctgtaaccctttgcttctgattatagattagtcttattacttacctacattgttttgtaaaatgtttcaaatgactaaagggcatcaggaaagactcttcactgttgatcttcattatagattgacttccctcttacctttctcacatagactttttggccatcacattgtcataaaatggaatgctaaataccttaaattggaaaggagggccaggaggtggctcacacctgtaatttcagcaccttgggaagcctaggtgagaggattttttgaggccaggagtttgagaccagcctgctcaacagtgagatcctatttcttcttattatttttttaaaaattaaccagacatggcggcaagcacctgtagtcccagctactcaggaagctcaggtgggaggatcccttgaacctgggaggtcaaggctgcaatgagtcatgtttgcaccattgtactccaccctggacgaaagaggaacatcctgtctcaaaaataaataactatgtaggaaaggaaatgaaaaccagttgtaaagaaaagaaaccaagccatatagaaaaggaaagaagctgtaactaaatggttgttaactcatgaaccagcctcatatagaaaatgatcctacttctttgttttctgcctacttaagcaagaacttaactctcaacttcagaacactgaccccatttccctacacgctgtgtctcccagatagtcattcccaacattttgctttaataaactctttaaaactggattctgggcggggcacggtggctcacgcctgtaatcccagcactttgggaggccgaggcaggcggatcacgaggtcaggagattgagaccatcctggctaacatggtgaaaccccatctctactaaaaat

SEQ ID NO: 63279 - DNA, 833 bp, Homo sapiens
atttgagccattgcttaatattttgtctgtgttttagcacattcaacagctgaaatcacttgagtttgcagataaggattctattagtcccttggggtgtttctgaaattgtttccatatgtcttccatggcgcaaataagagtcctcagatccctaaagatcaggaagcaagaaatcaaggaatatggaacaacaaacaccctctgaatgaaaggttttatttgctcatgaagcttatacaattgttcattcgctacagctcttccagcctctcctcattctccgaaaccacctggatttggttgagtgcactgccaagaccgaaacgtgcctgccagtgctttgaaatgttatcaatgcagtactgaattgtaaacaccacttttgtaaaatgtctttactcagttttaacctctgtaagttacataagaatgtgtcccttgtttgtgtatagcttagcttagtatcataagtttatctttaatccactttgaacgtcatggtgagagcattgggatacatgtgtcccggctattagctcacctaaactaatatttgcttgttagaggcaatgatttgcttcaaggagactcagagcaagtaggatctcaacgaaatttccctgaccatcccctaaaaacttgagcctgacttaaattaaaaaaaaaaaaaaagaaggccgggcacagtggctcacacctgtaatcccagcactttgggaggcaaaggcgggcggatcccttgagtccaggagttcaagaccagcctgggcaacatggcaaaaacttgtctctatgtaaaaacaaacaaacaaaaaaaaatgaggccttca

SEQ ID NO: 63280 - DNA, 4561 bp, Homo sapiens
caccacccagaaatttttcaaaggctctgtgcattgtaacagcaagcttgaatttccaaacccagcgagctacacatgaatggtccctgcatgcgtgggctgtagcactgggttagaaatcacaattcctgctctccttttagctgtaccacctgaacaagtcacctaacctctctgagcctcatctataaagtgggaataatactgcctgtgcttttgggtaagaaagtgctttgcaaattgtacagtggttcacaagaaatcaatgaagcttttttcctcatgcaatctcagagagacgggttggcagagggcatattaggcactcgacttgtttttcacagtgatgacgtgggagcacacataagaaggctgtgtgcttgttgttctcagttgtggaaatagatttgtgatcacctctctaagcccctcctcccctgtccctactgatcagagacagagataacagaagagcatagtacactgacacgtgggtggacagcaagggactgcatggacattacatgcaagtcaaggtcaagcgtgttttggaggtggagggttatgtttgtgtctcaactgggcagttgataacgacgacactgaaggaggagctaagctcactggggaagacttttacctagagactgaatacctggccatcaagacctagtgtagacaaaggtgcgggggtggaaccagtacatgagagcccaaataactttccagcgcctttggtggaccaagccagtttgcagacataggaatactcaaagatatcttcggtttctgttgttctccccacctactttcctcttttattggcaaccaatgtatttaatcacagtatgaggtaggtgttaccctgactttacgcatggggaaactaggctttacgaagacgaggtagtacaaactcagttaagcagtgcacggctgtatgcaactgtggatattccgactcaggtctaccttctcccctacactgctgccccaactttcataaacctaatgtgagtgtgtgtgtgttgggatgtgggagctctgggctgtttttctggttgaaaacacccagactcacagaatttccaaggggaaggaccttagagggtatttaactcattttgcacatggagaatctgggacctagacgggattttgtagattctgtatttgtatttttgattttgtagattttggtgtctccattagaccccgagtcttccagaactccctttgcgccaccctacgccacctcctagtcttgccctgctcttgctctgggcaagccagggagcctttcgccagcagacaccgttaccaaacataatagcccccttgtgctgggcattcattcttcaacaaatatttactgagtggctcctctgtggcgggaactgttagaggtgctgcgaatgccatgaacaagaaagacactgcctctgcccctctggagctcgcacggttagtcgggggaggtaaaccataagccagtaaaaagtaaccgaagataatttcagatggtaggcagaaaataaaacggaagtgatggaggtctgaggtcagatggagtggtcgggaaaacctgaccacttggcagatggtccttgaagtctcacaacaaccctcagaggccgtgggcagatccccgttttgctgagaaggaagctggcgttcggtagtcagggcggcgtggccaagtcccagactcctcacccgccttcctgccagctctggtgggcagccgcaggcaccgtgtggccttggatgatgaaactcggggcgatgactgcaccatccagcagcctgcgtcctcgcaggtgcgggcagtgagggcggtaggggggcggacgcgccactggggacaggctgccaacagctctagcttcgcagacgcgacagagagcacggcccctgccccgcccctccaggctctccagcccctcaactgggacaaagagcccgcccagccccggccacgttcggacgaacgctcccgcctactgtccggtcccggtccggcccggcgcggggcgctgtgggacttgtagttcgcgtcactctccgcagccgctccggagcagccaggggaactacagggcccaggaggcagcgcacaggcccggggcggccccgacggtggtgggtgtgcgagcgcaggggccgggcggcgcgggcgccgggcgcggggatgcggctgtgggcgccggggccgggtagctgctccaggcgcgcgagctaaccgagtgcggcgagggcctaccaggggcgacaggcacgttgcatgcatgccttgggcgcagcctttgcgaaagccggttgggtgtgcgttggtgcttcagcggcgccgtggagggtccgggtcgccgggggatgggcaccagcgccgaagccaggctggcaccgctcgctgaaagagcccttggctgggcttgtgtgggggagtgctgcacgcctgggcagtgcgcgacgtgtttgttctttttctctttttgtgccagggtttctctccgcaagcgcgcgatgcagcgggcggcggcgctggtccggcggggctgtggtccccggacccccagctcctggggccgcagccagagcagcgcggccgccgaggcctcggcggtgctcaaggtgcggcccgagcgcagccggcgcgagcgcatcctcacgctggagtccatgaacccgcaggtgaaggcggtggagtacgccgtgcggggacccatcgtgctcaaggccggcgagatcgagctcgagctgcagcgggtgagcgcgcgctgggccccggggaggctggggccgctgagcaagggaaaaaccgcagcagccccagctggggtccttcccacgacgtccacccccatggccagctcctcagtcagccaagcctggctaaaacgagagaatgccccctcccgcccgttcacttactggtgcccagcaccgggcactcagtgaggccttgcaatacggttcacttgttgaattgaattcgtcaattgttgagcgggccgtgctgccaggcaccgcacgttgtgtgtctgccctactctcgtggaaccaaggtccagtggagagaggaacataagcgaatgaagaaagaagcaatagagtctcagtgataagttcttggaaaaaagtaaaacggaagagggttgggatgggggcggtgggagggaaaccattttaggtaggaggggagacggggtggggggggctctgcggaaagttggttctgttccccagtctctttctccgtgtctttggcctttagggtctttgccaatcctgattcccggaagagagtcggcagaattccttcctttaggcccctctggagccttggccgaccagccacttctgtggtctggggacagtcaccgaggtggggaaccagagagttgggcctgtcgggctttggtaagggggccctgggactttcttcatcttggtggtcggccggctggctaggatcttggcttgagtttatagcttcatgtaaggtgagcccacagccaggaaggatttctgcctccccacaaccaggatgtctggggtgggtgatagaggggtccctaggacctaggagagagttatagcctgggtggaattcaggaggcagagccaggaggggttatcttaaaaagtaaatactcctaagatttgtaagaagctaataatcacctagctgcttgctagagagagtctgactgagaatagaagtgggaaggagggttccttgatcttgccctcacccgggtcactagtgtcccatgaatgcatggcagtaagcttcagggggatcatgacacttggtcccattccagtggggacttgggggttttaatgagctcctgggcctcctgagaccttgttgagacactcagttctgctgactcaaaacagtgagctggacaagtcagagtccagtctcctgcggactccttgcagggctaagtttaaagctggccgggaggaggctggctttgtttctgtgcctccctggcccagaggtgggccgggcagagaacacaggctgttgatgtctggcaggctggagctggccctccttgacgcaacagcctccctgctaaaacacagctgggattaacgcgttcctggtttatcacgttacagctgatttctctggttcctgagctggcaggggttccaggaattacctctgccttttgctaaatagcaactcctgtgctggctccatgaggcttgaggatgatgaggacagaagggcactgtctttgccttgaggaatctgactgccacgttgttctctgagcctgagtccccttccccggattctttaagaatgtgttgggattttttagcaggcagaatacgtgagagccttccaagtgggagcagtgctgtgagcaaccgcaggaagttggggagttctgggcatttggggaagggggctggtgctgtagtggaacactaacagagggatgtgggaggtgaatgagacagaaaaggtggactggagtcttgtgtgctgggattaggatgtcatggtgcgttttggctggagttgggaaccagg

SEQ ID NO: 63281 - DNA, 861 bp, Homo sapiens
ccactccacctccaagggctacatgggcgagtacgtgggcctcccttccctctgccactgctgggcctgccagatcctcacgctgccggctcctctgccctgccccgtggtccacccacttggatggagagaaggctgcccttatctgttgcttctgctgcatctccccagtgggagagccgtggtgtgagaacagccctggtacaggggctcaaataagggcgtgctcagagaagcctgacaacggacaaatggagtggaaacaggactacatggcagcttgcgacacctggtgttttctctgtcacttgttccgaggttgactgatgtctgagaggtcagggagggcagatagagcagacaaacagatgctgttaggctgactggctgtgctctgggtgcagggctgccttaggcactgtgtgacctcagaggctaaagggtcagctgtaatcctgtgtctgttcattcagctaatgtttactgagcacttacgatgagtccggcactgatctcagcaccgcggatgccgcagcgaacaccctcctgccggcacaaagcgtgggttctagtgaggggggagagctgtaggcaaatgagtaaatcgtgcgtcccacggagaacagtcattaggagagaggtaggggtggggtcgaaggctgaagtggtgcagcctcactgaggagttggcttctgagttaaaccccgaaggagtgtggtggggaactgtgcagatatctgggggaagagcattgcaggcagcgggagcagcctgggcaaagaccctgtggtagcagcacacctgctgtgctggcagaacacacctgccatgttggcggaacagccaggagctggaaagga

SEQ ID NO: 63282 - DNA, 714 bp, Homo sapiens
ggacacatctcatacgtacatggagtgaggcctgggcctgggcccccactgctaggaggttaggggaaagaggaggaagccacagagactgaggagagaccagtgggtttgcagcaaagggcatgtgttcccaacgtggtggggtcctattctgtgccaggtgtcggcatggggagggctcttggttgttaggctggaacagtgtaagcgtgaagctcaaaggaatacttccgccaggtcaagggagcagtccccttgggatggctgccaaactgttcttgggcttctttgatctgggcgcaggctaacaggctggtctttctggtctaccctgtagcagttctggctccttgcttgacttccttttgctctgtagctcttttcctaaacaaatctgttctcggtgaactcagttttcaaactcaagcatgtttaccacacacttatccattgccccatctcagttattgattacactaccagtcagtgccctgatgttgggatcctgagtcgtgcccggtgttctcagatctggatgaattagggtctgactgctttactcattttgattctctgctcatcagcaaaggattaagcagaaagttctttctttccatttttgttaccagacacttttctgagatgttagaatttatcttcccaccttgaaacgtccagtccagggatcagatgggaatctttgccagttccgtt

SEQ ID NO: 63283 - DNA, 1489 bp, Homo sapiens
cctagtcctccaccttagcagtttccgcttcctaagatgaaagtgcaaaatgtctggggcacacagctcgtaaacagtacctggcatctaggaatgctcaacagaggctttcgtctttgaaaccctacccctccttgctgtattctttaatgtggacaatagatgtttctccaatgcataaattgctgtgtccttcaagtcccaagccccttttacatggaaaggctggcactgccactgtcagatcatttagaagagaataggcccacctcagcctcatggttgggcatgtgacccaggccctgctgttcaatgcacgatgtgcaccttaaccacagtgattggtgcaaggatggcacaaaacccacaccagaccaataagaccctacccaggacctttgctgaagtgtagagaaaagagttgctacttcttcagggtttgttgacttggttgtaaagcatcgtgttgaagcacatgagctttggagtttggacttgaattggaatcccctcttgatcacttcctggccatgtgacctttctgaaattcctcaatatctcagatatttggtgtttgtttgttttgagacagagtctcactctgtcttgcccaggctggagtacagtggcacgatctcaatgcagcctctgcctccctggctcagcctcccaagtagctgggactacagacaggcatgtgccaccacacccggctaattttctatttttagtagagatggggtttcaccatgttggccaggctggtctcaaactcctgacctcaagtgatccacccacctcagcctcccaaagtgctgggattacaggcgtgagccaccgcccggccaatatatcagatatttggcttcctcatctgtaaactggggcagtaataatttctaccttacagagtggtcgtgggttttgtgtgacataacacgtgtaaaacactaagtgctgagcctgctacagacaaattattccatgatgctggttggctgttgcgacacagtccacaccccgagatgtggaggcagccagtatccatctcttgctctacctgttagtcaatagtgctactgctccctcaccagacacacacacttgtcattttccgctgtcagtacataaatgaggcaccaccggatggtgaccataacctggcattttctgggaaactccctatttcaaatatttgattgcattagcagaaaacaagttgcagcttctggggaaaggaacataattcctgcctatctatgatgccatttctctgggcgggtgtttttttaagccaggccagtagaaagagtgatttctgctcagccaaccttgtatcaggtaggactcaactggttgccaagtgacagaaaaccctactcaaacagaagaggaaatttattagtggataaattacaggttagttctgattcacaaggattgagagtcagtaaggttgtggtccctgagagcagaagtgttacacctt

SEQ ID NO: 63284 - DNA, 2579 bp, Homo sapiens
cacacactctcaacgaggtgtttgggtcctaaagcacttaaatcttcattcacggaggctcgtgaattatataatacagactagcatttccggtaaggtaacaggaagtccactgtactcttctcactgcctaaggagcattctcatttttctcggcttacaaatctggatgctcttagcctggtgaggatgctgtggggcttaaatgcctcgtgtgctttgaaatcctgagatgaaagatatcgcagcattgcaaatagcaataataaggccttctatttatgtttactgtacactcaggcgtttggctgggaccacggcttattcctaagcaggtacaggacattagcattacctgcccaaagaacaatgcatccaaacacagacccagctacctccgggtcaatgggcgagggacgcagagagggaggagctcccgcagccggcggccgcggaacccaggaaacaaccccatccgcccgaggcgctctgtgggggcggcctcgacctccccgccgttcctccccgcggagcaccagacccggggccgacggccgcggggcggacagcttctctctcggggccgggatgcgctgagcacctcggtccaacctgtttttccggggtggtgacctcgacgcgaaggaccgggcgagctgctgcctcccgggggataccagcccccggcgctcgttcaaggagggaggaaggaagggctcccatcgtgtttgcgcaggagtgagttttatttgctgcatctgcgggcgggcggggccggcggccccaaggtcagccgaggccggagtgcgcggctcgcggcgaggccggtcccgccgccgccgccgactcccagcccgggccagtcacggccggcgccggctcgcgggcagcccagtagcgcggcctggctgaagaagacatccctggccgcgcaggccccgcgcccctcacacccgcccggcccgctcccagataccttcttcagctcgttctcgctggcgccgggcgggacgcccaggatgtcgtacagcttcgtgtcagccacgttagccatggcggccggccgggcagtgctcggggagaaggtggcgaagcagacagagcggagtcgggcccacaagcggcgtcggcggcggcacaggccgagggagacagcgagggggaagcgggggcggggctgaactttgacccagcgcacggtgcgccgtgacgtcgctgtgcagagcccgcccccgagcgcccgaggcgcggccactggggtcgaagtattgaagagtgggccaggttctctgttttcctccaggtccaggcggctgggcagggccaacgtaggaaatgaagaactgtgcacggcgcaccccaggaattcagcttcctctcaaaagccatggttgcgaggtcgcgtgtttaacctcgcactggctgctgagggaattaacaggcctgcgcagcagcttcgttagcttcgaaagaaaatgggccccggctcccgcaggaggcccgcctggcgcgcagatgtcgttattagaatccgggacgtcggtggaccctctgggtctggctccctcggggcttacgatgaaaaaaactggggggcgcgtgtgtgtgtatgttgtgttttatattatgagaattctgaaacatttagcagaagcagtatattactccccatagtgcagttagctaccttttacctgtttcattggctccaccatacatttctagtgttttaagggaaaccgtttcattcataaataccctaagtgtatatatttaatatctaagagacaacttttaaaggcataacgatgtaatctcatctaatgaaattaacaattccttaatctaattcccagtccatatttaggtttttcagatgatctcatgtccttttacaattggtttgtggcatccgggtccaaaccaaggtccacatgttgcatctggaccacgtgtttaagcctcttacttgatagctttaaaattagctaacaccagaggtttagatggtgtaaggcaagtctggccaccaggtgacttgatttacattcgttttagtttcgctcagaaagtatgctgtgcatctaccaagtgctatgatgtacagaggcctggtccggggagaggagtgttacaaaagtgcctgccttcaacccatttacggtttatggagacagaaaagtaaggttttctgatcccttggaacctgaactgatagcaaagacttcagcataagcatctcactcaggataatgtttcttccttggcgttccctttgacctagttgtggagggcctgaattccatgacaaggactctgaaatttagcttgaaaaccctaagagtaatcagtgataagtcattaatagtccttaaacccttttcctcaaatcccatctgaaatcctgctccctctgtgaagtcttcctttactgggcactggtgaacactgctatctcattcgagttcccaccacccttcgtttgtaccttttgtggtaggatctcgaactcttttgtttttttttttttttttttttttttacttgaaacagcgtctcgttatgtcgctcaggctgga

SEQ ID NO: 63285 - DNA, 1309 bp, Homo sapiens
ttgcaagaggaaaaaattctctcttgatgccattttagcttctgatattgtaatgaagagtagctgggtaaattccctcttttgttcttgttattttattttagttttttacctgactagaccagtaaccacagtaactatttttgaatttcattttcatttctttgcaatattttctccatttctgggtattaattgtagtcagcataatttgctaattttatagctcgagttatttcagaagaactttgtgtgcttaaactgacacagggtctcctcccaaggatcacagactgagataaacctgtgtcagtgtgagcactgtaatgttccagccactaactgttttgaggtagcatatttattttggcttcatgtttagccaatgctgtgaagggaaaaggacctttatctcatttcatgtctcaggcactgtaaaatgctgagtcacagtacacctgagcgctgcagtgatctaaagtttgaggcggcagtgatttcagatttctgccaggcttatattggtgttcaattcctttgctttgatttagtatgcttgtgtaactgtgaagggttgggatggagaggaggtggatatggactgggacggggggtataggaactgtagtatttttgaagaccattgatactgttcacaagtaattgggaactgtgtaatccattacttagacaactccagatatatcattgaggcagtcagaaaatagttttgctttctgctttaactaggtttgaatgtatagagtaagtgatgcaggttaaaatattttggggggatacagaagaaggtactgatggttcttgttatgagggtgtcaggaccacataatttgatgattgttggtactctggaaagaaaaaattgtgggacttggatcactgaataatctctgaatttctttcagtgcttaaagtagattattcagtgatggggcagcacagttgtatgtggtaggtatttctagccccactgctggcctttcaaacccagtcgtgtcaaaccctgccttattaattagcattttccaaaggttcagtttgcttatataattgcagtggtatagtaagcagagaaattgacccaataaatttagccatctaacaattagtgtgggaaaaatagtggagaagatatgtctattgtgataatatgagatatgaatatgaatatatatgttttccacatatatgtgtatatatatacacacacctcattaccactgtaatatatatataatatatacataatatacataaaggccaggcgtggtggcttatgcgcgtaatc

SEQ ID NO: 63286 - DNA, 1286 bp, Homo sapiens
ggctcaagcaatcctcccgccttggcctccaaagtgctgggaccacaggcgtgcaccaccgcgcccggccgggacatacttacactaaaaaaagtacttgctgtctatctgaaattcagatttgggtgggtcgccctgtatttctcgaggcaacccctcagcagccctcaggggggactccctccgcactccaggccctcgggtggcgccttcgctggtttatctgcggttcacttgcaccttcttcagaagtggccgacagcccacagcgaaggcggccccgtgccagactcttctctggggatgaggctccggggaggagactccggggatgcgcctctggcgggatctcccctggaagaatctgagtccagtggggagaggaacacgtcccgcagctgccccgttccacggtgggaggcgtcacgcggccgggaacacagggaggcggggggctccggaggcggcggctgggaggaccccgcgggagggcgccggggaggccgcgaggaccgcgccggggggctgcgcccaggcaagctgtgtccctccgaggcgaagataggaagctgccccgcggcgcgcggtccccaggcagggtgctcgcgggcggagtcaacacagcctggcttctgcaccggctcaggccgccagagggcgcgcgggttcgggaaatggcttccccccccgcaggaggagggccgagctccccgcggggcgggaggaggagggaaaaccgaggacaagcccccgccttggcgtcgagggtctccaccaaagccccacgcgagaacgggccgcgtgtttctggtgagaggggtctcgatagtgccatccaccgcgaggcccgactcccagcggcgtccaggaagcaagggagggagggcgggagcggggacgcggccgttcccacccggctcctctcacgagacccgtgacaaatcgctggtcggagagagagtgcacggccccaaggaagggaggcactcagagccctgtccttccagacattcagactattaactgatggttggtctagaggggacaggacggcagagagacagagaaagctggcgaaggacgcgcaggatttcagatgtaatgcgtgactcagagagattgcataacttcttccaggcctcagtttcgacgtctgtcaaatgggagtacattttccctcagcgggaggatcgttttgagtccaggagtttgaggctgctgtgagcccagatcgtgctactgcacgacagcttgaggacagagtgagactgtcccccccgccaaaa

SEQ ID NO: 63287 - DNA, 2471 bp, Homo sapiens
gatcctgtcaggcaagctctgagtagctcttccttccttccttcacagcattgatctttaagcagcacctgcttctgtaggtactcaagaaccctaagaccccctaatgcccactgtcagcatcaagatttacaaaaaagttagtttaacgattgtcaaagcaaagaatttccaagaacaagttagcaaagaaagtagacatttggaacactaaggtgatgaccaagatgaggaaggagtacacgaaagaacaggcagctcaagagagaaatttctgtagtttgagactgctttcccaaggaggcattgggtttatcagtggtccctgcaaaatgcttgtgtgagctgtttagtgtttaggcccttggaagggtacattcgcttcatagaaagttgtggccttgacaaagaaaggggtgggcgaattaggtaggtggggaggcaagaagaagccccctatgagaagagattgtcaggttgcaccttttcatgttcatcaacggggaaggaagactgaagcaaaatagaaaggaatgagtgggccttgggagcgaacgttgaggcaagctacaaagattcctaggaatcaggaagcactttggaaaacaggtgattccatggggaggagggggtaaggtgactgggtgagggccgcagacttcttaggaacaaaactgaggtgctgtcagggcttttgagggtaggtcaaactgtagggtagctgggtcagaacctggggttggaaagggtggtgcaaaaggacaagctgttaagaatgctaaagggaaggccacagggctgggagagaaggaccaggaaatgcagaaggaccggccattgggcaatgggtttggggaacaccgggagaggcacacggacagcgaacagagggagggcccggcaagcactgactttcccgcagcacgaagagatccgtctgcttgtcggagttgaggtccccgaaagccgcaagggtgccccaggcctcggccccaaagagctcggccgtgacgttgtgcagcgcccgcgctgggaccggcccgactcccagtagtgcaagccctgcgaggagcggcgagaagagggcccaggagctcgggagccggcccgccgccgccatggcagcccctcagcccccgcccgccggcccaacgccgcgcttgacgacagccgcaaagcaccgcgttaccggccgagagagtggcgcgcagccccgggacgcgtaagagccgctgccggctcctttttctctctcccactagggctgcccttccgacgctaaaaaagcagtggagctagggtgaaagccgccctcacgctcacttccggcaggcgcgcctcccgacagtgtcgtgcggggggcgtggcccggcattgctgacaggcggccccgggggcggtggccaaggcggcgaccggagcgcgatggcgggggcggcgggactcacggcagaagtgagctggaaggtcttggagcgaagagctcggaccaagcgctcaggtttggctggctggggcgccgccccccacccgagtaccttgggtggtgcttcgcctcaagcgccttggcgggaggcaggtgggggccctgggaatgaacctgtgccccgagttcctccttagaaagcaggtggcggccctggccttgtttctaatatcttcctccacctctaaaaattaggtggcagagccagctccactctgcgtgtgcccccgactctattccgcttgtgagccccactcggaaagtaggcagcggtccggacttcccttagagtcttctaacttaaaaatcgggcggcggcacattcctgggaaagggaatgtgtcttccctgtgaatgtgtctttcctgtgaatgttctctgcaaaagtcagatagcttaatcagaccaagtcagatgtaactacgatctggctgcagaaagccggcgtctgggctccttgctttatgtcttatatcccttttacattccccacaggttctaagcagtagacctgtcatctatctagcagaaactgaaggagactgggcctcagatattgaagagtatagttagggcccagaaagaaaagggcttcttaagtggccccaggttgtgtggtttccaaacccgaaagcatagaggtcagaaggtgccttgcaggcagttttaacagttccaagtgtcccgaactgacttgttcaaattgcaacgtcatgacttgtggcgttattaaaacttcctgtattcctggttggctggatataatcttgaacaaaaggcatgcacttaaacaggaaaggtgaaaggcggaatgcaggttttcagctaaggagcttcccttttaaagaattgatgaagtgtcattattgggggtgggtgtgaaaggtgttagctaggaaaattaactttgcacttgcattgatattaagaaattattttcggacgggcgcggtggctcacgcctgtaatcccagcactttgggag

SEQ ID NO: 63288 - DNA, 537 bp, Homo sapiens
ttaagtcctaattagctgagtcctttcctaaaactggaaagatttctttatgtagggtggattcccactaaggctggagtgacatgaagttgtttccacatcttcagaagtattgtactatagcaagtttagaaacaaaatcgtcagaagtgggatgaggaaaccaaagaagattaaaacatttagcccaaggaaagtcgctgactgtacagttcattctttgtcttgtcctcaattgcagtcaagtcaacattgctgctgtatcaaagtccaactaccggtctctttcccactaaaacatgcggtggtgaccagaaggccaagatccaggacagcctatactgcgctgctggggcctgggctttggctcttgcatacaggtgagctggtgtgtgttctcctcgtaactttgagagtggataatagggttttgtaggaccaagactaattgagccgctatcttttggctctgctgctgactcactgtgcgacctatgactgctcacatccctttttaggcctctaaaccttttcatt

SEQ ID NO: 63289 - DNA, 503 bp, Homo sapiens
gtggagcagaaagctgaagaagcctattgcagtgacccagggttgtggttgtgttgctggcattgatagatggctaattttttttggacacttactataggccagtgttaaatgcttatatattatgtattattctcataaccctaggaaatagttatttttattattctcaatttatagatgaggaaactgcagcttattgaggttaagtgacatagtgagtcacacagcaaataatagtataaatatcattgtgtaacagatcaaagtttgcaaatattttacatgccctcttttgtttgatcctctccttttgtggtaggcactgtaaatatttttcccattttacagacaagcaaagaattgagaaacttgcatgggcagtcattcatcaaatagtaaggatgcctactatgttccatgtgtggggaggtggcagtagaccagctagatcaagttccctgccctcagggaggtactttctgaagggaatgaataacaat

SEQ ID NO: 63290 - DNA, 530 bp, Homo sapiens
ttcagattcttcttggcctctctgcacagcatttcttctttctaggtatggggcacgacccctctggaatgagggtcttaggacctactctcagacaaagttggtcagagaatttctttacggccagctcctgtgcagaagggtggaggaaagtttgagtcatagttttaggttctatcggtggctttgggggaagaatttctatgactcaccttggggaaggggaactctggtttctatgactcacctcatgggagaagaggtgcacaaggggtgcaggagggcaggagaaggtcagagagaacttgcttctgaggctgcttctgaggtcatccaaactccatcagttcaaagtactcagcctgccaaagtgccatactttggggtattgttgtccgagcctcaacacatgtccaccctgcacatccttgtaaataactatacatgcataaattaggggtctgtgtgcgcacataccagcagtggtgctccatggcaagggaaaattggtgcttgatgggaaggaaatt

SEQ ID NO: 63291 - DNA, 1959 bp, Homo sapiens
gctggaaccaggtggcagtgagcagagatcgcgccactgcactccagccttcacaacaaggtgaaactccgtttccctccctccctccctccctccctccctctctctctctctctctccatatatatatatatatatgtaaaatcaatgttgtttaaaaaaactaatggtatttttcaaaaaattctgctttattactgctcggagccaatggttctcacattttgctgctggaggtggggacgggggcagatgggatggggctctgcacactgagtggaaatgggctctatttcctgtcctctgactccaggggtcaacacttttgtggcgaattatctccggggatccggccagctcagaagcccagtggggccatcaccgcatttttgggacgaggctgccatctgctggtcgctcaaggaaaagacggcagctgcatctggcctggggagggccagtgtgtagagagctccctcacccgtgatgagggcagtgtcccacagcagttctgggaatggggaagcagaggaaggagagtcaccctcaatgggcagatgagcagctgaactgtgatgggatggtagcatatggggttcccagggacacttcagggcccaaaaaagaaaaaagccaggactgaggggaagggaataacagagcaaaggttttttaagaaagataaaccccctagaaggagaagcaggtgccactagagagtcccaaatggggaacagaaggttcgcgctccagggcaccggacttctcctgttccgtccaaggattgcatcagcccctgtagtagctcattcccgcagggatttgtttgctgttctctctgccttgaacattctttcctgccccagtccccttccttggagtaaatgtttgttcagtgctcaggtctcagtaaactgtgcccacactgcctccaggaagtccccgggggctgccttttcctctgcatcctgttcctgcttctagcctcaggtagccctgttctggatcggcctgtttacttgtttacagttttactgtttacttaccctcacgagattccaaattccctgagggcagggacaccatttcatccccagcaccagtgcaggcaagagagtgagaaatattggtttactaaattgattttttatggcattttttgaaaatcagacatcataatctggaataaaaaggaaagtactttgaaacatatttcccccaacaacaaggtctccccagaagtaagttgaaaatgattgccttttctatttgtctgtaaccacatgtggagggtgggggagtgagaacaagaaagagagaaaacaaattattttattttcagttgtcatacgttgtaagttatgctgctcttcagtaaacaatcatagtagacagctgctatctggggcctggccagcatccatatccattcttccctcaggcacaattttactttggtgaaacaacctcttctattctcagtctacatgatctagggcagcaaatcccatccccaggcccaaatatgggcatgtggctcaggcctggcaaatcacagtatgccaacagcctagcacatgattgatcaggaacaagcacatgacccaagctggcccagtgagatttcaccctggaatcattgaggcaagaagacctggggggtgcagagtgtgtaggacgtgaacctggagctgcaggcaaccatattgccaccatgaggcaagaggaagttagaaagtgaagccaaacaaaggaaagcagagctaggagaagagaaacagagacctcaaaacaggcatcctttcattccggcacccaaccttgaactttttctgtatctttctgttacaagaccaacaaactcttttttttttccaaagttagtttgagggagtctctgttccttgcaactgaataagtactagctaacgtaaaaagcagaatgaagatggctgggtg

SEQ ID NO: 63292 - DNA, 3679 bp, Homo sapiens
tataggttattattgttttaatggcattttagtattccattatatggttgcaccataaattatttaaccagtggcctagtgatggacactggaattttttctactcttttgctcctgtgagcaatgcagtgtgaacatctttgtatatgggtctttgcttccatgggtgaaaatatctacacattaaatacctaacagtgaatttgctgagtcaaagggttggtgcatttttattttaacagatattgcaaaatttctgtatgagttctatcagtctcatagaagaccctaaagaagagcaatgacaagatgagagctgggacttaggatgattgccctggagacaatcttacgcggggtggaacagagcaggagattagagacagggacccaagggcaggggcagtgggaactgttcaaacaagagatcacaggctgaacgaactagaaacagagatggagaagacagaaatacaagagatatgtaggagacaggcttattcacgatcggtgaccaattaccaattagatgtggaagaaatcagaggaggagacatctggcttcccggggtgcaaggtttgggtgatgccattaaactgagttgcacaatttgggaaaagaagccaggggtatggggctgggcaggcagggtgctcatgagttggtattggacataattgtgaggtgtccacaggacaactagacagagacagccagttcctacacctccatatctatgttgttcccgggggcagattgcaaaaccaagcaaacagtcacaggtcagagtccaccatagttggaagcgtagctgtagcattcagagcagttttcctggacccttcactgaacaggcttcactcatgacattcaatctcatgtcttgggcaggttaacccgagaattctagggcagggagaagccatagagggaaaggagggatatggacaagacttgggagatccacggggccatagattcaaactggtttcctctatgtcacagaacctcatcactcccatttgttttccttttcacagaacctcatcgctcccatttgttttccttttcacttaggggccaagatttaacgaatacaaatgaagttcaaatgtagcaatattggagggggagagtgtattgactattttgagccaatatagcgtaatagttaagcacgaagtttctgaaagcaactgggttcaaatcctggctctatcacatcccaccacctgggtgacttcgggcaaattatttaacctcttggggcctcagctgattcatctggaaaattgatatgatggtatttctttcacagtgaggggtgaatatgataatgcgtttaagtggagcacacaagtgttagcagttgtcaggttaccgtttgaagctggaggtgcccccagaccagccacatgccctgtactctccctttcccctcccaggagcttaccgggccttgtcatatgcgcctcccatgaggatgttctccctgatgttcccgctgacgatccaggcctgctgggggacataggccaggcttccctgcacccccaccgagccctcgagcaagtgcatctgcggcagaatgagtccagcctcaggaccaattgggccaagggacagagcctgcctggctcagcaggcacagtgcccagggccccactgccctccaggaccttgggggctctcctaggtaaaagggacttttaatgtggccctaccaggcccaccagcgagttccagggaccggccatgagaacatgtggaagcagctggagataagcccagccaggtcctgcttggactgaatccaaggtctgcactaaagacactccatacgttttttcctcttttttttttttttttgagacggagtctcgctctgtcgcccaggctggagtgcagtggcacgatttcggctcactgcaagctccacctcccgggttcacaccattctcctgcctcagcctcctgagtagctgggactactggcgcctgccaccacgcccggctaattttttgtatttttagtagagacagggtttcaccgtgttagccaggatggtctcgatctcctgacctcgtgatctgtccgcctcggcctcccaaagtgctgggattacaggcgtgaacgttttttcctcttatttgtcccagccccattccctggcagccagtgcctccatggtcttcaccatgcacaccaaaagttccaggctatctctgagcatgcctgggtattatggaattattattgttaggtaggataatgttatcatggttaggcagaaaaatgttcttacttttggacatcacgatgaagtatttagaatggaaagtgttataacctctgtaatttaaagtattctacaaaatatatgtctatatagtaaggtaaatatgcaaaaactatcaactgctgcatctagatggtgggtatatggatccctgctgtagtgttcttcctgtttttctgcctaagttcaaaacaacacgttaaaaacaaatagagatagacactcatccccagcaccctgacttgggacctcatcattcttaatcctttctcttttataccctaaaatgtttacttctagtttggagccaagctttaatgaataagaacaaaactttaaaatggcatctctgtcttcctttattagaaggaaagtgacaggctcatttacataggaaactgacaaaccactgggcacgtaggaggtggtcttgcctggaggctgccaggcaatgctgctgtgatgtagaacagagctctgacctcaggtggacctgggactcagccctggctcaccccttacctgctgtatgaccttggatgagtcacctctcagaacctcacgtactcatctgtaaatgggtcatcgtgagtatgcctttgtcatgggaggttaccagagttaaaggggaaaatggaaagctctttgcacaggacttcgcatgtaagtactgaagctagttttacaattttttttaatggagtctttcttctttgcagttgcaaagaaaccggggaaaggccattccacatgcagcacgtggctgatgtgttaagagagagctggctttggtaacataaccgcattccaaggaggggatgagtttggcaatgttcatttgggagaaggagctgagggaaaagccgaagaaaggaaggaaaacttctcccagtgttgggggaacaagggacaatggacagaagaagaagggggaagagatggcagcccaggagggggtgaggttggggctccctggggaagggctggtgtaagacgcttgagggaatgtgaccaaaaatgcatagcaggcgtcatgggtgcttttagtgttcgttataaggtgtgcagtgtgaccccaaaggatctggggaatgggtttggggtttttttgaaactggagaaatggccgggcatggtggctcacatctataatcccagcactttggaaagctgaggcaggtggatgacttgaggccaggagttcgagaccagcctggtcaacatggtgaaaccacgtctctaccaaaaaatacaaaaattagctgggcatggtggcgcatgcctgtagtcccagctactcaggaggttgaggcatgagaatcacttgaaccctggaggcagaggttgcagtgagccaagatcacaccattgcactcct

SEQ ID NO: 63293 - DNA, 2433 bp, Homo sapiens
tcatcatatactgtttctaccatagagatataatagatgtaagtaacctcagaagtataaataacagcaaaaggtagcaaaataagtaggaaatgatacattttgagtattatctttgtttttgatgtaatttatttaattgtaagtttatataattttttttttattaatgtttgtgtttagcagctatgctctcaaagttcatgaaaatttgaccgatgattgtcatgaggcagtatgaacaggtactagccgaccactgtggcatccatcttgcgagagtgctgccttttcctaaatcctcgtcttgccgggcacatcattttccaattcacttctaagtgctctatgggctgtggctggctgtgcctggtggttagctttcttggcttccctgtggtatagatgggaacaagaagttgctaaaagtctgggtgaagggcttcccagaagtgtcatagtggacaacccaggttgcaaacagctgagagtcatggagagatcttggagggggttatgctgccaacagaagtgggacaggggaggcctagcaactcagagaacatccccaggtgagtgagccaaaaaaggattactgtgcaagccaagatccagctggcttgcaaagacagcaggacaggcagtgagcaagtagacaaaagacctcccctgggaaagcctaggagcagaggtcactgtgcccaggttcctgattctttctctgccaggtgacaactcctagacagagcctttagtgagaattatttgataaaatgacttaaattattggctcaaacaaggtcttaaaatggtaagccaaaacatttatttttccctcattaaccagcaagtgggggatcatgaggaagaccagatttataaagaccaagtaaagaaattagattttctctcacctttcagctatagtatgatttgccaacctggtttattcaaatacacctgcaaagagaggtaacgaaggtttcacaactagagatgcaaagagatgcaaagagatgcaatgagggttactcatcacattctgaaattaccatttctttccttgttggcttatttgttttctgcatacctcattagaatgtaagctctttgaaaccagggaccttgtctgtcctgttcacaaatgtgtctttggatctagaagagtgcccagcacatagtgtgactctttcctattcaagattcatccaggaaactaacgacatggaaaatgaaacccaacgaaaattaagaaaatgcaaacattgtaatagttatgtttgcagaacatcagtcgctcatcccaagcaaacgagctcgagctcagccacacattagcttgggcctccttccagttccatggggcccatctccacttcctggactgaccaggggaattccctccagaaccttccttggcagtcccggaagcattccctggactcccaattctctttccggaagaaaatggagctggagtttattcactctaattggtgtaagaccatcattgtagtcaggatggaaaccaggacatgactgggaataaaatagagaggaaacagcagatgcttccagccctgtgttttcccaatccccagaggcaaaggtcaggatgacaaatttggtttggacgtgggttgtttgcgtatggtgaaacagactgtgaacaggaggggagccactggagcggggtaacctgtatcatgggctttctggaggagctgatttatttccatgttcttatgcagcagggtctagtgtccaagatcagaaggtacatcagtggttaaggaagtgtccagggcaaggagccagaagcacctgccagctgggccctaaagaagtttaagtgattagatcttactcctcctgtacctcgccctgtgctatttaactttctctgctcttaggtttatttccttctgttagtttcagtagcttcaggagggcatcttgttgcctgaagaatccccacatctcagtacctggccttctcctcaatttcagaagctaggatgatcctctcaccttgatctttgcattagtcctaatatctgacaagaatattctcctcccacctccttgcagagctggttcattcttgacattcaggactctactcaaatgccacctcctcagagtaaccttcccagatcccctctctccataccaccttctgcatattttcctaatctacttcctttactcatcacattctgaaattgccatttctttccttgttggcttatttgttttctgcatacctcattgaatgtaagctctttgaaaccagggaccttgtctgtcatgttcacagatgtgtccttgggtctagaagagtgcccagcacatagtatatgcataacaaatattcaatggatcaatgaatgaagtacatgcagagtctgtcaaaaaaggagctaggaaagc

SEQ ID NO: 63294 - DNA, 2826 bp, Homo sapiens
caaggttgtaaaaaaaaaaaaaattggacgggcgcagtggctcaggcctgtaatcccagcacttttgggaggccaaggcgggcagatcacgaggtcaggagattgagaccatcctggctaacatggcgaaaccccgtctctactaaaaatacaaaaaattagccgggcgtggttgcgggtgcctgtagtccccagctactcgggaggctgaagcaggagaatggcatgaacccgggaggcggagcttgcagtgagccgagatctcgccactacactccagcctgggtgacagagcgagactccgtctcaaaaaaaaaaaaaaaaaaaaaaaattgaggacttgccacagattagagaacacctaggagatttcataacaaaacacctaggagatttcacaacaggatcctggatattggatcctggaccagatccaatgaaggacattagtgggaaaactggcaaaatttgggtaaggcctataggttaaacgataataatgttaatttcctggttttgatcattgaactatgattatgtaagatgataacagacgaaactgggtgaaaggtatataggaactctgctgtagttttgtacatctaaaatcaattcgggccgggcacgttggctcacgcctgtaatcccagcactttgggaggccgaggtggacggatcgcttgaggtcaggagttaaagaccagcctggccaacatggtgaaatcccctccctactaaaaatacaacaattagctgggtgtggtggcgggcatctgtaatcccagctactcgggaggctgaggcaggagaatcgcttgaacccgggaggcagaggctgcaagccgtgggtatcgcgccattgcactccagcctccgcgacagagcgagaatctgtctcagaataaataaataaataaataaataaataattagttcgaatcaaaagttaaaaacacttcaagtatatgtaaaaaatcgaagaaaacgttaaaaacacttcaagtatatacaattcaaataagatcatccttccaaatatactctgtaagtgaggcgaaggtcgctgcacgcttgagtgcacgtctttccgcataggtaggacgctcaagtcttaccgggaggctctcctagagagcagcgcgaagccatggcttttgggcccggggacggaccgtagcgcgtagccggaagcggaggcgtggaggcgggtctgaggtttggtgactgcggggcaggccgggggcagctgtctgtctggctctttttgacagcccccagtgcgaaaggctgccagcatgtcatcagtgagccccatccagatccccagtcgcctcccgctgctgctcacccacgagggcgtcctgctgcccggctccaccatgcgcaccagcgtggactcggcccgcaacctgcagctggtgcggagccgccttctgaagggcacgtcgctgcaaagcaccatcctgggcgtcatccccaacacgcctgaccccgccagcgacgcgcaggacctgccgccgctgcacaggtaggcctggctgcccccgcggcggcggcgggcggcgcggcctcctccggggacctgggcccaggccacggcctgccttgagcgcgaggctcagttcggggcggccttcgcggctcggttccgcctctctggtgctatcacttgcaaaatggggatgtcagatacctgccccatgaccatgaatgagatcgttcatgaagtagtgcctgacacctggtgaaactacgcagttccctaccgttctggataatttaatttgaatcctcttccccctctccgcaattcctcgccctcggtcttcagcctcctaggccagtgcttttaactttccaggccctttctttctccccggtgatctctgccttcacttgccttcgcttttcacctttctccccactgccctttactcctatccgcctccccttttctgtcacccatcatttttgtccgctgaggcattctctgctccgtgagttttaacttttcctgtttcattcctaaactgcactatttgtgggtgcctttcttctatactccctgccacccttctccttctccccctaatccttctgtttccctttgtaaagggcctttactgctcacattttcgctggtccccctttctggaactttcctagcttctcacctctgctccttcactcataacatttcttaggccccaggcttactactatattgcccagtaccctcgccctattggtgtgactttgggtgagagctttaacctctatttcttttattctgcaatttggaaactgacagcatccatctcttaggcaagttatgaagaataaattgaataatgtgtatattccactttgcaccatgcatgatggatgactttgctgtccagtactgtgtagtgcatgtggctcgtcaaattgagatgatagaattgccagttgtcctggtttgctgcgattgtctgttttagcattgaaagtcctatgttttagcccctccgtcccagggaaaccaggaggttggtcaccctaaatgtgctgtaagtgtacaatacacgccagattttgaaaaaactttttgattaatacattttatatggattaaatgttggaaaggtaatattttgagtacttggggttaataaaatgttaagatttctgctgtttttactttataatgtggccactaaaattttatatgtggtccacattatatttttattggacaatgctggtatatcgtatgctctcaacaagtatcttcaaactcacctgccaagcacccgcctcctattcctaactctactggaggtg

SEQ ID NO: 63295 - DNA, 493 bp, Homo sapiens
cttaaaaatcagagtaatggcaaatctgtaagttctctagaaaaataattggaaagaatttataaattctgagtctcgtctttcctgtatctgattctgaaatcttgaatgtgctaattccttatattaacaggacaatgtttattgcctttgcttccctgtgccttagtcacctttcccggatgaaaggcattcccatgatatttttaaggcttgcttgccttttcaaagttcactctgtttattctgtcctactttataccagtcatgtggcagaaatcaggcctgctctgtgaatcggctttgtgcagatcatgaggtaactgtggctgttccacttgtcattgatcattttcttctcggcagtcaggcttttatgccttttcagagacagcatttgctttgcacaacatagacagcagggttataattaaaattagtaaattgctgctttaagttttgctggctttgtaaaaaagacaccttttttggt

SEQ ID NO: 63296 - DNA, 1932 bp, Homo sapiens
ccagctgctcgggagggtgaggcaggagaatcacttgaacctgagaggtggaggttgtagtgagccgagatcacgccactgcactgcagcctgggcgacagagcaagactctgtctctaaaaaaaaaaacaaaaaacaaagcatggcattatgggagccatgtaaataattacaaaacaagatctcttcttttccaggttatacacaggaggagaagatagagattgcccataggcacttgatccccaagcagctggaacaacatgggctgactccacagcagattcagataccccaggtcaccactcttgacatcatcaccaggttagttagccatcctgaggcttcattaactccaggcaacttttgagtatttactgagttaccaaacaggacatagagtatcaatatttgagtttttcatcttttgagataagccacagtctcctgaaaaggagattagtttattggcatcccatagcatccatttctctttcttcaacaacttccagcaagtgttatcataactattgatttacaccgttctctacactaggcagaagtttacagagaaaccatttggaatattgttatagctaaagctgaaatttatgctttgccacaatagcaatataaggggttaatttgatcatttaaaaaccaaatacatggcaaatatagagacactttttatgcccaggatcttgaaagttgttgaattctcttaagaggtgatatgctactttcagataatctgatttaagttactcacttttcttttcttctctttggctgagagatttttaaaatccttagaattttgatcttcagaattaacactggaacaatagagaaggtgccttcccaagtttactaccaaatgcttaagcctgtagcaagcagtgtgtaaattatctgaatagagtattgcttagtctaatttacagattccctgtttgaatggaaaatatactctgttgagaatttatatccaccacagcctcttacagttttcctagctcagtattacagatccattgcatcatccagcaagtcatgtcaggctgccaagctctcctcttgcggcccttttctagtaactactgtttttaagagatttgaagtatctctctattttgaactttgacttagagtttggccagactgtcttttgatctatgccttcttatggatctatttagatttatatacaaagcagtaagactaagtcttacctgggggttccttttcttaatttgtcttgtgatttatggtgtagataatgccaggagaaataaattaagtgacttatatgtctgagtcttccaacaatatcattattccagataacacccatgatgcctttgggtaactttcaataagtcatttaacatttttgatagcttccccatctgtaaaatatgagggatggagaaaaatccagagtttatctgaataataatgattctgaagagtgatcattatttatatttcccagttgttacctagagaactgtttctttttttatgtatacttgttaactcaaaatatcagatcttaaaagctgtggacataaggaaatatctggagcagttttgttagttttgatattgtttttaaaaacagcacaagtatgtactattccaggcacgtttttggatatttagtgagttaccaaacttaggacatagagtatcaatatttgagtttttcatcttttgtgataagtcacagtcatagaccctaatgttctagtctttcttatctccaagtataactcacctgcttgaatacttccagtcccagtatgcttaattctagcgaataactaccttttcatgggtaattctaactgtaacaaagatattctttttatttatttatttattttttaagacaggttttcatgctgttactcaggctggagtgca

SEQ ID NO: 63297 - DNA, 1297 bp, Homo sapiens
catccccaggaggcaaccacacctccctgtgagctcaaattcgactgcatctccaaaaatgggagccacagctgcgctgtcctccaatgtgccctaagctttcgtctgtctcccaagtttgttttctccagattcactgggtagggtcctgcccagctccagtggaggccacggatgcagggggcgacgcgctggctgagaaggaagtgcgctccctgagccagctcaagagttactgcaggagcctgcctgccgggagagccatttggagcctcggccggggctgggcctgcgttgggaacgcctactccaacccggggcgccagggccagttcagggcgcgcggcgcacagggcgatgcccgtcttgctcgcgcaagggtggggccgtgcccgcaagccccgccccccagccaaaggccgggggcgtgggggagcccccgccaccccgccgttgaccccatcccaccccagcgacatcgaaccttcctcagcatttccaccagtttaaaattaggtggaaccacgctattttcggtaggtcagaacagtcgaatatcggcagtttcttatggtttcgatctaagagctacagcgtatctgggaaatgcgtggccacactggcgctacgctccaggtttatcgtgcgaactctaaatttttagagtgaaaacattctccctaattcattcaacggctatttaccgggcatcaactaccatatttcctcaattctagctcacttcatttctactcctatcagcactatattttaaactctccttacccactgtgaaaagactttgcaggaaaagtagtaagcacacttctgccacattaaactcctacttaaacctcctaagagattatactctcttcccactctgggaaagccatcttaaatggcctcattaaacgcagagtagcttgttttgtttttaaacaagcactacccttgccccaataaagtcctgcgcctcagatttgcattgcatcagctagtgcgtgcagaggtttaacctgtcattacatcatgcttagggcagcctcaaaatgcagcaagagttggcagtgaggagtgaacccaatgcaaggaattgcagattacccactttcagcaggaaattttaactctaaccacttcctcactctattaagtgtgttcaatcacctcaacctcgttttacaatacaggctacacaaaacagcattaggaaaagaaatataattgaaaatagacacagtcagccccacaactactttttttccttttttttgagacagggtctcactctgtt

SEQ ID NO: 63298 - DNA, 3538 bp, Homo sapiens
aactctgtaaattactaaactttgttaccctagttatgtaagatctgttttcaaaacaccatactcactgaaaatcctatttgttattttatgtcattactgacatagctagataattccttcataactccaatttaacctaatcatgctttttaattacagatattaagaaagaatatttctctacagcaatttcgtaagaacttcccgaagcttagagggaatagattaatatttaacagatgtaaaatgcattaacattgtttctgaatttgtactttgtggaatacttatcctgaaaagttatcagtttcacatctattatacgtatttcagtttaaaatattaaatgttagtaaattatgttggaaagatgccaataacgaaaaaaaaactgtttggcataaactttggggaacaaattctggatataatcgcaactaaccatccaagattacagaaatctgtatctttatttaaattttcagaatgaaacactacacaaccaatttgtgtaatctactttgagtctcaagatctaccagtctaaagtcctcctaacaactaattaaaatcctctccaccataatttgagccaacaactcccagataaaattaccagaccattacatttgccaccacactacattctgctcttcagtaacttctaaaagtgatggtaacaccatagatacacactcaagtattcactgtcccacttttctaagttggttaactcaagtccttgaaagtgaactgatcaataaatctaaactagctaagagaagacctcattttaatcaatttgattttttttaatcacaaagatatagccattcaaatccccggccacagcaatttccaaaatgccaccatctcagaaagtctgttaatttatcatacaaatctccttgtcctttttaacaacaaaatgcattgaaagaaaaaacccagcactaaagatctgtgacctgatttcacaaattctggtctatgcactttcatcataccaacacatcatgccaagaaaacctcgtaagtttagctattaaactacagtcttaacagtaagcatttgttgagaacttagtatggggctgccactgctttcagtccacctattgtcatctcatcaattctcaacagggcttgaggtagatactgtcgttacacccattttgcagataaggaaagcgaagcacagagaagtatctgcccaaggtcacaaaccagtggagcaggatttgacccaaagcagacagtcggacttcacagcccgtgctctcaacatccaactgctgaagagttaacaatttacccttgacagccgctataagcaaaggtaaatgctcaactgctaggaagggacagtcagaacaccgtcccatatccagtatccatgtctctctgtttgtttatggcctctatgactttggcaaaagaagtacacacaatctgattttccgaacacccaagctggacttttctgaatgtccgagcaaacaaattatgtatctttccaggaacgggcagacagcgaaaacgaacctacgcatcggagtggcccaggttattcactttaagttataaatttgggagagttaagaaaggaccccaaactacccggcaaatgaaccctaggaaatgccaggtttataataagctagagcttccccggcacgccgttcacgcgctctcctctctaacgacataaacaagggaggaggctgcattcttcccactgcacaatgaagcctccggccgaagcggcaggaagagcgcagccccgtcccggacggctccagccgggggtcgggggcagagagcggaggccgaggcccgccgagcggcgcggtgcggcccgggcctccgggcgccgcggggaggagggggagggagggcagggccccggcagctgcccgcactcagctgacctccgccatgttggccgcacaccccgggaccctccacaacaaaggccggcacgagggcgcggggcgcgccgggcgccacccccggccgggcccgcctcccgggcgcgcgggggccgggccgccgccgaggcccttcccccgccctcggcccggccgcgcggggccgacccccgccgccaccccgccgggcccggggctccaggggcgggggcgagccggcttgcgaaggctgaaggcaggggaggggcggggggcggcgctcgaccgggcggcccgactccggccgagacaaaggcgccgccgcgccgactactgcccgcgccccggccgggccgcccttcccgccctccgccattaccgggcctgggcgcccgcctgtcggagagcccctcgccgccggctcctccctcaggccgggccccacttacctgtgggcggagagcgcgcctcggaccccggtcctggcaccaacgcgctccgtcgccaacccccgccaccgcgggcagcgccaccgcctcttcccggcgccgagaccgacgggacaccctgggccgccgccgcctctcgagagcgcgccccgcaacggccgccccggctcccccctggccgccgccgccgccgccgtttcgcgcgtcctcgagcccgccgcgcgcccccgctaaataccacacactgcggcggcggccatgaggaggcgcggccccgcgcgctgggagcctgggggggcggggctttcgcgggcgcgcaggcgcacaggcgttggcgcggccggcggcggcctccgcgggcgtagctgtgcgggtctccaaaggcggcagtaggtgcgggggctactcggctaccgttgctgcgcccgtgcaccgcgcattcaacggatcctggcacgtggcgctctggcccgcgagaagctagcgcttgcccgtcggctcagggcagctcctcccgcggcgctttgttccggggccgcgtgacccccccggctccggccggaggggtcgcccagcgggatgcgagccccaggctggccgccgccgcggccttgtgccctcccccttgttttgtctgctgatttagcccagcgcctccacggatccttcccaactccactcagtcccaaagaaaaagcggctgccctgcccgccgaccgggaccccacccctaaagagagtcccagcctctcccgaggttgagccgctcctcagcaacagcgggacgagcttcaaaagcttgtttcagctgaaaagtgggtaatggggaagcacgcgttttcctgtgtccatgctcatctggaaagtccctaattagggactctgcattccacttcttgaaataataaaaggaaaacatcacttgcaattctttgatgggtgctatgagcagaagcaagcatctgagacatttacaagccctaactggaattccatgtaagatctattaaaatggtattccgtccggacgcggtggctcacgcctgtaatcccagcacttagggaggccgaggccgatggattacctgaggtcaggagttcgagagtagcctggccaacatggtgaaaccctatctctactaaaaatacaaaaattagccgggcgtggtggtgcac

SEQ ID NO: 63299 - DNA, 1288 bp, Homo sapiens
aattaggcaggtgtggaggtgtatgcctgcagtcccagctacttaggaggctgaggtgggaggatcatttgaacccagcagctggagactgcagtgagtcatgattgcacccttgccctttagcctgggtgacagagtgagactctgcctaaaaaaaaaaaagagagagagagagagaaagacacaaggcaggacattatgcacctggcatccttcaaaaccttgttacagcaatagcggtgggcaagcatagatgtcctgacactgagggcctcaaagtcaacataaggatgtgcatttgggaagcccaggtagtgaaaggaaaaggcaaataaatcctgtcccctcctgctccctggccaggtccacacaaaagagtccattaaactaattggtgacaaaactcccagcagggttaggtttctccaactttccctagaggaggatctcagatggcctccttctggctcaggggagccaggtcacagtgacccctggggatgggggccagaccatggcctgggagctggaaaacagctcaggcaagtcatgcaccttctttctgagtttccccatctgggaactgaaggtcttggcctagaaactcctttcagctctaattctgtgtgtttacacaaactttacaaaacaaaacaaaaaaacaaaagctcgctctaggaaaactgttaacatttattagatatctactaccatgtgccagccacttcacactaactcgttgaatcctcacaatctaggtatactggtatacaggtatactgtttgcccattttataaatgaggaaataaggttcaggaaatgcaaccaaagtcattacaaataggcagtcatgtagttggccttcacactgaggtctgtctgggtccgaagttcatttctttccaccactcagcctccctatctcctttatttctttaccactttcaattacaagtcactgactctgtcaaacatgctaggaaggacagttgaagccatgctgcactcccctcagccttcagtctctgctctccaaccttttttttcttttttctcgctatctcgcccaggctggagtgcagtggtgtgatctcaactcactgtaacctctgcctcctgggttcaagtggttctcctgcgtcagcctccggagttgctgtgactataggcatgagccatcacacctggctaatttttgtatttttagtagagatggggtttcaccatgttggccaggctggtcttgaactcctgacttcaggtgatccacctgcctcggcctcccaa

SEQ ID NO: 63300 - DNA, 1225 bp, Homo sapiens
gcccaccttggtctcccaaagtgctgagattataggcgtgagccaccaagcccagcctacaaaccttatttaacatctgactttcaacatttgaatttgaagtcctttaaaattgggtaatgtttcttataatcctaggagggaaaagtaagagctttcttttctctttgttttcttcctccttttaataaaaacaaatagacaaaactgtttgttagatggaacttaagagaactttgtcaagagagaacttcaagacgacctggaatatctttttttttttttttttttagacagaatttccttctgttgcccaggctggagtacagtggcttgatcttagctcactgcaatcttctcctcccgggctcaagcgatcctcccacctcagcctcccaagtagctgggactacagacacgcttctgagctcaagccatccaaccgcctcggcctccctaaatgctgggattataggcatgggccaaccatgcctggccagcctggaatattctacgttgacctcacacaccacccttcccaaagtggactcaaatgctagaatctgcccttactgcaaagagagagagggcttatcagtcactttcatgagtcacccaggctgctgcacatactaactatccaatatgcagcaacaaatcagaagcaggccaaggttcatggcatacacacttgagcaatcctcagagagaggctgccagaagccacatgcattctaccccctcagcgttcctctcatccgcccttcctcatcagcgaggtggcttccttggggtctttcagagctcaagcgtgggtgacatccaggaagtgggctctgcccttgagctcccagtgcaggccaggagcctcccttctctagtcctgccccttccttggcactcacacaaggattttgtgacctccctctgcacctcctgaacactaattacaggtgtgtgtctacacacatgactacctcagaagctacaggacagcctctgtgcacagaattccttaggtaagggcgagggcacaattgcacaagccttgcctcggccaagttttccactaaaaacaaattgttacttggcagccaaagcaattaggcccagttcaggaaattatctacccccgaatagagcaccaaaacagtctgggaccaccagccttccccaccgtcttcacatgtggttcaatagaactgagcaatgcatgtatttgttc

SEQ ID NO: 63301 - DNA, 573 bp, Homo sapiens
cagctctagtacagagcagttgccccatcctgtctgtggtaagcaagaaataaaggcttcctgggacagagtcaatgtgaagaaagataacaccaggcagagccttcaggtgaagcaggaacatggcttccaagaacactaatcattggttttgcagagcaaacccctagctggctcctttgtgtgcctattttggcccaactttcacgtcagcacgtttccaccatccccaagctggaacttccctctgcctctccgtgactgacccttgcctcaccagatgtttattttgcctcccaggctgaggagtttagacactgctcttgcaataggggccccaggcagctgtgtgaccttggcatgttactttgcatctctgagccttggtgcacctcctctgcaaaacagcaatttaaaatagcacctgactcctgggttgctgtgttaattagatgagccaagacatgggaggtgcctagcccagtgcctgacacgaagtaaatactcaattaaagatggaaaaaacaaaaataaactcacttagtatgtgtttccctctgtgttgccaaaacc

SEQ ID NO: 63302 - DNA, 561 bp, Homo sapiens
ccagggtatcacattatgtttatctgccatatctccttagtatcttatggtctgtaacagttgttatcagtctttttgttttgttgtttatgaccttgagagttttgagaagtactggttaggtattttgtagaatgtccctcagtttgggcttgcccgatgttttctcatgattagacaggatcacgggtttgggagaaaaatgacagagatgctaagtactctatggattgcatcatgtcagggagtacatgatgtaaacatgactttttactaatggtttcaactttgatcacttagttgtgaaagctgattacacaagttgggtcattcttgtcatacacaactaaatcagagttgaggggctgtgggaaaaagcacttgaggcacatagcattgctccaagaattgaattatctgaaagcccagctgctaaaactacctgtaacctgaagaccaattttacctaggagctgctgaaatgacctgctgtgactataagactagttttacccatggtgtcactctctagtgcttgccagctacccagagcttctctag

SEQ ID NO: 63303 - DNA, 448 bp, Homo sapiens
gaaaaaaaatgggccagacacaaaaggccaatatagtatgattctatataaaatatctagactaggcaaatccacagagacagaaggcagatgaatggttgccagagcttagggaaggtggaatggggagtgattgcttaatatgtatggggtttccttctaaagtagtgaaaatgttctagaactaggcggtagtaatggttgcacaatattataaatgtactaagtgtcactgatggtaaatattgttatgtgtattttctgtgtgtgtcagactggtaatgtgctgatgtcataacaaggcttgagggagtcacatctcacacatgcacatgaaaacccaacgatcatgcttaggaactccaaaaagatcgtgttatgtggattttatcacaattaaaaaaactttcataggaagaaagaaaaaattttttttcagagatctttg

SEQ ID NO: 63304 - DNA, 1255 bp, Homo sapiens
aacgggatgtgaacacgtgggccacagccctaaggactcctgacagaccacatagcccacaactggccctgctcatggctgttccacccacccctctttattctggagcatatcagggaaagaagagttgacgatagattgccttcaccctcacagtgcacaaataaagctacgatgccaactttgcatatgcaataaataaataaataaataaagtaagtaagtaaatagatgagtagttgcctggggttgggggaggggcaatggggaatgattgcctaatggatatcgggtttccttttggcatgatgaaaacatcctaaaactagatagtggtgatagttgcacaactttatgaatatacaaaaccccactgaattgcactctttaaaaggatgaatttaatggtatgtgaattatacctcataaataaaaattaaaaaaaaacacagaaacagctttataagctgagtattagaggcatggaaggatccatcaaaaggcaaagttgaaagagactccttcttaggagcaggaagaggacttgggagggcaattgtttttcattattagtccttctggatcctttgagacatacatatatatatatattttaaatgtatctgtattactttggtaaaatttttaaagaaaatttaaaggaaaaaagtgacataagaatctttctttctttgtagccttggataagctagcaactcatgtaagcaagaacttttctctcttatttccaggcaagctgccaaattaaatccctttcttttcctgctggcgtctgccaacgtgatgtcagagactgaaaactagcttctaagtaaataggaaaaaagaaaaataaaaagcacattcttaactaaaatcacacatttataattcttcaggctcatgactaacacaatgtttttcataaccctgaaaaagtgaggagcatgtcataactcacaaataacctctaaaaccatttaagagctttttagcaagagaaaggagagtgttaaacagcagtaagctgtcacatcaatccagatctaaattccaaaccagtaggacaaatgtacacagccacgtgtacatgaactctgcagatatcaaaatagaagtttatgctttcagctgagcaatccattttcctggggagaacactttcttcctgcaaatgagtatgaaaggcctcaaattcaagatttctgagcaactgctcctgaagaatccagtttcaactcctacaaaatgcaac

SEQ ID NO: 63305 - DNA, 812 bp, Homo sapiens
cttggctcacattggctcgtgcccccgaatgcctctccctctgctcccagctccaccctgccagtcctacccagcttcctctgggagccttccttgcaccctcagatgggatgggtcctcttcccaggcatgtgggttctcagacgcaggcagagctggtgcatctgtcttcattcctctaaagtacccttcacacctcagggctgtcccacaggcaattccctctgcccttgtggaacttatgagacatcactcaaatgcacatgtaaacagcatgatgtcaatgtgatcactgcaaagaggaaacctccactcttgccccatccaaagtacactccacacctcagagctgtcccaccggcaattccctctgcccggaatgcaccttcccagaactggctaacgccagctctgatggccccagccaggcccctagggagtgaatgatctttcgggtcatcccagcacccagcacccagccttcaagtctctatctgagtcctcagatatcatgaagtagagacaggccagactcagtgtcctttttacatttccgacccacagtaacgtggaagataataaacattgttgaagccactgctcttgggcgtaatttgttacacagcagtagatgtgagggccgactccccactcctgcccctccctctgtgagatgctcacagcaccctactggtttcctctttgcactgaccacattgtcaccatgcctgtttgcatgcatatttgagtgacgtctcattagctccacgagggcaggaaccttggctgctgtgcccactgttttgtcccta

SEQ ID NO: 63306 - DNA, 1560 bp, Homo sapiens
tcatctgacaagtaacagacacgttaggtgacccaggaggcacctttgccgccatctctccttggaggcggtaccctcccaggaggctcccacccaattcccttgtcttcttgtctctgaggctttttctgaggtcaggggagggggcgtcctcccctctacccagcataacttggttgggtgctgtggcatggaccttgcttggggtaagggagtgccctgtgccctcctgccatccctagttccaggtttcctttattctaattttctagcttgatgaaaacgttggcatgtttataggaccacgaataaaatgcagtgaaatttaccttttgcattccctgaaacagtcagcctgtttcctgaaacaagtttccttgacctttggacattccaggagtcacatttcccaccccacgctgcccccacccactggctagctgatccttccactgtgctgggctaaggctatgcttacgttgacatcactgaaaccctacgtgccaagctgtgcatagaggaaggcaaagtgttctaggaagcaacggaatacaggtggtccctggcggctcggtctgcaggtgaaaaaatgcaggtgggggttgttttttagggctgtgtagggactgatctgggaatcagccaagggagcataaaacctgacaccacctcccataatctgggtgcccagcaccctccatttaactctggcttggtggaacccccttgcacttccctccacaagtgccacttgggtcacaagccgccattctgttcattcacctgacagtgcgcccttctcctggtccctgcacctctgacacacacagatgatggtgagttgactccacctggtggctccttggcccaggttatcagtgatgactcaaggctgagctgcctatttcctgggaggcgcttcttagaaaggaataggccctgtcacttcccaggtagctttcagcagcccctaccacctctcccacctaccttcgacagagttgcttgccagccttctcagctggggcttcctggcaactacaccttgccagggcttgcagcccagcagcatggcaggggctaatggccacagggttgtcatgggaagcaccagagggccacaggatccctagcctgggcctgtctctaggtaacctcagaatgcaggcatggaagaggatcaaccccttgtcgggcagcagaggagactgaggcaaagagaagaaacctttctgatgtgctcctcctcactggacctttcttgtccagcttcccttccatggcccacaccaggaggcagcaactggctggctgtgcacaaggatggaaatggattacaccagggtgtgcactgacccagggaccatgcgtccaaatgctggtaagccacctatgaaggatgcccatggggtggcatcaactaagccaaccagattgggaccagactaaagaatatatggggactaggggctagaagcgagaggagacaagagggaccagagagcctggagccaaggctgttgctgcccccaaaccacctcaggcactgtggactgccaa

SEQ ID NO: 63307 - DNA, 1639 bp, Homo sapiens
gtgacctgcaaccttagtatgtgaacaaatggcaacctaagagtattcttgtaaaaaaaaatggctgagtctcagccaatcacagcagccaagcttcagccaatcacaggctgccaattgttcagaccacttctacataaggcaaatgcctcatcacaggatgcctggataaggcaaatgccaacccgtaggtaatcaagctgtttctgcagggcaattcccttttctgcctataaatactgccagccctcattgctgggtgaagctctctgaacctctcctggttcagggtgctgccagattcgtaaatcattgttcgtgcagatcaactctgctaaatgtaatttgccctaagtttttcttttaacaatggggtgactggttttgaaaactgaaggcagactttacatagttgttgaaatgatatggtaaagatgtccttaaggacaggtcagaaggcaacagattgcagcaactgaaactccgaacagttaagtgacctgccccaaatcaaacagctggtccacagtgcagggaggctcttgaccctcacactctccttagccacgatcttaaactgccccttagaaaaaaaacccaagcgtacaggtttcaaatcagaggattttcaactaagaggagttccaagacaggctaactagaaacaacaggttcattaaatgatgtcttttactaaaaacaaatattataaacttttagtaagagcagaggcccacagtgaagctcaaagtgactacttttgaaaggaaattgccattgctctatccacagaaatacatcacacctgttaccactgcacactcttggctagagatcaggcatactccagcataataagataaaaaaaaatccttttgctttaagctgtgttctcttatttagattagaacataatggtactcacaatattaagaatttaatgacttaaaagtcactatactacatatcactgagcaatgcaacgtgaaaagataattttctatcctctcttgcccttagaaattaagttcagcagggtgaagtaaagttcatgaatccagaagatggactgacaaaacctttccaaccagttggttcccattcccctccaccatccgaccctaaggctacagatcaactatatacaacatgtatgtatagttcccatatacatgtgattctgagacaccatttagagccctatttaaaataaaataatctgcagagaatggacttacgtaattgcaacattgctcccatctataacaatgtgtttcaaatccgttctccctggttcattttttaattccagcttgtagggtatttttagagtatctcgaaacctttgaaccccagtaactgaggaatcaatatgatcagaaggtcctgccgaccttgcatcagtaaccgaaggtaacagctggggcagtggcattggtggagaaagggttgagcaatttggcttagaatgaggagaactacaacatcctaaacgtttttcacaggcagatttcatattatttggaagcaagggttctggctgctggtgtaaaccattttcaggaaaaagtggaactctgggctggtgacttgaagctccccttgaaacaaaattgacttctttgggacttggagaggc

SEQ ID NO: 63308 - DNA, 499 bp, Homo sapiens
accttgtgtgagtgtcaaaagttcttttttcaaggaagtgggcaaaatcaacaaatccattgtgtaattgtctgcatgggcttcaacaaattgtttgaattcccttttcacctctgattctttctgactactgggtaggttctctttattttcaaagagctttacaaattgttgaatgtgactcctagccatgaccacagcctcagcacttcctctgatgccaagaaggccaatgtccagaatgcagaggtcagcacaagtatcctgaatcaagcttttcagaaacaggctctctgccccaacaaaaatgcagtgcatgtccttggggtaacattctctttcttctagttcaggttcacagattcctttaatatattcctgtaaagagaaaataagaaattaggtcaatttacaaaagttccttatagcacataataaattaccatgtaactacaaatgtcaggccgattttataaaaatcacaagcatgtttgtaatt

SEQ ID NO: 63309 - DNA, 496 bp, Homo sapiens
gagagctgttagccttggtgtgcaaaaattaggtacaaaatgtactttaagggatggctaataacagttacagagggatacttggctcactgcacgctttaatcaaagaagcatgctcttggccacctggaaggtaaggaggaaaaatccccacactctactgagagatgagattcccatgggggatgggctaattacaaaatgggctgattgccaggaggtggaggttgcaatgagccaaggtcacaccactgcaatctagcctgggtgacagggcaagattccatccccccagaacagaaacaaaaacaaaatcggctgactgggtttgggttgccaggcaattaaatgcatggtaaaagcattgcaccgttttctccaacagcatttcccttttgaaaatccaggatgcaatataaaaatgggacccttaattttgagaatgtctttgctttccagctgtgcctgctttttaggccctagtaactgcatgctt

SEQ ID NO: 63310 - DNA, 2892 bp, Homo sapiens
aaaataggtaaataaacatacatcctttctttctgacattctccgagcgttttattactattaatggtttttttccgattctcaagaacacggttttcaccgtgtgacacaggacagtctcaatctcctgatctcgtgatccttccacctcggcctcccaaagtgctaggattacaggcgtgagccaccgcgcccggcctacaatgttttaagttaagctttgaagaactacacagctgagtgccccgtctcctttaaggatgtgaaatgcaaacactcacgattttttgttaaatctaagaacatcaggagatacgactactcagattcaaggacactgacattacttgacaaagcaggatgcaaaaagagggcccttcctgcccaccccgcagacagggctcatcatatgagaggcaagtatcaagaacgaaggctctggaaacaaactccctaggtctgaatcctgctgccctacttaggagatggaaaaacctagagaaacttggttacctaggaggagcaacatactgtgttgctttttggtttggaaagggggggaagtagatagaggtgctgaagaggtctgaaatgctgatttaggcagaaggtgagtcaccactttgagtttcagtttccccagctgttaattaaaaaaaaaaaaaaaggcggggtggtggtggggaggataaaatctaccttattagaagccataagggctgcacattccttctgaagcaacctgtgatgttcttaagcgttatgtaaatgttagttgtaggtaatatcaatacaaagaataacgctattttttgttaacatattaaatatccggccggggtggctcccgcgtgtagtcccagcactttgggtgaccgagatgggaggatgacttgagtccaagagttcgagacctgcccgggcaacatagtgaaatcccctaccaaaaaaaaaaaaaaaaatgagccgggcgtggtggcgcgctcctatagtactagctactcgggaggctgaggtgggaggatcacttgagcccgggaagtcgaggctgcagtgaactgagaccgcgccacactgcactccactgtgggtgacagagtgagaccctgtctcaaatagaaaaaaataggtaaacataaatcctttctttctgacattctccgagcgttttattactattaatagtttttttccgattctcaagaggaactgagatcccaaaaaggctcagaactgcagtagtggaggcccgggactgggggataaaggcttaggtggtggacgaggctgcgggcccagcaacaggccttgcgtaccatcctgggggccggggaactgacaacaacaggcgacatgcgcagcgcacccgatccgtgccacacgctgtgcctgcgcttcatacacatcccccactttcatcctcgcgacagccctctgaggtaggtactttcgtcagcgccactttacaaatggggaaactgaggctccggggatcaagccgctatccaaggtcacatggctcgcgagccgaaaaggcacgttcgctggctcccgagactgcgttcccaacccaggcgcatcgcggcggacggcgggggcggggaggagcgggagcccggagacccggaccgatcgaggccgcgggcgcgcgggggcggcggccggactcaccttggcgctgtgcaccgcctcctgcgccccgcagagctgcagccagatgcgcgcgggcagcggctcctcagcccctagcgcgccgagcacggctaggctcacgccaaacaggccctcgatacggccgcggctctgctccagcagctccgccttctcagctggcgcagtgaactcgtccagcaccgcccgggccgccatggcgggcgcggcctcccgcggcggcgccgggggccggcggcggcgacgccccctcagcttgctgccgctgctcccaagccagtcaggcggcgtcggcccttcccggccgcctcgcccccgcccgcgccccgccgcccgccctcaggcccggctataccatcccgccacgaccgcagcagcttggcaattgctggcagcgaacccctccgcccctttgccgccgccgcgggccgggccccgccgccgcgcatgcgccccggccgcagccgtcattgaggctcgccgccccctaggggaagggagtagggtgaaggcgacggaagttgacgtcaccctcagtcgccatgttggttgagaataaagggatggttttggaggcctgggcggacttctttgatgaggggaaaccgctttcgcgggatctggtggatgtagatatatgggtttatagttggggaaacttaattgccaggaggcgagactgagagtgtcacagggattggacttgacctcagacatcttgacgctcaaaccaggattctagcagttgagttattcagtttcacgttaatccacaggcagacgggacttttctttctctgtttcttcccttcctccctacccttttaccttcttagctgcccttctcacttttttctctttccctttttatttctttcagtaaaaatggtagcaagaagagaagaaaatgggcatacttacggagaattgaaaatcaaaaaaatgattaagataaattcaagaaggccgggcgcggtggctcacgcctgtaatcccagcagtctgtgggggcagaggcgggtggatcactcgaggtccggagttcgagaccagcctgaccaaaatggagaaacccccgtctctgctaaaaaaaaaaaaaaaaaaaaaaaaaaaaaaaaaaaaaaaaaaaaaaattagcgcggcgtggtggcacatgcctgtaatcccagctactagggaggctgaggcaggagaatcgcttgaaccctggaggcagaggtt

SEQ ID NO: 63311 - DNA, 1141 bp, Homo sapiens
tacttgtcctaatgctccccctccgcttgccccccacccaccgataggacccggtgtgtgatgttcctctccctgtgtccaggtgtgttcccattgttcaactcccacccctggacactcgctttttcaccctcctgccagcttttctgcttagacctggacacagagtgcagcgggaaactttcagctctcacacatacctatcaagcatttattgagctcctgtgaacacagacactcctgctctctccaggaagcgctcccggctcagggcgccttgggtccgtggcgccacctgctgttctcgcggcgccagcgcagtctgcgaggccgtcccagctctttccacccgagcgcgaggtagacgccggggccacccgcagcacgcagagcttctgggagccggtggcaaggccgaattgggatgcaaaccaaatggacgtgggtgactggcagaaaacgcctcccacaaatgggagggatttcggagggaaccgaaagaaagttggtaagcacccacagccccgagcttggcttttgttttttctctctgacaaaaaagcttggaagggcacttccaggcaaccaggggcgactgggtcagctgctacccgcgctgcttcctcgaatgtggagagagcagctggggaggtgggggagtgcatcagaagctcagtaaaatgcaacggggactttgcaccctctttttgctgcttcaagtggacagaaggtgatcagatgtcagagcggggagggcgacttcctccatccctacccccgccctcaggtcacatgagggaaattactccccaaagctctctttcttaacactgtctggtgatgactccagaacttctcagcatctagaacgacaaccttagcacgtcagtctgcctgggcctgccacctccggaggcccagaagtgacaccgaaggacacagggcatctccatctagctgttctcagctttgatgtgcccgaattaaaggggtagggtgggctgggagcggtggctcacgcctgtaatccccgcactttgggaggccttgggcgggggggggggggggcgcggatcacgaggtcaggagttcgagaccagcctggccaacatagtgaaaccccgtctctactaaaaataca

SEQ ID NO: 63312 - DNA, 1421 bp, Homo sapiens
gccagagtattgagtattcagtcacaacaaaggctctttggtgagattaagggtgtgactcacagatctcctagatcaaattagagagcatctaggaaatttgggggtattgctctggagcaatctcagcaaaagacaaaagtagagaagggattatccaggaaatatctgtagaggaccatcttgaataatggagaaaatacccatgacatacacaggagactcacaaggttcttgaaaagtttatactgacagaaacactgccagcttaaaccaaaaaggacagagagagtacaggatgaaagaagtctgttggacacccaaaacttcacaagcaggaaacaggttaataaaactactcagatgaaagtacatgctacctttcatggggaaaaaagggatgactaagcgggcagaacctcaagcccagagggtggagccatgagccatagtggatgagatcactactggaccaggttcagattccagaactgtgtaaccatgggcaagcatatcccctctttgtgctttcatttccccatctcttgatagagagaatccgacgaacaggtctctaagaggctttgtagctcttacagtctgttatcacttaatgatgtctgtgcctgccctgggtacagagtaagtctcaggtggtaggtatcccagctctctactatctcctagttcgggtggttttttaattcagcacatatttaggatgcctgctctaaatatccagttttccaaagggtgtagaggtacccagcattcttaggtttctatgctcttatctgtccaatctccgtgtcaattaattactgtttaaacattaaacactaaagaaaccctttactgctttgaagtacacacacacacacacacacacacacacacagggagagagagagagagagagagaatcccttcaattgtaacatcagtactgcacctagatatctgacaggagaagtgtaaaggattaagtttgacccctgggacatcaaaagtccaccctgggaaaggaaagggatgaggctattggaggttctttcctcagaggtaagccaaggagctccacaaaggtgaccagaagctgacatggctcttcctgaaatctcgagttagaattatgctattagcaaaaataatagcagcacctattcactcattcctcctccagggagctgagagtttcttacgaatgggatctcatcatccccaaagtataagcaaggaaaagtagggatcattccttcggtttgggagaaaaaagactcagaggtcactggacatctcaaagacagagactgaccaggcctgcccttctccagccagctctgggggctgctgaaatgccatgtgacagtgaacagctgccaccaaggcccttaacaaaacttccagggactcaaaactta

SEQ ID NO: 63313 - DNA, 3282 bp, Homo sapiens
gggagaaggcctgggcaggggcgggagggggcgccaggcggccggggcgagggcgcggcgcccggggcgctcgccgacagcgcccgccgctccccgcgtcctcgggcgaccaggcaggggccagagagagccagcgaggcccggggccagcgaggagcggtcggcctgccgggcgcccgtcctcgccgcctcttccttcctcctgtcgcccgcccgccgccgccgagattcgcaatccccgccaagtcgggccagcaccccttgattggccacacgggcccgggccccgcacggagggagcggcaagggccccttagcggcgcccccaggcctgggtcccccaagggcgacggcgccgagtccgggcagggagggtgtccgcggcgtaccccctccgccgccgccgccgccgccgccgcctccgcctcctgctcccggcttcctcctccccctcctccgcctccgcctccgcctccgcctcctctgccgcctcctcctcctcctctcggctcgctcgcgcgggtccccggcagccagcccgctcgccggtccctcctccctcgctccctccctcctcgctcgctcgctcgcgcctccgccgggcctcgctcgctcacctttcaccgagcgcggcttcgcctgcttccgcctggacatgtccggggctccgggcgctccgtcgccctccgcagccggctccccccgccgccccccgccgctccgggcagcccttctcccccttctcctccgcctgtctcttggaaacttttttttttgcagcccggttggcggctgtggggagcggaccgcaggtccggggcggcctcccttgggggggcagcccgggccggccgaggccgctcgaaggcggggggaggcccggggggcgcgccggggccctgcctgttgcaatgcggcagtccggggctcccgatccaagcggcggtcccagcggcgcggggagtccggaggccactcggccgagccgagttatgcaaaaaaaaaaaaaaaaaaaaaaaaaaaaaagccgcccccctcctcctcccaaccccccgccggcccccggcccctgcggccccctccttccctcccccaccctaccgccaccctcaccctcctcctccttctcctcctcctccgccccttgccggatttttgtgcaaagtttgcaggcgtccggccacgcagcccggtgcggagctcacaatgaacccatctgaggagggggaacggggctggagtcgagggtatctcaaggggggaggagaccgggaggcggtcgggagcgcggaagctcagtaccccccaggaaaaaaaaaaaaaagaagccttcgaattatcccctgccgcacaaaaaaaaataataaatattaatggctcaaaaatgcccaagcgcctggtttggagattatgatggatggggggcgggggtccctcaactcagcctacttggaggggaggctcgaaacggccgcagtggctcggaagccgcggctcggggcccctggctcacgcccccttctctggctctcggatcggcccggcgccggccccccggaggaggaaggggcgcgcgggggcgctcaggcggcggccggcaggcgcgcccgtgccccgggcatcgctcagcccgtgcgccgggccgccgctgcctgccctcgggctgcggtgctcagcgcgaggcgcgcagccgatccccaggccggtgccaagtcgccggccccgctagctgcctccatgggccaggggctcggagaggggggaggcggcggccgcggtggcggaagaggaggacgagcaggcggcggcggcggcggccgggctcccgtcctcctgggcagcggcggcggcggctgcgccccggctcctccgcgctccagccggcgccggcccgcccgccagcctccctcgcgctcctgtcttctttgtggtcgctggctctcctcctcccgatccggctgctggggctgcactgcagagacacataataaagccaggcttggctggaaatgtagccgggtcccagcaggaggatgtgaggagcggagtcccggcgggggagcgctctgatcccgtggggcgccccgcactgctccggctcggatcagacggagagagggccaacagcaccgagcgatggacagcgctggaaatacagctccggccgcccgcaaaacccggaccgtggtggcggcggcggcggcggcggcaggcacggcgcgggcgcgggcaccgcaccagcacgcggggccggggctcgggcgctggctgcaccgggggcaggaggagggaacacacttagggcccacgcggctgtcaagctcgccaagacgcatgagcctcacaaactgtaaaaagtgaaagaatgggggagcaaacggagttgggctgccctagtattgccacctcgcgatgtatgcctcacgcacatgaactatccagggacctggctctgccaggttggcttttgcccaccggtcggtgttcaaagaccacccctgccccacatccaacaaattcttccaccactgggctaaccccgtgcgccccctacacccttatttgtagaattctcgcgcctggtgtgcacttcctctgtccgactgtaaaaggaacaccttacccctgagaccttgcaggagcaccccctccccgcgcagttgtcagaagaaataaaccagctgctactttctgcgaggttttacccagccgccagggggcgccgcgcgtcccccgcagctcctgaaccggctgagactctggtctccgggcaggcccgggaagggttctgacttgggaaaagtcttccccagacggctcccctaaaccgttcctcggagcctctccctccccaactagctgcaggcggccaggtctcgggtggggagcggccccgacctcgcccccctcccgggtgagtggcgccaccttgggccggcgcgccccggagccaggagaacggagcgggtgcacggcgcggcgctgggggttatcaatctctcggatcgataagttgccacttggagaggggagggctacgtcccctcggagacgagttacccagggcaacctttcacggaaaaacccgctgcccgccgagaacagcgccggggccggccgggccgcggcgcccgccccacgcagggtgcccgcgccccgccgctccccagcctgccggccagccgggcccggccccgctcagctctctccgcggtcccgccgggccctgctcgccaaccccgtgctgggctgattgccgaggtagatgccacccacgcaccc

SEQ ID NO: 63314 - DNA, 1824 bp, Homo sapiens
cagagcccccttttccagcttttacacactcaggccatcattggggctctgtgccccagtactttggggacagtctccccaggccctgtgtggatgagggcgttgtgtccagagccctcagagggcacctgggccccaaataccatctggacagctcgccaatcatccttcctcctgcccagatggaccatgaacatgcttcaccgggttgggaagctgcctccagctcacgctcctcaggaaggctttttgtttttttaagagtctgggtttcactctgtggcccaggctggaatgcagtggtgccttcatggcttgttgtagcctcaaactcctggggtcaagcgatgctcccaccccagcctcccaagtagctgagattacaggtatatgccaccacaaccagctaatttttttatttttatttttcagagatgaggtctggctatgttgcccggactgttcccaaactcccggcctcaagctatctcctgtctcagcccccagggtgccgggattacaggcatgagccaccacacccagctcaggaaagctttcttaaacctcctcctcagaaattctgcctagaaagaaacaatgacatgaaaagattccataaacacactcagggattcagggctcttcagcattcattttttttcttggcctcacacgtggctgagtttggccggccctggaatgtgcaccgaccccagtcccaggaccccaccagccacagtgccaatattaaaaccttccaggatgcaaatcctgaagccacgaacaaagccaggcctgagttcatcctagcaggaccgggcttcccactggctgtcagcgacccctcctcccaaagttgtcctagtcccctccagcttgtggccaccaccccagtgcccccccccccgacccccaaacccggcattgctctcacactaactgcaatttgcctcctaggtgaccctttgtcttgttcctctcctgtggattggccacaaaacagccagagggacctttgcaccataggttcctgctcatatctgattatatcactctggtgtgatgatgcaattgttgccagaggaggaggacgctggttggtgaaatgcctgtcctttttttttgccttctccatatccggtcaactttcttttgtcccctttttcttacctgatgcagtggtcaggaccagggctgaaactccaagtactggacgccgggatgattcctaggcaataaactgtaactgtttttaaactttgttggaattcctaagggcctgagggggcgtgttgtgcctccacaccctctggcaaaatcggggttcacagtgaaagcagctatattgactggtgctaaaaataacccactaactccacacctgggtaaccttactttatctgaatggcagtggactcagggggaggtgcttactggactagctctactgcctgcaatctggatgagcacggtggccaaaaataatgtcccttccacagagggaaaagcttgggcataaatggagagaaggagaaaaagtagctgaggataaagaaaggaaggaaggggttacatagtgagggaaatccaatatactctaacatcttgaaagaggcacacagcaagaaacgaaagtgtatcttagctcaatcatagcagatgcctgaaagggtgaggctacgtctgccaagaccactcctgcttttggaacctgacaagatcaatgcaagcctgcaaacccgagtggcttcccctgggagacattttcatatgacgtggtggtggactggacgaattattaacgactgaatgggattctagtaa

SEQ ID NO: 63315 - DNA, 1551 bp, Homo sapiens
gcaataaaatgattttgaatgaaagaatgccaccaataaatgaacaagaaggccttgtgatcaaatacaaatgtagtcaatcccttacagatctcttcttaagttataggtatttgggcttacactttgcctcatttaggaattatgaaagctgggtgatgtgagaggaaagtaaccaagagagaagtgtttacttaaggggttggttatctaggataccataattaaggaaactggttatttagggttctagttagttctgtacagatttcattactccttgagatccttgaggacagaaccagctctttgatttctgtatccctcgctagcgaccagaataatgcctggaaggtagtgggcgctcaatcaacatttgacgaatgaaagaaccaagcggggaacgggggataaatgaatgaacgaactggctccggagggctgcagttcctccccggggcagcaggcgacgccagcgttacgcccgcctggccgccggcagttcttggtccctccggctgaccgtccaacgctaggcgccgaggccggtgcaagagacagccaatagaaagctgtcttagttggaggtctagtagaggaatccaatgagcgtagcgggtctaggcaaggggcggtgcgacggggaggggcagcggggagcggttagaggtgggagttggcgctgcgggccgggcgggggccgcggaagctgcgatgcggacagggcagcggcggtgacccgagctgccgcccgacatgaactcgctggagcaggcggaaggtagggtgggccgcccgggcccgtcccccgtctcccctcggaagctggcggtgctccggaggagccggcgtcgtgaagacccccgccccgggaggaggccgcagaggatggagctaggggcccggagcttgggggcgcgtaggcggccgtacctggccagacgcggggggcggtgcctcagctccctgagtccccacaaacctagagggtcgacctcctcgccagcttctatttttattttcttttcactggcagacacttgcacttcgtgcattgcagcctgctaattcatttcatttcattctcacagccccgcgagttgtatccctgattcctgcggtggtttccggtaactgccaaggttaggaagtgctgctcggtgttttaaagtttaaagcacaccactgcggaaaggataccccaccactcactcggagcagcttagacgcccctgtcttctagaactaggcgctgcctgggtgccacgaagatcacctgtaccccttcggagggggcaaggggaatgtctttccacacccactcgctatcagtgtcaagaagtctagtaaggccagacggcgtagccattaattaaatataagagctggaaaccggaggcgggtaattgcagtcaggtagacctcgaagactttgatgttaggcactacgtggttctaataggaagttcttggttcccagagagctaaaactcgacctgattttaattttatttgcaaccctgaaaatgttcgcttttggcgctggccgag

SEQ ID NO: 63316 - DNA, 691 bp, Homo sapiens
cagtggtatttttactagaactgtgtattgaaaaaattctgtcttttcatttttgcagacaggaaaactaattttgaaacctaggcctcatgttcaatgacaatcttcactcattgttatgggacttaaaatagcctttcttcgaataagtgatacagcaaaaagccataaaggattccttttgcggttggatatgtaaaggtcatagcagcaactgacaagaagtgtgcaatatttacctggattatcttgatgatggtgactcattatcagtgctttggtacttttgattacctgtgtttcagtattagtgtcactttagtacttcagatcctgcaaatatttttgcagatgaagtatgtatgtatgttactaagttaaacttagaaacagaacctcattcagtttttataatgtatttttgcaaactactgtaaatagcaaatcaatgccaatgttaaacaaagaggaaaacgttgtgtggactttgttctcttgcaccagtatttcaggaacatctgcttgccatccccacagctctttaaaactggctattatgtgtgcctttcattcttacatttctaatcatactgcaggaaaaacattggattcagcttagactgaggaaaactctccattatgttgtaagaaattatagatgttttgagagacactttttgttaaaccagat

SEQ ID NO: 63317 - DNA, 1254 bp, Homo sapiens
tcctatgttgcccaagatggtctcgaacttctggcctcaagtgatcctctcgcccgggtcggcgttactattctagtccaacctcctacttacccggtaaacccacaaggctccgcccctttgccgaagctggccccgcctatgccctcttccacgcctgcgcgctccgtgcgccagttccccccaccccgccccgccccaaccccgacccggcagacgacgcgccgtgcgcctgcgcacggcttgcccatgtgtgctgcagccgtcagccggcccagctgagcagcagcaacggaccttgttaacggcgcggcagcctccaccgcctgctgttgccctcctctctcggtggtctgtccgcccagcgcacgtcaccatgggcaagagccggacgaagcgcttcaagcgacctcagttctcccctacgggcgactgtcaggccgaggcggctgcggcggcgaatgggaccggaggcgaggaggacgacgggccggcggcggagctgctggaaaaggtgaggcgagggctccgtcgggccgggaggcgagacgaggttgccccgcgcgcgtgcgcattgcgcgccttctgacccttttcgctctcatccgcagctccagcacccgagcgccgaggtccgcgagtgcgcctgcgcagggctggcccggctggtgcagcagcggccggcactcccgggcctggcgcgacgagacgccgtgcgccgcctcgggccgctgctgctagaccccagcctggccgtcagggagactgcagccggcgcgctgaggtgagccaggaagggtgcggggcggtgcccaccgctggcctcccccgcgtctgggctgcgggcggtcgcagcggtcacccagcgccttctgtgtgccatcaggcactggcccggtctcccgtttgcagagatttgaagccagtctccaggctccggagaagcccagtatccccgcatctcatctgtccacctggctgcttcacctgcagcgtccacctgctcaggcgtcctgccctcacgccttgcgcacgttttacactctccaaaagccctccttagggtcccttgcttggatgaactcttcagttcatgtgtcaggaatcgttctagatgcaggggactttgagcagccaagacttttgagcgagatctgttgacagccaagatccctgtcttggcacaagtcatgttgatggggagacagacaggaagctagtaaaaaggtaaaacataatattaaatagtgagaa

SEQ ID NO: 63318 - DNA, 3482 bp, Homo sapiens
gggacttgttctggacgttggaccaaccttaaagggcccacatagaagctgttcacttactttcttttagtctcttgatttaaaatacttaacattcccctttccttggctttttaaccactgagatttgaaagacatgcaaataacgacctagtggacaatctttgctgatgctaaatcttcattttaggattaaaaggttttgggttttcttaaaatttaatgctgaactcagaagagctttctaaggctgttggtgcaccttagggcaggagagcgtctttgctacgccgcgcaggagtgtgtctgcttctctgtgcatctacacgtgtttgcgtgtccctgtaaagtgggttgagtgtgcggctgcggctttccgcccttggctcacactctcagtcttagtggtctcccccagggctatgcatggggtacaggtttctgtggcctcaggccggggtgaggggtcccccaccccggccagggcgcagcagggcggggcacacgtagccgtgcagggtctcgcgcagcccgcgtcaggaccccggggcacacgctcgggcagggggcgtgtccccacgccaccagaaaaagtgttataggctgtttttttttttttttttttttttaaaaagaaagtgttttagaaagcaggcagaagccaagacgtcaggaagggttgcgagggcccgggatccggcggccacagggatgggaggggcgaggagcgaggggcggagtggcacctcccacaacgcgctccctgcggggcgggcggcaacctccatgcggcctcgtccacgctcagcaccggggaagccgaggcggagaagccgcgcgcgcctcagaagctcccggacgcccaggtacgtgggagcactccacagatggcgcaagtacggttgggccaggcggttgcggccccgtcgcgccgcggcctctgtgacgcacggcgaggcctcccgggctgctgcgcggcgcagcgggggcggggcgagcgcgtgagggcggggcggtggggggggggggcggagcgagaggggcggagccggcagaggccccgccccggggccggaggagcgaggacgctacggagcaggcgcgtctcgctgccgccgctgccgccgccgccgctcgctcttctgtggagccgccgccgccgccgccgccatttgcacggggaccccagtgacaggggctcggcggaggggcggaggggcggagggagggggggagggcccgcggagcccccgagggcgggagcgacgccgccggcgccggccgggctccctgcgcgaccgcgccgcccgcggcgggccccgagcagcagcagcagcagcagcggcagcagcggcagcagcagcagcagccgaggccgggcgtgcgcctgaggcggcggcggcggcggccctgcgggcggccgggaggggcgggggcagcggccgccgccgtttgatggatccgaggatcgcctggtttcagccagagcagctcggaccgtccaacagtctgtggatgcagatctgggagacgacccaggggctgaggaacctctacttcaaccaccactgtcacagcagcggcggcgcgagcggcggcggcggcagcagcagcagcagcagcacggccaccggcgggagcggcagcagcaccggcagccccggcggcgcggcctcggccccggccccggccccggccggcatgtatcgctccggggagcgcctgctgggcagccacgcgctgcccgcggagcagcgggacttcctgcccctagagacgaccaacaacaacaacaaccaccaccagcccggggcctgggcccgccgggcgggctcctcggcgtcctcgcctccctcggcgtcctcgtccccgcacccttcggccgccgtccccgccgccgatccagccgattcggcctcgggcagcagcaacaagaggaagcgcgacaacaaggccagcacgtatggactcaactacagcctgctgcagcccagcggagggcgggccgcggggggcggccgagcagacggcggcggggtcgtgtacagcgggaccccgtggaaacggaggaactacaaccagggagtcgtggggtgagtgctggctctgcggcccgatggcctggccggtgcgaatgcgcagccgggcacacgcccacagaggggggttgtgagggtctaggagcggccacccccacggcctgccttcgctgctgttgcacgggggtgctgctggccatccccaaccccccagtcgttcacacctttccccaagcctccttagccgtccacaccctccgtctcctgtcctcccttagtcgtccacaccttcctcccctccctcttaaccgtccacaccttccccaggcccccccctttatccattcactctcctcccatcccccttagttaaacacatctacccttgaccaccaccccgcctccagccctccacacctttttccccatcatcacaactcaagatgagaccgcttagcacgggcctatcattcattccctgagaacattggtgtgtgagtgttttttgatggtgcaggacccggaggtgctttccttgccaagaatagaaacatccagaatgctcctccccatcccccaatcccagacagcaattatgtcagccctgtaaggcattgcctgctcttgaccctttggcccatctttttatttttaaaaaattcccatgtcacagatgccctgtctatgcagagggtggcgtgggatgggtgaccactaagtttaggctggtgaaggtggtgagcccttctgaggccctgatagaactttccaggagttcatggtccgcggctccagcttctcactgtaaagttgtcatcctggcagaggcagccaatgcttttcattctagggggtagagatttatgctaatgagtgaatattgcaccactagtgactttctgtttaaagttcagctcttagaaaatggaatcttacctgacccctagtgaattatgtacataagcagggaatgtttccaactagatctcccttcagaagagtccctgtgctggaataggtcactgaatcttatttgttttgtaaaacaaagcttttgggtctcgtgggtgtgtgtgtgtgtgtgtgtgtgtgtgtgtgtgtgtgtgtagcttgagtatggagaaccggctttcaaattgcttttcatttttcaggttgtgttttacattgagggctttagcatgcaaatgaaattaccaattagtaatcccatgtgaaccttttcctggatttattcattcagatctgccctgctttggctgagagagagagttctgtgtacctttttgaaggtctggataaaatgagttggtgggttccatctgcttccagtgggctggtgtctgctctatgctactattacaactcctaccttttgtggaaaatgcagtcaagcgttctaggactggtgctgtggtacatgtcaaacctgccctcacattc

SEQ ID NO: 63319 - DNA, 1544 bp, Homo sapiens
aacccgggaggcggagctggcagtgagccgagatggcgccactgcactccagcctgggcgacagagcgagactccatctcaaaaagaaaaaaaaaagagaataatgctgccatcatgcttgagggtttttttttattttgttttgttttgtttgtggggggagcggagggcacagtctcactctgttacgcaggctggagtgtagtaggcttactgcagcctcctccgccccctggttctagtgattcttgtgcctcaggctcctgagtatcatgctgcaatttttgtgtgagcatacatttttcatttctcttgggtcaatatctaggagtatccccacttttggttctgagtgttaattgagcctgttgtgttctcacattccctgtacttagatggaaatagtgctttgcctaaaaagaaaataaaagacctgattgtgcaggcgagtgagaaagagagagaggcgctagggttatttccaccctgatactctttgggtagtcttggtatgactagcaaagaagcaagctccaagttgtagtttgcttccaagtttctggcttctgtgggaatttctgcatctaagtaatgacaattttcagttacttgcagtaagtaaattatcaaccaatcttactgtgtattactagcctagtaggaatttacttgtatatcgagaggaatgctgcagctttcaccttacttctaatggggattaatgcttacttaacttgcagttttggaggcaagtacaaagtacaggaccaattatggtcatgaagtgagagagaagtctggctagtgaatggtgattggcaactccagttgactgttcatggcatcttagatctgtgaggagggaggagggaaggaaagttcaagctggtctttatggtaagttctggaacatttccctgtgtcaatgggtcatctgttcattcactgtgtaaaatggttgagggaagttttaatttacatgcttccttattgtgtaaacctttgatttttagtgatttcagagtttgtttttataattacttaacacgtgaagaggatgcagagtaacgtatcgaagctctggttaccttccactgggatttgacacatttgatttcctttattccctccttccttcccttcctccctctctcttttcttaaggaatgcaactactcagattcacctgcacacccttggcatacctctcactcccccttacccccacttcctcagaggtgacctgtcctcagaggcaaatgtgtgccctttccatccgtacttttatgctctcatctatgtttacatctattagtacactattgtctgtatttttaaacattacataaatggtgtaatttttacttttaattctgtagtggtgtttctcaaattaagttctgcacaaaacatttttatagatatccagtgttagcttaacgtttttcttattgtggtaaaatatacataagataaaatttaccattttagccatttttaagtttacaagtcagtggcattaagtacattcacagtgttgtata

SEQ ID NO: 63320 - DNA, 672 bp, Homo sapiens
caccgcgcctggccaggtcctggagtctttaagaggaggtttgtctgatggttggttggacaaaagcctgggcatgttgtcaccttccataagtgtttgtgggaatgtaggtaatgaggaggagtaaaggattcctgaaggatgaggaggagggctggtggctgccataggaagtgatcactgttttggcagacctgtcttagagtaatgaccgtcatactctctcattgcccttgtgaactcatgaaatcccatggctgctaaagctgaaggtcaagtggggacttcccggccactgggcttagcaccccacagagctgtggagtgggcattaatgtcccttttttatagatgcggagactgagaatgaggactgttggtaacttttgaaagggcactcagctagaaaagtctgagccaggatttcaagtcccatggctttacctctgtggtcctaatatttggtgtgttcaagtgagatctgtttttttcctatttcattttgattattgattttcataaatttttttctcttttgagatagtatcttctctctcttttcttttttctgttctttctttctcttttctttctttttttttttttctctgagacggagtcttgctctgtcgcccaggctggagtgcaatggtgcaatctcagttcactgca

SEQ ID NO: 63321 - DNA, 1229 bp, Homo sapiens
gttagaactactcaagagtagtttgggtaattcagaaattttattggaaggggaaagaatttttgacccaaattagataaagcaactcttgggtaatgatttcttttcttgttctctctttataatcaattgaaagtagtagtaaggctgggtggcaaaagaaagaggcctggggagaatcgcgtggttttcattatctcttttcatagcagcaaagtgggaagggaccaagaggaaatcaactgaaaaaccatccttctgaaacattggcctaaaaaactgtagtccagaaattgagtgcaactggcagtggcatttaaaaggaatgctctaatttctaggaaagcaggcacgagtacctcttaaaagaagaaaaaaatgaaaactgtaatttaggacacatagacgagtatccattccctgtacttttactctcatgtcctaaccaaggaagggttgccatagcaaatatggcattccttagccatgattcactgttgtaaatgcctgcagcattcataaaagtaagatatatgggctcttctttttccttttaaatctttatttctgtatttaaatctgtatgtcatcatctgtattttctctcttgttttttttaaatcttgggagatggtacaaattatttaggggagggaatgagtttcttgtccacaaatagaggagagagagggctttttgtctttctgctttggaactggagagcttcctatttaggcatggcctttttcaagtgaccttgtattgttatcagtactgtagaaggtaggcacgttgtgtaaactttaaaattgaaagccattaggcattccacttgtaaaccttggctttttaaagaaaattacatgttcattgtgaatattttcttatcgacctatctctgtgcacatgcagacttcctttgcctacattctgaaaggtgtaattgccttctttaaggacagcggacatctatagttcttgggtcaaattgtcctccttctggttttgtcagttctcagccacactgtgtgagcatccattttcttggattctggttcggagctcattttaaggaacatcatgtcccttttgagactctgtggacattggggtgggtagatgtccccctgtgaacagaaggtccctccctaaggaggtgcttctctgtgttgagtcctgcatctgggcacacagagcccgaagcaggaagagttgagtctgaataggga

SEQ ID NO: 63322 - DNA, 2364 bp, Homo sapiens
attaccggcgcagggaggccccagctgctcagatcttcccgggtgagccctcaggatgctgcagtgacccggccagggccctccacggggaggccgatgagtagtggagtcgcaccggcccagagagccaaatgccaccatgcttgatgcccgggggctgcacgagcccagaggagctgcctgaccagcgcgggaagccgagagggcttgctgctgctgggatgtaagtctcaggtgggacctctctgtggccatctggagtggaaatcagaggctccaccttccagcctcggccatctgatttctcagcatggtttcaacgtgggtggcctgaggctgggttccaggcccaccgcggggggcaacgccctcccacaccaagatctctcccctctagggtgagccggggtagcaggctccaggattccaccataggttcccagtagatcagcgtttctgctacctgtttgtcatagatttcctccgtgcttgttaaactacagactctctggccctttctatgaagacctgctagggccttgggggtcggacctgagaaatcggcataacaggtgcttctgtaacccctctcagtgaagtgggaacccccaattcctgggtaccagggagctttagaccagtgggaaagggcgggattcatgggggtctgcgagtgagaaatgccctcgtagacttgattactcctgcggacgacctcctctgcccctcccagggtgactcacaggaggctttcttgctcaccctgtctgagtttcttggaaacagagcagattttttttctgccaacactggggccccaccctgggttgcagggatcacaacgaggttacaacacctactttctgaggacacctacaggggtggtcgctgtcatctcccgcccctgagccctgccataggaggttaaggcctgagtgagacgtaaggcgggaccaaagctcccccggcttgggaggagggcactggcccgccgtctgtggatccttccagaaacacgggcgctcctgcagggggaggggaggcctggggcagaaacactggaagagtttgctagaaagtgtttccctctgggggtggggccggcctggcgctccccagcacgtgcgcgcggtacctggagaaggtcctgctgggacgcctttccttcctgcggcgccccgagcttgcccggccgctccctcccgcggcagcgcctttcccacggttctaggggagctggggtggggtggggtggggtggggcggggcggggacagctgcgcttgcagggtggacgcggcctcctgggcgccccccagcccccagccccccgccccggctcccgcccccgcgccccaggcctgggacacgcggccagcggggggcgcctgcggccgctcctccttccccgcccgcggtgagtgccgggccagcccgctgccactggggcggccactcgggcggcggtggagcgggagcgcgcagcaggtgagcgcggggcgcgggggagcgcggcgggcgggccggggatgcgcccggggtcgggggtgcccgtggccgctgcccctctccgcgcggtccccacacaggcgggcgggtggcccctctcccggcccgcccttccccggcctcgcgggtgcccggcggtggcggctcctgcccgggtgggtcggaaatgctccgagacccctccctcgggccacgacctcctcccttaggcacggccaggagacgcttcccagacgctgccccagctggcgcccgctttccgataacaagactgagactcgagggaggccgcccggccccagacccctgtggtggagcccgactggcttagggcacagaagggggctggctcggggcggcggggcctgttggaagcaaacactgcacagggtagcagcctctgtgggcgcaggaccgggctgtgggtctgcagcgctcccgccggagccagcagcgagcaggacccctcggtggccaaaggggaccagggtccaggggagagtgagccaggcccggcccctgcctcggaccccaaccgggaaacccagatgccttgcacatgaggaagtgacaatgggagccgaccccgggtaggggagagaggctggagcctctccatggattggagttgttccctttactggtttatgtctcaggtcccctccctcaaaggccaggaactcctttctgagtcccagagctgaagctggaaatgaccacgtgggcgccgtggacagaagtagagcccttaaaatgaggaacaggataccctgtgtggtcggctgaagccccctcgggcctggtccagagtgatgctccagagattgaatgaatgaatgaatgaatgaatgaatgc

SEQ ID NO: 63323 - DNA, 1664 bp, Homo sapiens
ttgaagcagctcctcaaaatttggacttagctgcttcctcacctgatgtgcgagtacaattgcctaagagtataatccaaaaacgacttgctgaaactcatagatgattcatgtctctattctgtcctgctcctcctcaaacgagccagatcttagaggcgtttgttttccccagatacaaagaaaataaaatgaggttggcacctggaagaggcagtgccgtccgcaaagccaaagcaatgtaaccacttgtaccttaactcttctccgttttctccccttttcttcccctggaatctgcttctctcctttctttctctttttccgctttctgtccttgtgtttgtcatgatcgtttttgtcttcgaagaggctggagtcgtgccccgagctgcccgtggagagttcggtgacttcgttccctcctactttgaggaccagcttcaagggcttctctacatactcttaaaaaaagaaaagaaaagaaaggaaagcgcgtcgattaaaatcggggctctccagggagtgctaaggatgcagagcgccaaggcgcagcaagcccgaggcggctttgggcgctccgcgaagcacctgttgaatgacggaccccggcccgggggtgcggcggcgccgcccgccccgaacgctcccaggcctcccgggcccgcctcacgtctccccaccagagacccaccggaccagggggacccgggttcgaatgccgcggccgcacggggggcagcgcggcctccggcaggacgcgcccccttcgccggcctgggcctgccgtgggaaggaagggccccgggccgccccggagccactgggaaagagcggaagcccggcagagccgccgagggcccgccgcccgcaccccggccccctcctcaccctcgtagaggtgtttgtccgacttgtgcttcttgtgcttcttgcccatgtccgaccgggccccggtgcccgccccccgcgccaggcccaggccgtgcggcgccgcttccggtccgggccaggcgagcggagggcgggagcggggcccgcgagaccccgcgccgcgaggcaggggggcggcgcgcgccgggcggcgcgatgcccctctcgagaagacggcgcgcgagacccggccggagcccgagagcggcggcggggggggcgcgcggccggcgcagaggcgggaaagaaggcccgccgcgcgcacagggtgccggcggctgcgggtggcggcccctggcgaccggaggtggtgctgcagctcgcgggccgggggcggggccgagggcggggccggggcgggatccaccgctcagactctcgtctttcttccttcctccctttcccctcaatttgtctgtcttgtctctgtctctgtgtgtctctccctccgtctccacttccctcccttctttttactccctccctctctttctttctctttcccttcttcccttccttcctccttccttcctttctttcttccctccttactgcctcccttcaagccttccttctctcttttcttcctccctcatcacccttccttctcctcttcccgtctccttccctctttttttcttttctttttttccccttcctccttcccccactcttcctttctttccactttcccttgcttctgtttcttcccttttacgatattgactgaa

SEQ ID NO: 63324 - DNA, 719 bp, Homo sapiens
catacgagtcacaactcagagttgcatgagcagggaacaagggagctggggtattgatactcccatgttgccaatcattggttgcagtgtctggcaagctgtagaaagcattctgacaatgagatgcaagtgttggctgttgggagtcaaagcacactggggatcaggaaaaggagcagaggaggtatggacgaaacatgctacctgtcctcagtggtgctcatttacacaatagacttgaagagtgttttaacaaaggggccagggttagagaaagcatgaaggtgagactcagcagcctgttccatctgggtcagaggtcactcactctgactccaggacttttttcttggagctgccaatttgcaaagtatttcgaaatagtaggctcagcaaacttggaaaggcaggatgctcagctcaaaagctgagagtaattgtttaaaatatggggttgagcaatcagggattctcacctggaagccttttgcaccatggcattttgccagcaggccctgtgctggatcaggctgcacgcactggcccaggctcacagcagtgcaaagaaatgagtggttgttcccacggcccatgttttgagggtttagaggcaggctcagatttcacagttggcaagaggtccctctgctccggtattctacccgtacttcctgattacctgtaagacctcaggcattgacctcggcactggggaaaac

SEQ ID NO: 63325 - DNA, 1750 bp, Homo sapiens
cctgtgaataaggagggctgactgtattgagttaagcgaaatatattattaatatttcatctatttctttttacttctaaaagatgtggcgacaagaaaatttaaaattacaaatgtggcccacattatatttctattgggcagtgctgctctagagagtcggcaaaaagggcagaatggagcctccattatacagatcacaaaactgagcacaggtaattcactccaaaggtcggggctggtctcactctgagctgcgggttttcttttcccacgccagagctgcctggtgccaggacgagcgtaacacggacccacagtgtccccagaagggggcaggcgttctgagagccacaaaggtggggtggaatcccttgatgtcgaccgccaccatccccctccccccgcgcgacctccccgcagagacctccccagacaaaacaaacaaacccttgggtctggcgaactgcagcggggagcggaaaccaaggaagatcaaagactcagcggttacccccttccgggccgcgcagtttggcagcgcgccccgacccgggcgggcacccacgggcccccggacgaggagatcccagagactggctgataacggggcgctttggacatttgtcgctgcctggagagggctgggctcacactggcccggggtgcgctgggggctcctcctggactccccaaataagaaactagaggagtgcggtggtggggggcgggtcacggggcgggtaatgaacactttctgcagaaggtaggtcgtgggaagactgggaaaaggcagcgctgccgaagcttgcacctgagcagctaaggtctccgctcccgacctcagtttccccacctgtaaattggagccgccgagtcccgccctgcccgtttagagagaacgtggagcggagggaagtgacagtacagttagcgatggccgggctgttctgtcccaatacgcctcctggacaagccgccccgccgggtcgccagccctggagctcggcccccggccccagaccgcggcagggagcgcggactgtgtcccgcccctcccgtcagcgccccgccctcgtccccgccctgccccgcctccggccccgcccccgccgcaaccagccttgcctttgatgcgccgcaccggccaatgggcgcgcggggaggcgcgggccgcggcggcgggctgggggctcggcgctcccgggcgtcagtcgggccgcggcgacggcggcaggagcgcgtcccggcgccgcctcgggctccgctcggctcgggggctgcttcgggaggaggagagccaagggaggcgccaggcccgcgggccgggcgcatggcttagggacgctcccggccgccgcagccccagcatggggaaacttcactccaagccgggtcagtgcccccgcccgcgcgctcgccccgggccccgccgccgtcgccgccgcggtcgctaactctctcccttcctttctttccttctcccgccgccgcggctgccgccgccgccgccgcctcgcgatgtgcctgcagccgccgtgtgcaagcgcagggagagcccggaaggtaggggcgcgcggggcgcagacctcggggatggacgcgggggacaccgcggccgcggcagaacggcccagcccgccaggtcttatgaccagggccaccccgaagccccagttccggccaccggccccccaagcccgctccctgagcagccttcgcgccccctcctctgtccctcctacccgct

SEQ ID NO: 63326 - DNA, 993 bp, Homo sapiens
ctaccataaccatttgtttcccagtgagctggactgagaagctacagcaagacttcagagggttttgagttgattgaagcacggagccagtgaaggctgtggagccaggaaggggccctgtgaaaataaaatgagcgtgcgccacctgggctggggtgcgagccagggagctggtgtggcaatgcgttctccaggtaattgacctcaggctatatgcctggctgaaccaagaaataggtggggtggctgcccggggataggcaggaaagctgtgtgggcgggggccaagcaacccaaggggaccctgtctgcttgtgtgtggaacaacctgggctgtgtgtgggatgtgatggccttggtctcagattggagaagcccattgcacctgccccatttgcattctgggcagtgacttggctgccgctgaggacagagctggctaaggccacagggagacgccaggcctgtgttttgagcaggggccagggctggatgctggaataggcagccggctcaggtccagtccacattggccttggatcaatgaaagctgtcccaaggccagcgcgttgctgctgccgccgcctgggggctgctggactgggcggggccttctaaggccactgtccccaagtcactggctctgagaacattgccagcatgtcctgggcccactgggggtgggtcctagccctgccccatgccctccccactccatgattcatagtttcacttgtccctgcctggcatcgcagccaggatggttttatcgatgcacagagaaaatacagagcctgcagagaggaggaagagagggttagcggtgtccttttttgtctgctattttatgtgtcgttttccaggcaccatgccagctctgtaagggccttcagtaatgagggagaaatgtacggaccctgtcctcaacgagtttagccggctggggagcctgcaagccacaagtagttgtctcacagagcgccaaaggctgca

SEQ ID NO: 63327 - DNA, 1043 bp, Homo sapiens
cccctcctcaagacacctttctgccatctgtccaaaggatgtcataagcaatacacatatctagggtattggtcatatgagtggcaccacctggggttgtacagtgcacagcctgcttcttggatccggtctcctagtgacctcaagtgaccccagaccaaggggaagagccccgaggagctcaccctgttgtactgttgaggaggacaggtctgttttatttcacaggccttcttctcttgctgtttgggtggcgccagctgtcagcagcttgggctgggtgggctgtgccatcctgctccctgggtcactgccatttgccagggtaaacagtcccgagtgactgtggctctcacagcatgcggtccccaaggagcctcccattgggcccatggggaggcgggaggggtgtctagacccacagtcaaagttgtcaccattcaggtatttcctcactcttcttctttcgctctctcttcctccccacccctcccttttttaaactgggggaggggagagggaagagactgtctttgatctcagcggaggaaaaaagtctgttcaggcttttggctaacacaacaaacagtgtttaaaatttaactttgcttaattaattagtaattctgtttaatgctgtctgatctccctccaaaaggtattttgaagcttgagaagggaacatcaaagggagccgggtgaagatggtcaagtaatgcctttaatctggcagttgctgagggtggagagctgccaggctgggagctaatggggagagaaccgtcatttggtaaacacagcaagctgactcctcgtggctgtggtgtgaggagggacagggagcagtttccaaagagagggaactccacaaaccattaccaaccccccagattcatatgggctgacaataggccttaagaaagcagagttgacattttctttcttccacagccactgtatggttgggcaggttgtgtactgcacaaggatttccagccaagcaggcaagtaataggtgaaactgtctgtgccctgctcatcaa

SEQ ID NO: 63328 - DNA, 978 bp, Homo sapiens
tctcttttcttttcctcccagcctccttccattttcctttcttatacttatttatccaacccacattactcacagtctctatagccttgtgtgtctactggtgaattaaaaggtcactagtggtgtcctctgggagtcctcttctcactcccccagttcagtaggcagatgggtggggagtcccccacgccatctgggtcctgaaaaggtgggagatgggatctgggaggagcaggttattcaatctctccccctggaaagcgacgtggcgcgggccttactggggaagggcctctccccccagaccgagagaggcgcagttaggcccgttctcggaagccatggccgatcctgctcctgggggcgctgatactggctatttgcagcgccctctcttgtgaaaccctgcggattccgcttgcgggaagtggagggcggtggcctccgccttttggggcttctgggctgagggaagaggatggaggggcagaaagggagtgaggtcccaaaccccaagtggaggtcgcccggggaccccccatcaaaacacttgctggggagaggttatagaggcagcaaagctctttccagcatgatttcaaatcccgtctaagggctttcagaagcctggagaaagtttcggtttcccagctgtttcagctttttccgcccgcaccgcggcgatgcgttcggagccgccgaggcggcagcgccatctgctgtctactttttaaattgcaggatcagatcctctcggtctctccagacctgccccgtggaaagggaataagattaaaccagtaaaaatagcttagatcacctgaggtcaggaattcgagaccagcctggccaacatggcgaaaccccgtctctactaaaaaaagtacaaaaattagccgggcgtggtggcgggcgcctgtaatcccagctactcaggaggctgagacaggagaatcgcttgaacccaggaggcggagt

SEQ ID NO: 63329 - DNA, 3134 bp, Homo sapiens
ttgaaaataaaactttgggcatcatcaccatataactggtatttaaagccacaagagcaggtgggctcatctagggatggagtgatatggagaagagaaggggtctaaccattgagtgctggggcccccagtgttaggaaccagccaagaagacagaaagagtgaaaatcagagagttggggtgtcctggaggaaatgaagaaaatgccccaaagaggaaggagggaacaaatatgaccaatgcccctggcagagcaagcaggctgagggctgaggattgagcaatgggaggtcactggtgacagtttcactggagctggatggggaactagagggaatgggaggggatgggaggacttggggacagcagtacaggcaacagacaagggggcctgctgtaaagggagcagataaatgggattggagccaaatgaagaaggggagtgtcaagagagtgctttacttttacaatggagaattagagtgcattgtgcactggtggggggatttgatctcttagggagagaacagtgttagggagggagaatgcaggatagctgggggagggtggggggcttggccccagcagagactcaggacacttgggaagttgagcttccctgggcttcccctcctctcctgtctgcaaggggtcagtgggctgagatttcagcacttaagcaaagcatttgctcttggccccagagaaaccgggctggctgtggtctcaggaaggaaggaggtgtccaggctcaggcctgggcctgggtttcagggagggcccacgtgggtcgccccttgaccctctctttcagcaaggaagtgatcctttctctacatgggcctcaccttggggaggacaatggtgtctttgaagttgtagtaactgaagtagagatcaaaaggcaatgcagatagactgacagatttcgcctgaagaggggaagcccgaccaggtaataaaggagtaagaggaaggatgttaaggacaattttaggaaacagataatgagtgaatattttttctctctctttcccaatttaaactgaagcaggagaaactgaagctagacataatgattaacttcccaagctggtgagcttcctgagctggttagtgagaacagcactaaggccaggttctcctccccagatgtttaagatgagacaggacaatgcctgctcagagacagggcctggctgaattggccctcaggattctctctgctctgaggtttctggaagaaggccagggcagaggtgtggtgatgtagctgctgggaggacagagctccgagtcacgtggcttgggcgggcctccccttcctggtgtccacagaagcccaacgtcactagctggggtgtgtatggctcacacgtaggccaggctgccctaggcttggtgtgcaagggaggggcccctacttacttgtggcctgtcccctcgtgaatgtgtctcatgtccccagtggggtttttcagtgagggtcatggtctccaggatgcacaaggctttgtgccagaattgcttggaattgcctagttctggaaggctggttggccaactctggcctccggcttttcctttgggaatttcccttgaaggtggggttggtagacagatccaggctcaccagtcctgtgccactgggcttttggcgttctgcacaaggcctacccgcagatgccatgcctgctcccccagcctaatgggctttgatgggggaagagggtggttcagcctctcacgatgaggaggaaagagcaagtgtcctcctcggacattctccgggtaagaggagcaggcattgtcccgtcccagcttgatcctcagccttctttcatccttggccgcgacatgctcccaggcctggggtcagatggggagtgctgactctgtttctgggctgttttctggggagaatgggtcggcgggtttttttccccaggacctgggcagggtcaatggtgggggccgctgtcgcatccttggctggtgtttccacagctgagaaccactccagggccaagcccagagcttattctacccttttttgtcctctcttcccctgtcctcggccaccccaccctcttggctcctctgcttagatgtgggcacaaggaggagaactccttggcctgagagaactaccttagatcctggcttccagtggcctctgcaggggggtacaccctctctcccaagcagccagacacacaagtaacctcattgcctcagtttccccatctgaccagcacagggccccctgtgccccagcagcgttctgagagattggagctttctccttttgcttaccttggctaccgtatgaggacggatacagagtgttccccccacccccagcccaggggatatttgattcatgaacattccctcagtgtctttgtgggggacaatgctgtgccaggctcagggatgccaggacgagtaagacccaggctcccacgtggcccaggcagggagagagacacataaacaaccatcaggaaagaggtaaaatccccaggccacttggcatctgctcccttgagtgtctgggaatgtccctgatttataaaaagaagctgacggccctctttgttgtccatgcctacaccctttcactttcgtttcttcggggcactgcagcagcccttgtccacagaccccatgacaatcgcagaactgaccatgctgagagattttcttggctgctcagggaccctgccagggcttgaagctcctggagggtcacttgccctcaaattcccagaacgcacagcaggtcactgatgatagcagtggcagcagtctgtgcacggtggtttcgagggcgtgggagggaggtgagggccctagggcaagtgtgtgtgggaagtgttgatgggggacaaggcaccagaacgctcggaaacaacttagtttgcaccgtaatttttcacttcgcctaggacaggacctttagagcaatattctgagtctaccccttggagtagcagtgtgcaaaacacacagcacgggcttggggcccccgtggggaacccaaatgtaagagttagagacatgcattccggagtcatacatggctcgtgttgaaatcctgactctgcctgtctagctgtgacacatcgta

SEQ ID NO: 63330 - DNA, 2039 bp, Homo sapiens
gaagatctctctctctctctctgtcttttttttttttttttgagaaacggtcttgctctcttgcccaggctggagcgcaatggtgccatcttggctcactgcaacctctgcctcccgggttcaagtgattctcctgtctcagcctcctgagtagctgggattacaggcgctcgccaccacgcctggctaatttttgtatttttagtagagacagcgtttcaccgtgttggccgggctggtctagcgctcctgatctcaagtgaccttgggagatctcttgctcctaatattacctcaagcctttttaaacgttttaagccggagaccaagcatggatatgggagttaggggtcttgatttaattcttggttgcttcaaactctgtggaaccttgaggtgtttcttgccttctctgggtctcaattttcacatctatatggtggggagcttggattgggtaatgtctgaggctagaaccatggccaactcgggttctgctggggctgacttgccctggccttccctgaccaccctgcatctggcttctggagaagtcccgcactgaccttgttctcctccccaggttgtgaaatgtgctcgcaggaggcttttcaggcacagaggagccagctggtcgagctgctggtctcagggtccctggaaggcttcgagagtgtcctggactggctgctgtcctgggaggtcctctcctgggaggactacgagggcttccacctcctgggccagcctctctcccacttggccaggcgccttctggacaccgtctggaataagggtacttgggcctgtcagaagctcatcgcggctgcccaagaagcccaggccgacagccagtcccccaagctgcatggctgctgggacccccactcgctccacccagcccgagacctgcagagtcaccggccagccattgtcaggaggctccacagccatgtggagaacatgctggacctggcatgggagcggggtttcgtcagccagtatgaatgtgatgaaatcaggttgccgatcttcacaccgtcccagagggtgaggcactcctggtgtgcatcacagagttctcaggaaaggggtgcttagtcaccaagactgatttgtcctcatgaagtcagcctgtggggtaacttggtccatgggatttcccctaaaaaggtagccaggcaggtaaaatttgctcttgactcttggcaggaaacgtacaactctttctttcttcttttcttttctttttctcactctgttaccctggctagaatgcagtggcacaatcatagctcactgtagccttgaattcctgcgctcaagtgatcttctggccttagagtagctgggactacggctgctgtaccaccatgaacagctaattttttttttttcttttagagatggggtgttgctatgttgcccaggctggtctccagctcctggctttaagcaatcctcccgccttggcctcccaaactgttgggattgcaggcatgagccactttgcctggccaacagaacacttctgccgagaggaagtgtgtggtggccaggaactcagattctggagccagaatggtgcaggctcaaggtcaaccctgtgtgatctcaggcttccctatggagcctctccagcctcagtctcccttgtttcagtttcctcatctacaaaacaatgttaatagtcaaatggtgcctatcctataaggctcttgggaggattcagtgagttaatttgagtaatgcttaggatagtgtctattaccactggctgctatttattatttctgttatgagtgatactctgtacttgtacacttttatttctgtctgttttaaattaacagcacaacagaccataacactgcagtatattgaatttattttataattaacatagcatattataaactaatatagcttaaatgtttatgtaggatttctgacatgaaattgcattagatcatagatgttcagagttggtatataacagcccctgagaatgtagtaactcagcagagaccagaaggtca

SEQ ID NO: 63331 - DNA, 5929 bp, Homo sapiens
gagaccagcctggtcaatatggtgaaaccttgtctctactaaaaatacaaaaattagctgggtgtggtggcaggcacctgtaatcccagctacttgggaggctgaggcaggagaattgcttgaacctgggaggcggaggttgcagtgagctgagatcgcaccattgcactccagcctaggcaacagagcaagactctgtctcaaaacaaagaaacaaacaaacaaacaccccagcaacaacaacaacaaaaacaaaaagaagggacatgaaaatattctagtccagagtggcaaactcagatgccttaagggaccagtggatgtagatcgtgcagataagagaagtggtcccagtggtaacatgagaatgtttgccttgcctaaaaggaccccaaatctctctccttcacattcttttctccttcctccttatcgtatgggttaggcaaaaacaaatttcagctgaaattttcttccagacagttggactgtgacctctgagtcctaccagctttgttggagaatccagatgtagatgagaacggtgttgcctaaggccacacttcaagccaggcccgttgatttccaacttatggcttcctacagcagtgtggtcatgaagcctggaaaacaggaagataggagtgacaaaagagggacaggagtagaatgaggcttaggttttcaaaagatgctcatttcattttggatgactatggcaaggaagagtggtggcctgtctactgctactgttagtcatcactcatgtgactgtttttatgtattcattggtttaaattccctggatctccagaaacatgtcactttccactgggggaaatttgtgtcatgattaaaaacacacacacacacacacacacacacacacacacccctcctcctttctcagtgttaatcaccttctcctataattagcacttaaaatgtcaaaggagaagaaattaattaacaggagtatccagtgcagcaaggctctaggactgattataaaaagcacttccttaaatattttgagtgcttttgggaatcagaagcctcccttctaattgaaagatccttaactacaccctaagtcctggctggtggccaggggtgcggggctgagtgaggcggcgtgtggaaatcccttcttcaccatccttgggaaaattccctccaaactgggataggtggcaacagaggttcggaaacagcaagcgtcccaggctgaatctgcggaggaggaagagatgaacctttcctgagctggtactgcgtgccaggaactttagctcggtattttgccacaatcctgtaagacaaccgatactatgatctccattttacagatgaggacattgaggctcagcgtggttgtgacttcctcaggtcacgcagccactgaatgaaagcgccaaagattcaaactgaggtctgattctaaagctttgctctctcacggcatcctggaatcctatttcaaccttcatctggactcttaacccagcccaaacctaagcgtctacagttttgacagctgaggcgggagcacgggaggcggagctggtggcagcgcagcgccccgccccggctccagcatcagccaatggtgacgcggcacccacagcctttcgcccaatcagcttgagcttcccgcctccatccgccgctcttctctgccccgccccttcgctttccctttggttccaccgagcttgacagagcggaaagtcccttcggccggcgccgggctggcagccattggaggaaggtctgtcacagggaggcccaatcacggcccgctcaggagcgcagctcggcctacgattggctagcgcggcggctgccccctccgcccccgctccctccctcttccctgtgcggttcggaggcggggcaggtgggggcgggcccaggtagcaggtttggctgcgcgggggccgcgcgtcggaggtaaatactagggcggtgggtgtggggagccggggccggcccgggacgcgggctggggagccggggcgaggggcgacgccccgccgcccgaggttagtgaatgagcgggcggctggcggccggcgggcggccggatcccctcggcgcagccgcctggcctcagggcgtccggagccgccgcggcgaccatcgggccctcggcgccggcccgttagttgcccgggcccgagccggccgggcccgcgggttgccgagcccgctgacgtcagcccgggtttcccccccccaccggggcttccccatcccccgaggcttcccgggagggctgcgagtccggggagcgtgcggggtcgccaccatcgggacccccagaggagagaggacttggggcgggagccgcgcgggacgctgtccccctcccgccccccaccccatttacagattgggagactgaggcacaggccgctggcgggccccgacggccacggttggcctcaggagcccggggctgtgattcctaccgaccgcgccgcggggcgtacgtaccgatcgattttgcgggtgttggtggctcccgtccaggaatggcagtcggggttctggccttgttaatggcgtgttctgctttttctttcagtttccccctttctagggtgaggatggttctacacagccacccggagttccttagttgaaaggtgcgccctgctgtgacaggtattctttctttatgtttttctttcatgttaacaatcgaggggggtggggggcgaatggggggcgggggcgaagtcatgaaatcttcaggagatggtgttgagtttggtactcagctgggtcagctgccggttattcatgtacttggcatcgtttctcttccaccccttggcatttgaatgttttaggatagttgtcatcttccagccaccaagcctgtggccttgcagtctcccagcccccatcatccctgccaccttcttctcctcaatttttcctggaaagttttatccttagctcagctaaggagcatgcctaccttgcttttgaattcgggctaattagggatcttaataagattgttcattttgcaatcattggctctcagagaagcacccaggccttgagagggtgttcgtttgattgttggctttctacacaccccctcacgccccaagtagactgaatggccttaagaatttagcctcccattccccactgagcagtaggtggatttgaactagaacagtattaggagaaaatgatttgctggaaattcttattgaagtaacacccagaacattctctaatattctgctgcaaaattgtatagtattcttgcaaataaaccttcctctgggtggtaacttttgtgagaagcagataaggcttgttatataaagcacaactaacattaagcagcaatgatttttatagtctggcacacctaaactgtggttttgtttgatttaaggaagtctccaacacagggagagagaaaggaatagttatgttgtttatcaaactattagtattttgttcctgattttcacactatgatttaaattagtttttttttcattggttgtacagaatttataagcatcatacatgctagttgaggctgtaggaagctagtatcaaataaacctcaaaacaacttggtttcgtaattgtgaaattttccgtatttgtttcttcttatatgtataacaatgaagtggtttagcatgatttcattttatctagagaattactgaagttttaggcaaaattcattaaatactcccaattcctgagtctttttctcttctctttctcttggtttaatcccttaaacaggaggaggaaatgcaattttgttttcactgttaccacttgagtctttcattcatttctctgtattcagtgcctagcatatgccaggctctcgtgtgggcactggataatataaaaatgaaggacttggggaattcacagtttggcagtggagtggctaggtttaacactagagaggcagcagtattccttgttccagtgggaatatgcagatgtgagaggctcttcttttcttttttttttttaaccttataaatcccacttgtattagggactgtgtacttgtgacacaaattagtcattgaggaaaattaaaacggactcagtcttttttctggccacggaatctctgtatctctattctttagctgtttagaaatataacaactttgtcttttagtgagagatgttctcttttaaaaggatgatcattctagctatccagaagcttttggaaaaaggcccacatgtcttctttctttggtgttcaagctgaccttcctacctctttgccatttataattaggggcagaattaagtattgtaagttttattctaatttaaatagcttcctgtggtttttagaacaagcaggatatctttggagatgcaaaaagctcttgaattggatctgtctttgtgagatccttatgaacaatataacctgataacttgagaatcagaaaaacactgcatcttctggataagttaaccattgttagttttctgtagctactgatgttcatttgtactatatgttgcctttcagaatgtggtaattgtaatctttaacattttcatgtaaaacatatttcctgatcatctttccattgtcttcatggaaaattgataaatatttgtgccttccaactctcgtcttggttgaatgacttcatcttaatacaagtaagttcccctttactcagaatccagaccatcaacaagctcagataaccagaaatgttttcaaatctatgtgaacctgaactgttctccttcatcagcgtccttaaaggaaaggccttctgttcaacatggctttagggttaaacatattattgtgtttcaactcgttggtaattttcattcagtatttattaccaagatattcataatcacacagttatccagcctgaagtaagatagtatttagatgagtcatttgtgatatactcactcaaagtgattcaacctgcaaaataataagagaatacaagtgaaaatttctcccttcacactgacccctcacccccacctgccctacggtgactttgaatttagctgtgcttctttttccttcagttgtcttactgttccctaggcctttacttaaaggcagaagctgagtgaatgtggattgatgttgggtttttttttgtgtgtgttctctctttcctctttgtttttttttttttttttttttttgagaccaggtcttgctctgtcacccaggctggagtacagtggtgtgatcatagctctcttcagcctggacctcctgggctctagcgatcttcccatcctccagagtagctgggaccctgagtagctgggcccacaggcagacaccaccacacccggctaattttcttttctttttttttcttccttttgggacaggctctcattctgtcacccaggcaggagtgcggtagtgctatcacagctcactaaagccttgaactccagggcttaggggatcctcccacttcagcctccaaagtgctgggattacaggagtgagccactgtgcctagcctagatgatgtagttttcagtatctaactctgtactgaaagcgtaaaaaataccaaactaacaaaccaaccttcttgatgataaataactcatttacaatgtgatttagatctttcccttcatattgtgttgagtcagtttttactgcttggggtacctaagactttaactatttaactactatgcacatcccagtgaaagtagactgttggtgttatattcacttctacagtggggagaaatgtatgttagcatatttttattgcaatactggtattttgagtacataaaataaatatatatatataatggagtgtgtatatatgtgagagagtgtgtgacagggtcttgctttttcacccaggctgaagtgcggtggcgt

SEQ ID NO: 63332 - DNA, 1014 bp, Homo sapiens
ctcagaattagattactgtccccatttcttttgagaaagcacaagacgtctcagtctctagttccccaaataatgcttcctctcagaagtggagacatcgtaggactcccctgctagggctttgatgaactttgaatgaaaccatgcacggaaagtgcttatcacagtgcctggcactccgtagcccctgagtaaacagcagccaccagtggcagcagcagcagcattagtactaatatcgtaaacatgaacttgagagacagggtgcaagtctaatcagcagttctctttctgcctctcatctccctccacgatcctattttaagccacactctttatcctttagatggttttatgagattgagatttttctcaggcatcttgtccctgagtgcagcagcgccatcttgtggtcattactggttatggcgctgtcctagatctaagctcccaaactccgagccgcagccagaacccaggcttgggaggcagcagggattttgaaagccaatgtggcagtcgggccaacacaccagattacacactacaccctaagagggtttaagtttcctctgcgtcatttcgggacagctgcttagtgttgaccatttctgtttgtggctgtcctctctcataatgggctctgtcttgccctttctctgcatctgctgctccctctgtcttgagctttcaggcaccgtctacaaacggggtttaaaatgagctagcgccatctactgggcgaatgccgtaaggtcggttgtgaggtcccggaatctgcaaaggaatgaatgaattacaaatctgtggctttatggggggaatgtcggtacgtaataggattctgatgtcacctccctttatttgcgaccctttctcagtgtaagcctcatatctactgtgttaactttagtacaggttactttgtcaggatcccaatgtgaaaatcaaccacactgtcttcagtgcttcccagagaggggtctttggaccaacctgcgtcgtagtcatcca

SEQ ID NO: 63333 - DNA, 1218 bp, Homo sapiens
cctctcggtgtccgccatccccacttgtcctccactcaatagccaggctgatcctttagaaacaggagtcaggccaggtcactcttccgctcaaaactcttccctggcttcctctttctctttggagtaaaaaccaaattccttgccatggccggcgaggcccctgtggtctggctcggccttcctcaccgacctcgcctccccctccatccctctctcttcctcccctgcgtccacagcagcctccttgcagttcccctaacactccagccaagctgctgcctcagagcctttgcttccactctcctctttctccggaacctgcctctgcctcccagtcactggacatgactcagtctctcacttctactcaacagtcaccttctcagtgatacttcccctaacctctgcggttatgatttcatcccctaccctgcaccccacagtgcgtgcatctcctctgccctgctcactgtccaacagatgacatattgatttatcttgtttattgtttgtctctccctctggaatttgagctctgtgagggcagggacttgtattttcactgctatgtccccagcactgagcacagtccctggagtgtcacagacacgcagtaaatctgtgttgaatgaataaatgaatgaatgaaggtgggcccagtagtgactgtgtggtggcttccactgcctgggtgtgatggccagggtcaggccaggtgaggagacccagcagacaggaccagcttcatgtgagtgtgacccatgcaggccccatgcttagtttaatgtccttaattaaatgtaactgtcttgaacttttttagagactgtatttttagagcagttttaggtttcaacaaaacagagcagaaggtacagagatttcccgtatacaccccaccctacacatgcactgcctcccccattagcatccccatcagaggggtccatttgtgtcagtgaacctacattggttcatcattatcaccggactccatagtttacatgaggttcactctgggtgttatacattctatgagtttggacaaatatataatgacatgcattcatcattataacatacagaagagtttcactgccctaaaaatactgtgctctgcatattcacccctccctaccccaactcctgacaatcactgacctctttactctctccacagttttgccgtttccagtatgtcgtagagttgaaatc

SEQ ID NO: 63334 - DNA, 1209 bp, Homo sapiens
tgactccatcctcaccagtatttggtgctatcactgttctggattttggccattccaacaggcacatagtggtatctcatagttttaatttgcatttccctgatgacataagatgcggagcatcttttcataggctagttgccatctgtgtatcttctttgacgaggtgtctttcagagtctttggctaattttttaattgaattgttcatttcttatttttgagttttaagagtcctttgcatatttgggatactagtcttttatcagacgtgtctttttcaaacattttctccaagtcagtggcttgccttcttattctcttgacagttgtcttgaaatttttaacaattttagaataaaggactttgcattttcattttgcactgggcctcacaaattattagccagtctagcatgcaaggttactagaggttagttcattctgtggctgtgctaagcattgggtctgggaagaaactttgcaaggaatttctagctagtgctgccactagtgatagtagtctccctcttagaggtgtttggggggacagaagagcccattgccaacaatctcagaatgtgtgccatctgctacctgccatgtggtgaaagtgaagttgctttatttctcatgtgcatgcacctcccaaaagcctaggtgggcagactcatggacacacacatttttttttggtttattttgcaaaatttaattgcaaaattagctgcagttttctaccctgctctccctccagggcagtgtgactttgcaacttttcccatcaagaagtggaatctgtttatttttccaccacttgaactgagttgttttggccaacagaatacattagaagtgatatgtgcccgttcccagctctctcctttgtgaactttgtcttcatcttgagaacaagcctgggctagcttgctagaggatcagagaccctgtggagcagagaagagtcagcaaaggcgtcctagccagagtgagatcagtaaagccatcagcactactgcagctgaccacagatgcctcatggagtcctattgtgcctggcttagattaaagaactgcccgtttgacctgtagtcttgtgtacaataataaatagttgttagataagccaccgaattggggccagtttgctataaatcattattgtggcaatagataattgatgtgcggctcctacttcgctaaccactt

SEQ ID NO: 63335 - DNA, 755 bp, Homo sapiens
aagatgctgatattcatgttgggctaattataaccattagtactagggactaccgcccccgacctaggacagctctggagctgccctttttctccccgcccccatccacgcccctccccaatccatgctctgcgctgctgtgctgggaccttgccttccagttaataggggtattgtccccgccctgcgggaacaaggcgagctcagctggccttagtcacaggtcaattgcttcatacaaatccgcagggatccgcggatgctgtgacaaggggcgggcgagggagggctccgcgtcaggggcagacagctccaggtgctggaggctgccgcgcggagaggtccgcccagccaggatgtgcgttgtcctgagaatcgaattacccggaaccccagagctcaccctctctgaaggagagcaggtgcctcctgagagcagggcttctctaccttggggcactatgaacattctgagtggggtaagtgtttactgtgggaggccctattcatggcaggaggtttagcaatctccctggcctctagccactagatgacaatagcacccctgccacacccactgtgtaacaaccaaaaatgtctccagacattgccaaatgccccctgggtcggggacgagagggcaaaagcagccccagttgggagccactgctttagagaatggagcttggagctgatttctgggacaaatcccatgggatagccaggacgtgcacctgggtaaggctggaggaggg

SEQ ID NO: 63336 - DNA, 2589 bp, Homo sapiens
ccagcaaccagtttggagacccttccagaggaacgggatcagcatgagaacacggcctcatcctctcccagtcccatgacttcacctgcacttttcaaccaaccggcccactacaaaatccttaaaaccccaactccaaactcctccagagatggatctgaggtttcctctcatctcactcggtgaccctatgactaaatctctttctctgctgcaacccggtgtttcagtatattgatttgctgtgtacatcacgcaacaaagctgttccggttacagttctactgcagcttgctagtccccagacatttgtaactagtaggcaagaaagcctctcaaaacctgtccagttctgacatccggggatttccaagtgatgcccacaccaagtccacatgagctcctccccctcccccactccccacctgccaggctggcctctttgttctactgagatgataccagatagacttgccctggcagctcccattgcctcatccccctccagaaagcaccaggtaatttgtgtcagattttattctcatctctttatctttcccttccatctctgggtttttttgggggcaaactcctgaatctcacctttagatcacagtagtcccatgctgtgcaaattacatggggacttgctcacaccagttggggcccaccaccttctcaaggagctgcacactttaatcaaggtgcaaggtacagctcagccatttccgtagctggagagagacaatgggtccagcgactggcgggctgcaaatgccaggaaagggagaaggcactctggcaccacaacaagcacaaatggcagtatttgccaagcccagagtcttcccctttggacagacaagcagccctgggagggatcatagctcaatcatgtagcgacagctaccctttcagagtgcagaagcttctgccacactgttttgatggtggtgtggggagtgggaagaaccctgcagggagcataggctgtactcggagcctcagtttgcaatcacaccccatgatctgcccacatcatggacacatatgaaagcaaaagagaaaaagatggaaatgtgatcaaaccgtccacatggtgctcatgctaacttatctcacctccccagtcaagttgtacccccactgaccacagcccagtagtgcgaacagatggctatttgcacagttacttgggcacttgttatttctatcccagtgaagtgcacttcccaaggacaggtggtcctcacgttgttcatctatgttctccctgaatatatcaggcagtgaggaaaaagtgactgaggacaaggctgaaagtcaatggtcctgccggctgactttcttccggggtgactgactatggttccaaagtcccgcatctcactctcagcacccatgaagcggacaccctgtattcaaggaaaattgactttggattgagttcatacaaaaccagagagtggggagcaatgtttctcagaactcaagtgaaaaaaacataatgtagttaatattaaataaggagattgggcaaccctgtccccccgtttctttttcatggtttgtgctgatgtgtccttgatcagggcctgtttttcttatgattaatgaatgactcaccttgagctgctttctgcgtattccatactcattatgaatttgaagcagtcatgtcaaacttggcacccaaaagaaatgctcaggaatttagggaaaaaatgttgatagctcagaagcctttcaggggtaaaaggatgttgggagagcactttcccagcctgcaagttcccaactatgatctctaagtttgcaattatcccaaagccatgaacttattggatgtgtatcatatgccaggtactgttctgtcctcacagaaggcttgaaataaataaatgcagtcaccatcaacatgcacacacaaacaagtcacattttagcttgagcccttgttctgcctgaaactctactttctgagtgagcttggcaagtttcttcccttctgtggcctcagtttttcctcctgtataatggggctttctctaaggttcttccagctcttctatgcccagatttcctgagctgaaagaataaacagaagatgttctaggtgtgggcagagctgggctggctctcctgctgctgctgatcccttaccactaggccctgaggggaccccatgagtttccatcaggacagtcagggaattggattagatggacatgagatggaatctggcccaccaggtgctttgtattttgttcagcattaaaggtaatgatgaccgaatgcatccagtctccaagtgggtccataggccaaccactcactggaggccaaacactactttgtccagtcacccatactgcttacctgtctggtcctgagtgtgtgatcccggattagccatctctttgagtcctcacttctctatcattttgtggttctaagaaagggtagagagaggtgtcagatctggcattgccctccctgccagaatgaaggtctggattcctagtggagtatctgcagggcacctctccagctgtcaggtcctcctgtctgtggtctccactcaccaaa

SEQ ID NO: 63337 - DNA, 1194 bp, Homo sapiens
tccatccagaccgggctgtaacacaaaagcatattgatgctgcaaacctcggtttatgaaacaagaaagaaatgcacagagaacagagaatttctgcagtcacacatggataatttccaggaaagagagattagcagtgaacgtcactgtgtgtgtatgtgtgtaattttatattttatatatatatatatatatatatatatgtatgtatgtatatagttgtctgtatacagaagagcactctgacagggctccttctcatcttagagttctattcatcatttatgggaagaactaaatccaagcagaaaataaatagaaagaagcagtgattttaaacccgatcttctctttgattacattaaaattttaaacttctgtatggccaaaaataaagagagagagaaagaaagtcctaaacaaagtcagaaggcaagcagcaatgtgggaaacagcatcacataatagacaaagggctaatttttattatttacaaagagctcttacaaatcaataaggaaaagacaaacagcccaatagataaatgagcaaagtacaggaacaggcagatagcagagaaaagcaacgcatttggccagtgacataggaaaataaatccaatcttattcacaatgaaagtaatgaaaattaaaacattgtatttttaaagcaaatgggcaaagttttaaaatttggtctaatttggaacccccagaagcagactctgagatgttttagtagaagtggttgatttgggaggaatcccaggaaatccaggagcagaatggggagggagagagggaagggaagggaagggaagaaattaatcaagttacctttgtcactagagcttaattccacaagggactggggaggggaagggaacagtcagagttacgggttctgagggagagagagctgaggtacttacacaccagctcccgtcacacactcgtcaaaggctgctgagggaggctgctgattaactccccagccttttggcctgcagtgagccctggacagccagcaaaacttaagacaaagacctgcaggtgctgacagtgggaagttggacattggacagcatgccctgaaatgataaagttaaaagggtataggatcagaacatcaatggagtcttctatcaaagtttgcccagaagaaaagaagccattgtatgaaaaagatacttgc

SEQ ID NO: 63338 - DNA, 2497 bp, Homo sapiens
attctttatatagacatatttttaattcactaaaatatttttaatcatgcacaatggaaggcaccagctgcatttgctgcctgcatttaatatatcctaggatgttccccttactttacttggcccagcccacaggaaaaataaggaggccaggcctgcctgcgttctgctgcatcacctgatttgatttggggtccgtgtcccaacattcacggttccctgaggactgccagcccactgcacgtacacatgctgttgaagtcctccccgccctggagagagtgctgagtgatagtctttctcccacatatgaagtttgtttttcggccaggcgcgatggctcacgcctataatcccaaccctttgggaggttgaggagggagcattgcttgagcccaggagattgagaccagcccaggtaacacagcaaaactccatcgtgaaaaagtaaaaatagaacataagtttattttttaatgaaaacagaacgaaactggattatttattttcagaaacaatctgtgagcaaaaatcttccacctgtttctgttgaggaaaacccccttcttgctcggaggcatcagcctccgaggggccccgctgctggggccatctttccttttactttcccagatcatctacatctggataaagacacaaacctgggggatttgtagaccaactctgaaaaccagtgaggcaggggccttttcaaaacgagcgacggccttagcttcaccaccaccatactgggcaggcaagtggctttttctcaaagaagcagcaagaccaggcactcaggtttcctgcagccctgggctgaagtttctatcagattccagcctcagaggctaacgggagatgtttttaaagttaaatccactcacaaaggcctgggggaggggtccgtggcagctctccgatgccatcaccaataactgaaatacaaaataacaaaaacaaacccaaaatgcaaaccaaaaaaactcaattgatttaattttttgaaattttgatttcaaagcaaagtcaggttttgttctgaaagctggacttggggatagaaccaaagggcaaccttgggcagcctgtttcgcccgcctctcctggaagccacagcagggcggtggtgactcgcttacctcccccagccccacccctccctgcccattccacccagcccgagacccagaactagacaggggatttgttaccgctgatgtgtggcccgtccgaatgaagggggcttttcattaacaaagtagcgggcggtgtcatcttcccctgagtcggaatcattcactattagcacaatgtgttattattgtatttttaattgaaatgtaaattctgggaacactctgacccaatttactcccagggaaaaaagggcaaaattctcattttcaaggctctagaaatgcaagttagtgttattaatgattaagctctttttccttcccccctgctgcggggtgggggccgggatggggatcttcttatccaagcacaatagtcctgttaccccatcctcagagcgcatttgatcgcgaggtagatgactgggtgggaagctcgaatatttcccgcagccgttcctggggttcacacctgggccgggaaatggccagagtgtatagatgcggtttcaggttttaaataactatgatgattgacgcatgattaaacgattgatttggagaggagattactgtcccgtctatttcaaagaaactcttttgtaaaaacaaccaaatggagacaggatgattcaggggtcgattcagactttgcccacaaacattgtgcactcacacccttttggctgatgtttctaacttacactagaattcaaagggcaatgggtattggcagcactcagtctgctcgcacagagaagagagagcattcaccccaccaacaaacatttgctgaacacctactaagtgccaggtactaggaaatggataaataagcaaaggtgaatattttataagcatctctgccttcctaagttttagcgacagcccacatgtcaccttccaagagaggtgacccctattaccacctagtctgagacacccacagcctagtcactctctatccttggccctttaaacattttcttcatggagctaattattgctggaaattatcttgcttatttattcattgcatatctcccgtcaccgccctatccttactggactttaagaaagttccacaaggtccttgtccttggctgccacattctgtagtatgcccccagaacagaggtaccaggcacctaccagtgattaacaaatatttagtaataaaaggatgaatacggtgcaagaagtacaaaaagttcatctgatccagacacctactgtctcttaccagtgtcattaattccaggagcctactctgtgccacagaaatgaataatcacagtctgggcccagagttactgcaagagacaaataataagtacagcctgattcaataatgttat

SEQ ID NO: 63339 - DNA, 560 bp, Homo sapiens
ccagagcccggtgcagggcaccatccactttgagcagaaggaaaatgaaccatttatggtgtcagaatgcattacaggattgactgaacgccagcacagattccatgttcatcagtttggagataatacaccaggctgtaccagggcagttccttactttaatcctttaaccaaaaaccacagtgggccaaggatcaagagaggcaggttggagacctgggtaatgtggccgctggcaaagatgtgtcgccaacatgtctgttgaagattctctggtctcactctcaggacactattccatcactgcccacacaatggtgtccatgacaaaccagatgacttgggcaaaggtgaaaatgaagaaagtacaaacacaggaaatgctagaagttgtttggtttgtggtgtaattgggattgcccaataaacattctcttaaatgtggtctgagttccattaactcatctattatcctgctagctgtagagatgaaatttgataaacattaaacactgaaatctttattttttattttattttatttttttttgtggcagagt

SEQ ID NO: 63340 - DNA, 1219 bp, Homo sapiens
aaacctttagtctggcgatttgaagtcagactgccacaatgaacacctgttgagaaagaccattattagaaactggaggctctgggtgaaaagatcactgtgaattaattttgattgcctcacgaaactctgcataacaaatgatctccaaagggggtgtcattggacttgcatttgaagggggtgggggggagattttgtttcgagcaaggtaatataagctctaccatgacattaaaatccaccattggttgcacttgtctgtatccctctgttgaaacagattgtgcatgctaaggttaccatgtattatgcttctggggaaaaaagagaaacaattgatatcaaaatcttttaaaaaggttagttgagaaagcatgaggtcagagactcatgactcccaaattgttaaatcgtttatttatgtctgtgtctatgtaaatggagatttgggtgtgctcttggtgatttaacagcccttgttttatttttttaaccatatacacacacacacacacacacacactgcacacctctataattttttttgtaagggaagaatagagtgaaaaatatgttaagaaatggatttgcttgcagttggatgacctttgtactttgtaatgtcatcagaaatgagaaaaaggcgtgagagatcacaaggtactgtggaatagtggggctgggtgggtgatggggggaggatacactgaatattaagtagtttcattctttcctgaaaagaaagagactccaactaaaatatgccggcgtcctacctgtctgtcagcccttgattaaatctaaaagcaggcatcccatctgtttgcccaaatgaaaagtgtaatattctactaactactttatattattactcaacttcagagtttcctgcaaaatgatcctcagttcatctgaagtttatctggctcacaaaaagaagctccagaaagctttgtgcttttaagctaataagcagtatacccagctgactctgtggctgaattttcaacacttggccattaatatcacatgaattttcatagccgtggacttccatttgttatgagacataaaacctggaagcactcggagagccatggataactatgaatataagcaaaatcttaatcctctgccccagtcagactcttcccaatagtgagagtgtggaagttatacaactgtgttgggttatgtaacaatatttccctgacca

SEQ ID NO: 63341 - DNA, 1909 bp, Homo sapiens
ccaacatactctcttttagcccatgattgcttattttaaattgtcttccagtctcaggactctgtctctcttccccagctcccccttcttctctcaggcctcccaaatgatacagtctgtgtcattagccgatgctgtggattagagcccagaaaaacttcttgttttcagccaaccctggggagaggagatgaggagaagggaaaatgccttcccccagaagatgatccgatagcaagtgaggctccactgacccctcactgccagtctgaggctctgcagatgagccccataaaatactgcagaaggcttagctgccaacaagcgcagcacacagagatgatctagtcagaggcacgaatcgatctcaagacgtgaatcactgaccttagcccacgctcaccctccctaaatcctgagtccatgttaactaaagattgcatttccgttgttacatctcaggcagcaattcttgatttctgttgagttttatatctcttacccagcacccatttgggaagactttttgtttaatcttctaaatatctgaaacacaattccaaacatttccaagttaaactccccttccattcacaataaaccccagcaagaatctgatcgaagaaaaggtgccgcagacattctctttgttctggattgaaccagtggtatttggatcacccaggaggtatatcataacaaattatctcaataccaattgtctctgtgcaaaggttgggtaaagtcccaaagatctaagtcttggataaaagggatgagcgcatttctcaacagaagggaagggggctgttttcagtgattttgcccactaaatgtggaattccccaacaaattcacatattgcaaaagctataaagttgtgaaacctccactcaaggaaaggctcagggaacacgattccaaacatccacacttaactaagtgctcatcaaaactcctttttgagtttagagatctaatttctctaatggccaaatcacttctgtgtcttagaaagtgttttctactgagctcgatcaactaatagcctgggactggcctcacacactctctatgcagcaatgtttacatgaaagtatggacccaatcgaggatgaattccagaatcagtaagtccattcctggagcttaattttaaaaatacaatctctagtttcactttccagtttcactggaataactgatattttaaaatttctaataaaataagaattatgcaggtaaaatatcagttattctagattctagtaactcagttattctagattctagtaactagacttctaattagctgagacatgattctaatgcagaatcccagggcaaagtcctgtacttttaatgatagcatgctaatttgaattttaagtggatgttgaatattaaccctgatactgtcctagatagtgagtttctcaacctcggcactattgacctttgggctgggtaattctttgatgttagggggctgttgtgtgtgctgtgggatgtttagtagcaaccctgccctctgcccactggatgccaatagcagccctcctctccccagttgtgacaaccaaaaatatctctggacgtgaccaaatgtctcttgggggcaaaattatccccagttgagaaccactactctgaacaagggaaaaattcgtttattagatgtttctattccatttaaaagagagctagcacaaagttagaatgcttttctgaacatagagtaaaataaataaaattaatgatgtatttccatccacataatggaatattaaacaatcacttaaaaacatgtttgtaaagatactataggcattagagaaaagcagaacatggaattatatgttatgtgccctgtatggattctgtaagatatacagatttgaaaatatag

SEQ ID NO: 63342 - DNA, 10570 bp, Homo sapiens
acacacacacacacacacacacacacacatgcacacatgcacttacgcacacaaaacacataactgaaatcccaatttgtagtaaagagcccacatataaaatcattagattgtaatattccctttcctcagaattatttaacttgataaacagtctttccagtagcagtcatctttctgcaagtaattcaagacttgttgaatatcatttaggagacaagtcatatttgccataatcttggtttcataagaagcagaaaaattaccaagtttagagtgtttctggcatagcagctgtacactaaagtaaaataaaataccagcatcctgaaatcgaccaaatactcatttttgtttttgtttttgtattttgtttgcatttgcttcagatgaagctgtctgtgtggctccttagcatggtctggattttctttgtaagcacacacacactcaaacacacacaggcaggacacacaacaccaagcagccctagctgctttcagctttgggagctgcttctttagggctcctgtaacttaggtctacaaacttttctaggtctcactctgggtagaagtcatacaatctgaggtgctgataaatgagaagtgcatgaactagatttaatttggtatgtttcatatttcatttgtcatatttcaaagaccatctcaagacataagaaaaagtaatcagaatgtttgaaaaggggcttgccttctaaaaatataacaatgtttctttacgtaaaaaacaaaacaaaacagaaaatccagctactcctagaagtatgggttatatgtggggagaagaatgagattgctgaactcactgcagaaaaggtgacttttaaaaggtaaccttgagttatgtcatgaactttcaatgccatttatttcagaactactcccaaataaaagaactggagtatgttaggccctcctgtatgtccagcgttgggggaggattacttgtgtactaatattattacaacacactaaatcctgaaaccctattacaaaatctaccctctaggcaacttctcccaaacttattgttcaaccatgtaaaaacagtcataacctaaaaccattactactgaagaaaaagaggagggggtggggagaggtgaggaaagaaggctgggagggggtgtttcctagggagcccctaacagtttactgcttctttaggacaatgtaccagcttttgcgaagaaaaaagaaaggaaggaagagaaagaaatcaaaagaaggagagaaaagagaaagaaaggaaacttgattgagttacttaacttacctcaaagctcaaataaactaaattgaaaaaaatagtactaataaagaataatggtaagaggtagtgaactccttttatattattgctttatgagaagacttaactattaaaaattcctgatactgaaggcaaaaggcaaagatcttccacgcatcatttctcctcgaaggccgagactttttttttttaaatgtagaaaaccagtacaaatttacaaaacacactatataatgctctcttatctctagtttgcttttttgtgtacaaactgttaacctgaacagttttccggtgcaaaaggtctcaccagaaactttaggaaagatgagtgtgactgcgggaagcagaagaaactaagctgagaaaacccggaaaaatactcggcgcagctgctgcggccttgggtcatctcacctccatctaccccgcgtgctcgctttcgcttggggtggaaagcggggttcaggggctcttttcagcggactgagaaatcgcagaggccgtgggtaaggattcaagcttgaggaaacactgggggccgggaggagggctattgtaaagcatttcttaattaatttcaagtcctccatttttttacagggaccccaagtcaggattcccctttcccgacatcaggggtaaagggagcgggggtcccttcgcttcactgtgccccagctctaccgagaggcaggcctctgggaaacgagccggggacctgggggcccgggcggccgcagcttagtgggctgaggtgccgatcagggtcacgcttcggagctctgtcggggcccagctccctccttcacaccccaaaatgccgcctagggcgtgggcatcccgagtggcatccggagccgctgagaccccgccgagattgctccttgtgcgtcctcccacagccgagaggccagcatcgtgccgggacgacccggggacccgagtccgggcgccgctacaccgcctcgggcgctaggcctgggagctttgaggccggtaccgtgaaacacctttaggagcaaggagggattccaggtgtcctccctttgtaccccaactccctgcccggatctcttccactctctgccatagcccccacacacaaactttgttctggacttgttcagccccttcgggacccacagttgtcgcctccatcggagaaaacaagtgcccctgtttcaggggggattccactctggctggccacccgcaaacctggaaaactattctatgacttcttccctgacccccctggaagtagggagcaccacgatccgcagagggcgcataccgaccagaaagattttggggggcagagggtgcaagtgttgtgggaagagatgcggagataaattttgcgagccagaccccgacactttccccgtccgtttgcaccgtctccggaacaactggcggccagcagcactctccaccccggccgcaaccccagcgggtcaggcgctggcgccccgacaccagtccccatcttcttgcagctctgaacctccaaagacacccggttctgcctcgcaggccgagggggagtgtgcgtgggggcaggggggcgcagcgaactcccccacgctcggagttcagcccagcgcccgaagtaaacttccttaccgctggcagcaaggccgggcggcggaggccgggccgggtgccctggggccggcgccgggagcgctaggggccccgtgcggtcaggccggggcgacctccacccgcacccacgcctcatggggctcccgggtcttggccgcggctgggatccccggaaaagcagggacggagaagccaggccggcatgcccgccctccttcccccgggaggacccaacaactccggaaagatcctgccgggagatgtgctcgctttccccggggcagcgggggaaagcccagcaaaggcacattgaaaattaaaaagaaaaaaaaaattacgccgagtggaagaagcaatcggggccgcggcggcggtgaggtagggggcgcgggggccagccgcgtgtgagtgggtccgagtgtgcgtgagtgtgagtgcgtgtgtgtgtgtccacggcgcgggccggagcactcaccatctcgccgggggagcgaggccacttcggggtcggattggaaatgttgaggcttcgcttgcttcctccgcgacatgctggctcaaacatcagctggggcagaataaaaaattactaaaaaaaaatcttctcaaaattacggaaatcgagcggcggcggcggcggcggctccccccgcccgccggcccgcccgccccctccccggctccccggccccgggcgcagcgcgcatgtgtcctgctataattatgattatcaataatgcattgcgattaatcatagaggggctctttgaaaggcgattggcaccgggccagcgctattcaaacccgctcgccttaatcaattagttcgtgatttgctgcagacccctgtctctccgcgcgctggcccaataagccggccgcggggctggctctgcgcgccgcgccgcccgacactgggttaaccctctttgcgaccgcccgggactccgcggcccggccgccgggggccggcctcctctccactgcgggcccggcgccccggcaggcgccccccgctctctccctctcccctccctcttccctccctccttcgcccccccccacaatcccgggctgggccgacccaaattagcatgccctccccggaattgagccgccccgggtggggggtggggccgggcggcgagggctggggacccgggctgccggcgcgctgcgaacttcccaactcgggggcgaggcgcgccggcccgcggggggagggagtcccgcggcgggatcaggggggagggcgtcccgtttcgtgagtgtttcttcgtttctttaagagctaccagaaagcagcccacccccacccccattaaaaaaaaaaataagcgagtggggaagagccagccccacgccggtccgcctcccgcccacggctcggcctccctcccgcctggctcggcgctcctccgccccgagttctccatcccctggatcccgggctcgcgggggcgcggagaagaggatccaggaaaggtttgggaacctgatgggtttgtggctggggggaggggcagttctcccgccaccccatcccctccccgccaggggcactgatcctccagcttcttgcttgctccctcgctccctttctctacctcggacattcccaggacaattagggctgaagttttcgggagaagcagccccgagcccgtgggataagggggcggcccggctccgcccaggacccctcccggacctcccccccggctgccccggttggctgcagggcgcgtcactccgcggggaggcggcggcagcggtggcgccgcagagccccgggcgggcggagagcggggaccggcctgggctccgagttcagctccggccggggggaggggaggggctgcggctcacactgagcgcagcagcgagcaccggcctagggagacacagcccgggcggacccggcactggactgggccagtccctgggacccctgggcaccccgccctggggagggggccgcgccccagccttccgggacgaggtggcggcgcagagccggaaagcggggtggggggagggcggtggggaggtgttctgtccgaggctgcctggcggcgccgaagctcgcctccactttttgggcacttgccgagcgcggcgcccgaacttttcgctctatcaccatctccctcaagctgagatgcaacctccctaccctcgccccagagcccagagccaggagcccgatccctctgccgggctcaggcgcccgcgaacctgagactcggtacgcggctcagcctagctctttcccctcgcgcctcggggtctcctcgctccaaggttctcgaagtcttgcgcccgaaggactaaactaaactaaacttcggctgagtaatgggggaggaggggggtgcagatacacaatccctgccctatctcacgatcaggaaaggagagggctcataaggacgccccaattcgcgagcgcccttgagtctggccggtgccacggtcggttcgcgcgaagtgggcaccggtctcccgagccgacttcgtgtactccggacctgtactgcgctccggtagaggacccttccctttctcttagcttcttaaatcttttcttttaaggtgtaaatgtgtgtgtgtgccgatgaatgtttctgtttttcatctgctgactttatttttttttattggtataacttctcccttctctctccctgctcgtccgttttccaccttttctcttacttatcttctgccctcgctcactccctaacacacacattcacaccctctccgcctcgctctcccgttctcgccaggtcctgatgggtacagtagattttgataaaaagacaaacgaagctatcagtggggctgatgttgaagaatgaagataataatgtttccataggtggtgcttcaaatgccattatttctcactgaatatttaaagagatccctcggcaaagatggatctgcgcactcctggggtgtgagcggctcgcatctcccagaccccggggaacgtgtacgggagcacgtgtaaatcccgcacccgcctccatctcacaaacaggggtcctcgcacacccaccaatccacactgtcccaggtacacgaacgcgtttgtgtgcacttgcacactcctttcccggaatgtgcccgtgtttggagccgcccgcatccttctctaacaatcttggcttcttgaaagtccgggcctcccgggcaccgcatgcagccaggaacctagcggagctggcggtcccgcaaagcttttctcctggtgcgcgccgcgtgcgcagcaggaagctcccgggaataacttcacacgtgtttgttacttggtctacgtgtgatttaagattaagtgtaggaaaaaaaaaaattccccccccccaaaaaaacaccacaacaaacaaccaaacgaaatgaacatgcgaaaagcagctacgcgatgcttaattaaaaatgggcgagcagagacgaataaattgggggatccaaactttaataacttttttcgtttttttgcgtcctcgacggcgtagaggcgggcgtttcgatctgcgcttggcgtcccccgctaatttcttgtttgttttctttccctcggtggccccgggaaaggagatgggaggtggaggagggggggatgggaggagggggatggtcggaatggcggggagaggagaattggtctttattgttgatggcaatacatcaattacgggccattgtctcggtcccaagttccgtggttcgctggtgcgggcgctgcagtgtcagggcgctggcgaggctccgcgtgccgcgatgcaaagaaatacatcaataaaaacagaagcagagtgggggttattctttatttttgtgcgggtcgaaagtaggcggcgagcgggagtgaggtgccactcctggagtccctccacgcgccctgctcaccccagagacctgcgcgctctacgtgcggtagcaccctcctaactctgggtggaggtggggtgggggggggactactggggaatccgggtagcgaagtttggacttgcaggttccgccagagggcctggtacttaggggctgatccgcaatagcgaatggggatagcccgaagtgaggcggcagctgcgccggggtcgcgacctcactggcggagaggaaccgcacccgggggaggcgcttggcgagttttgcaaactcccatcttgggggattgatgctcgttcctactaatacgtccccttagttttcccaagtcctagagtatccttggtgggttggcggggccgaaggtctgtgccccaaggccgcaggccacaactggggtcccagccatgaggtttccaggcttctttgctcaacctctggtcctacgaagggcaacgtggggggcgtcaaggctcgcgcattctgaggcctggttcttctaccctcaaaagtatcttattctggcccgatctgacctcgggtctgggatggggcctgggatgaggccttgcctgggccccagaccctcttttccgttccgttgacggtgcttggccaccctaccccagaaatggaggacgtctccaagtgctctccctgcacccctgtttcctcagtccccagctcaaggccccgctggcccccggccgaggctagaagggcagtagtggaggtttcgttttcttaagcaaggcaaaaagcggcgaaaaggcggcagcggcgccccgggggcgggggacgaggcacatcgatggtatcaacattattgatggggaaaagttcggggcaggagcccggagatcaggttcccagtccctcccctgcccggaggtgggtgggacagagcgggtggccagctgtgtgtgtgtgtgcatgtgtgtgtgttggtgggggggtgttcctgaatgcacccgcattaaccacctggggtttatttgtattttccttgtctgaaagtttgcgggggcagagggaaaaggaagggttgaggtggcttgtaccctctagcccttagggctcttaactagggttggggttggggttggagttagggttgggggaggggtgcggggagaacaggaaaaaaatgacagaaaaaaagatcaagtttggaaagctctccgtagattcggttatttttccaaaccccgggaccttgcttccccgggagtttcagaaactcctttcctactgaactgctgtcactcaatcctaacctctcttagaacactggagcggcttcgaacccgaagtatggagcaggcttgggtgggtacctcgcccctggccaagtctacactgtgcgccctcggcgcactcgctctccagcagttcaataccagcagcaaaacgcaggtttttgggggaactcccgccgcccgccaccaagggctatctccagacgggcgccgggtgcagcgccgtgaccgggcgccctggcgccggctcgggcgcgaaattcagcggtggcaagcggagggtgggcttggtaaccacccgcgcgcgcccgagccaagagtcgcgtactgtctgcccgcggcaaagttcgtctttctccgcttggagggctgttcctacaccggtattaagaaaccgacttcgctagcgactgcaagtgcttgcgattttgactttccgtccacagttgagcgtcttgcacttaaattcactgcgccccgcatgcaacagtgcctcgccaaggggcctctgggtatgaaattcctcccagaggaaatgtcccgacgtagagaaagtggaaaaggctaatcgaatttataaaaagaaaatctttcctccttttggttaaatccctttgcggttttctgagcgcgaaaaaaaaattatcaccatgtaatagagtgtagctaattcttagaacctagtagtaggatgttcaggaagcccagcaggacgcacagattcccatctgccgctccagtaggaccttagttaggatccagcgaatagtggttagttcctgtgtcttctgttggaaataggtgtgagatctgtggagtcctgttctcggagcgtgtgcatttggaagagactggtagtctgccaggaaactcactttcattcataaatgagatcccctcaaacgacctccttatggcattcctggatgaactaacttagcacatctcttgcaacaaagttttatttaaaaaaaatttacgctgccactttttcagcagaacttccattgttaaagaacagataaaaaattctcagagatgtgcatcttggtttttacaaaaaaaagttgtgtgcagtgaacccttgctggtgaatggcttctcttcctcagttttcatgcaggaaaaagcaccttttggtttctgtttggtggaaatgaaatggcaaggtctgatttcagaactgtgctggcgtactgacacttggctgtgagcaaggtctgcctgtcactcacattatagataatttacaaacccctcaagtctcagctgagctatgactttcatagggaatatttctcagggtttcttgctactgacttttaagcaaagatcattttttgttttttccctgatggagagaggtgcttcttggggctgcagtttgaatcacatttgtagctttaccctgcccccacaatgaacttcaattcgtcaatcctgtgcaaccttttcagttcaaacccacattctttccttttcagctccatatgtgtggtcagtaaggaaggggtaaaaaaaagggtgtggcagggatagcccactcttctccctcttccccttttcccagattgactaaactttcttaattattgcactataatttctttctttcaatttttatctttgtctcttcagccacattaacaatattgttctcttcaactcaacatccagtttgacatagagttttacatttaagacaccaacatttcccaaccccaaacccgtgtctccctgttttcttatgccttcttaaaacagaagcaattatccctgaagccataatcccaaacccacacactaatgttagcaactagttccagtcttttcttcctcttcatgtttataaattctccttctgtcctggcctcccctctttcatcctggctttcctcacttccccaagactctttgacatgttttgtagtaaattccaatcctcgagaagattcacccagaagtttgctcagggtgtaatatctgtaacttttgctgagaactgggcccaggtcttgctgtggactttgctcatgctgtaatggatgcctgggaactaaacaagggaagatgccagcacattcctccttctccaaccaaagcaaaatgatttcaagagaactggggtgcagcccacattttccaggtttgtttttgtttcctctttctttcctggaccccacaacacgttcagtttgggagaacagtgctgaataacccagttcctattatctccaccccatggacaatctctcctctgcagatctcacatatttgctgtggactcgcttgattccacatgtgctacttgggagttgagcgtgcagactcacagtcaggttatttgggtgcacattctggctctgccatttaacactggccagggaacgcagccctaagcttgcctctgcggatcggggagccttgttcaaattaagatcgccactttgggaggccaaggcgggcggatcacgaggtcaggggatcaagaccatcct

SEQ ID NO: 63343 - DNA, 949 bp, Homo sapiens
tcatagattgtgataaacgctaaggacatagacaggctgctctggtaggggataaaaggcagcccagcttcttccatttccaggatggtttagatgggaatcgagcatccccttggatgtttgtttcccaacgattctgagaaagtgattctatgacttagtgtgggaacttcttaatgacattgatgcccaggaattcaagataaccaggaaatttgggatttagttacttggaaggttgatgaagtgcaatagtcaactctcgacacaaaggagccaactcctggaaaacagcaggattcttgtttacttttagttttcagtccaggttggacttcactgtttttggccaaaggtcatcatattggtttttagcagaaagagtcagattaaaagaactggcctgatatctggatttcctctaaaaatcaccttccaagaattggcctggatgcaggcctttttggttccaccatctacacctggtattggaggggcggagttgaggacactgttcatcctacactaatgtttgcttagtctaaagtttctgtttttgttttctttgggttagcatttaaaatgaggattttttaaaaagccatatttctggtattccttggaaaagctgaagctctttccataaatgtccacagaatgtggtaacgtcacctgcagacatacagtcacagcctcctttagatagggtcataggcgctccagttcaccataatgtctctgcagccaaattcattcatttctgtgacctgcttggccacggaaagtgtttgagtttttgactactattctgtgaatttcaaggcctgaaaactgggaatgttgcttaatgatcagtcctttctgactcagtcatcttgtcaacttaaaaagaaagggtgctgtcaaaacttaaattttcagagctgaaaatgctgttaaggaaccactt

SEQ ID NO: 63344 - DNA, 1461 bp, Homo sapiens
gtggctggctaaattttttatttttgtagacatgggggtcttgctttgttgcccatactggtctcaaactcctgggctcaagcaatccacccacctcagcctcccaaaatgttgggattacaggcatgaactaccacgcctggctgggggtttactttttaatgggagatttggaggtgatggaattgttctgtatcctgattgtgatggtggttacatgattctatgtatgtgttaaaattcataaagctgtgatcccccaaaagttaattttttgtatgaatattaaaaaaattataactgggtaaatgttcttggcctttattcagcagaacattgttacctcctttctcctggcaagataaaaaaagaacacatccttagatgtgtcagaaaacagaaagctctcaacgtaaagtgcctcccagtagagaaacaaacctccacgtttgaaacctgctccaaaccactcccgggctctgtaaaaaggcccaggcaaatgagaactccagatcagaacctgggtgtgggggagctatgtagaactccggcaagctatttaaagagatttaaacgcgccgtttcctagttattctgaggtgcagctataattgctgttctttccaaataaatccttcagattaaatggatatcgagtgtgtaagttcaatgattgctcacggcacgcgaaccttgtcaaagttcagagtgagtcagtctagattaacaggaggaagttggcaaacattgttttagtcttaacactatcatttggtgctggtgttgaatgtttacattttggggagagaaaactcaggccagataaggcagcctggggccacacttgggagtcaggaatcttggcttggcaacaaggttttgtaatttagggggagtccctgctctcctctgaacctcaattttgccacctgctttttgggagtagtgtggttgaactcgatcttttccaaggatattttctatctggtttatgactgagaaggtctcccttctttctacttttggggacatagttgcccttcttcttctgctagcacctgccagtgtgtggcctctgttttagggacaccccaccacgtcaccaagacaatgctaactaggtctgttttgaatttgacgagccttcacccatctgcctacccaaaagcacttctctgagcaaacttgtgtacaaatgtcaacaggcaccacagagcatccgagaaacatgcccagaggtgccgttaggaggttggaattatgaggtgagcagtaagaagccaaaaaataagggagccacttgagcagagagtataaacataaatatccccaagcaggccccagcactgggttttttatgttgatgttctaatgtgttatccactaagggcttatttacgccgttttggtattccctgcaattcatttatctgcataaggaagaggcgctaacaggacagt

SEQ ID NO: 63345 - DNA, 827 bp, Homo sapiens
tgctgcacgtatgagatatgcaagacccccgacagctctgagaccactgcggtggctgggcacaatgggggggctctgaagctgaattgtggccataacctggagttcctttgcctttgtgactgccaataggatgctttaagtcattggggtgggcctttgtgagtgcgattacaaaccaggagaggaagggtgaggaagcagggctatctgtgcacgcacgtgcaacagttactaagctcgtgtttctggggcaggcggaataggagctgggtgtttataacatggtcattctcctttacagaatcctctgtgagccgagctgctaaccactatgacaggactttgtttggggagcgtgttaagttagcttggctgtttccacctgctgctcagacccactggtgacatcatgctcgcaggctcactggcaggctggaggattctagtttcatgtccaaagaacaagcaaaaatggagccgatccatgtgggaatggtgcccacatctgaggcctcagtcacatgtgtcctgagagctctggtcagtgttcccgcagtccatgtcccagatggccctcttttgagactgacccatgccccggagccagagctctggttccctggcaaccgtccctccctgcctctcctcacctcccaccctgtccttctgtagacacctgcagctgggctgcagcaggcatgtagccatttggagactcagtttccttatctttaaaatggggggagcctacagctccctaaaatttaggaggagagggctaggcccaatcatttcacacacttgctttgtatctctctgctgct

SEQ ID NO: 63346 - DNA, 1137 bp, Homo sapiens
ataaccctcccacccctgatgatccccaccaccattgagttcagtctatgcattttaaaactccatcttcaggaacttttgaggaaactcttacctccccacaccctcactccaaacaatagtgcattggaggtgatttcaaatacagttcattgaggctgaggaaatggacaaaaacttctgtgtgtttgcccttaaaaagagaggctgcttgcctggttgagtctttgacaacaggctgtgtttcctaccagctcttaactgtgggcccacactgacatttttgtagccacatattacatgattggtttttgatttttcagttcatagcttaaaatcacattgataagaatatgacctccaagcattggaaaatcaactccaggtcctgaattctctgcatgccaatgctctaagtcacatgagcagagtgccgtgttaggtacattacataaaccatgcagactctaggttaaatggttctggattttgtaatgtgaaaagacctctggtgacacagctgggaatgtaggtaataggtgtcacttgactattattgctatatgcctaagagctgttcggaggtaatcatggtagacattagcttattagttgccacaccagcaaacattctctctatccctcttcacgtcatcccttgcacaagttaaggtagtacaatttgcttaacagagaaaaaccaacagctcagcagcttgacatcacagagatctcttgcttgggtaaaattcaattggaggtggaagttgaagggaggctctgctccaggcagtcattcaggtattgaagttattccatctgttatcctattctccactagggttttagaatcttttccatttatccagtgaatggggaaaaagagagtgcaaagaattttgtggaagattttcatgggtcagggcaagaagtagccaacattcactagccataactctatcacatggcccaaagaggttaggaaacgtggtcttgctgtatgtatgtctagaatgaaaaagcccagtgctgtccctagacctgacacaaaaggcctctggcctgtgccctcagcttgagagagttctacaaatcacaaacatatgcataagaatacacttatgacagaatacatag

SEQ ID NO: 63347 - DNA, 4625 bp, Homo sapiens
cccatttttaccgtagagttaacaccaagaaaaattgtctgattgattcattttcttggtgtcttgtattagtcagggttttccagagggacagaacaaataggatctatgtatatataaaaggggatttattatggagaatttgctcacatgattacaagacaaagtcacataatcggctgtctaaaagctggggaaagagaaaagctggtagtggcttggtacaagaccaagagaatcaaaaccaatgaagccagcaatgcagccttcagtctgaggctaaaggcctgagagtccccagcaaaccactggtgcaagtaccagagtccaaaggccaaagaatctggagtctaatgaccaagggcaggaggagcagaagcaagcatccagcacaggaagaagaggaagccagaagacccagcaagcaaggacatgaagaggaagccagaagacccagcaagcaaggacatcccacctttctccgcctgctttggtctagctacactggcagctgattggatggtgcccacccacattgagggtgggtctacctcttcactgactcaagtgccaaactcctctagcaacagcctcccagacacacccagaaacaatactttgccagccatataggcattgtgcaatccaatcccattgatctatcacacatctctttctcctatgggaatgtcagctctataatagtatggcttactatcccagtgtctatgaaagtgccagcacatagtaggtgctcaataaatattcattgaataattacagactgaacccttatgaggtatgtaccattgtccacagtggacagttgaagataggaagggaggttcacagagctctctcagagcctggcgtgagagcactgactcaatgtactgccctgttctgtagacactaggctctttccttctaggaactaatctagattccttgaaattatctgtcagtagcttgcctatattacagtctccatgaatgtcaattaatttacaaggtgaatccactaatggggcagtcagagatcataatacatttacatattcaaatataaaggcagacagctgtggccaactcttttttctggctgttttgcatctgagtgtggaaaaaaaatatgtttttgaacttggcttttgagttagacttggctgccgatgataaatggcaaagcaattctgatcttatctggacagtttttccatgaaatataaagggagaaagaagccagaataaagatctgaaataaatatattgacagaattcaaagaaaagataatagatttactcatgttcctggcatgattggttagtgggaaaggaggctggcctcgccagaactgtgtttggttatagattaataatccaaggtacaaatggttccggacaatttagagaaaacataaactacaatattcaacaaactggagttcaaaggtttctggaatttgctaactgttctaggtcatacatttttcaaaagtgatgacacaatatggagtttttgaactttgcaacacaaatagcaagtaggtttttgcctgaatctcattaaagaattgtgcaaccattatttaaaaaaaaaaaaaaaaagaaagaaagaacgaaagaaaaggaaggcagggaggaggaagaagaaaagtggaaaggttaggaaatgccaactgtcaagttactgaaaatcgaagaataatctcataattctactgtaggaagtgtgcttttagttcatattctgtgttgcatggtggttgcaagcatggtttccgggtcactctgcagatccccatctgcctctgatccttattggctctataatctgggacaagtgatgaagctcagttgatagaaatattgtttatgtcctatgagctatgccaggcacatttaactttttcctgaatccactcttactgctccagtctgttctctatgttacagtaagagagttacctttataatacagataaagtcatgcctcgatgtctttgcataaagatgaagaccacagttcttactcttcctctgtcacagtctactcaggtacctccttgttctctgtgctccagccacactgggcctctccaatttccttcagtatgccatacttcctgcctcagggtcttggcaactgatcttccctctacctagaattctctttctcatccttttgattccaactgaattacaaagtcttcagagaatggtccttctccatctttctgacctgctcctttcttgcatgtacacaggtgaactttgacagtgatttgtcaaaccagtgggtattgtccactctccaactagactgggggacagaagtggcttctgacttggtcactacctccctaccacttagcacaaagccttgcacattgacaagcactcaacaaccactgcaagattgaagagaatgaatgcgtcatggcctcagctggtccaggtcttcatctgtgaatgctgggaagacattacctttcgcataggttcacagagaagattgaatgagagaaaagtttgcaagggctttgtaaaccatgaagggcaatacctgagtaagggatgactacaatttttagatatctgctggtgaccatttcaattgccagtgatccgaaatgtaactcaaattcatgggtttagtctgaaaaagggaattctttggcatacacaactgattagactggacaagaaaggtaggattcaggtgctgaagtggcatcatctgatttctctctctctctctttctctctctctcctttgtgcatttccctctctgctttcctacattcaatcattggccgggctttcccattgtgatgatgaccaatagattcaggttacattacgttataccagcccagcactcccagggcagagagagagcccttttctctaaagtttcagcaaagatctatgaaaaattgtctttggctcaccttaagcacatgacctctctgagttggtcactctggagagggggatgcactgagagaagggccaggtctaggttacacaacaccttcagatcttgtggatggcattagtcaccaggaactccatggactgagaaaaggaaagtgcaaaagaaaagtgaatgtttctgcaaaagaaaagtgagttctattaacaaaagcagaaacaaatgcagactggagaaatcaacaagcatcctctagggagactcaccagttcaaatgaaggaattttttttttttgagactgagtcttactctgtcacccaggctggagtccagtggtgcaatctcggctcactgcaacctccacctcccaggttcaagcgattctcctgcctcagcctccagtagctgaaattagtcaccatgcctggctaatttttgtatttttagtagagacggggtttcaccatgttggccaggctggtcttgaactcctgacctcaaatgatccacccgtctcggcctcccaaagtgctgggattacaggcatgaaccacagtgctggccaaatgaaggaatttttggctcccatctcctcactctaatcttattgtgtcagttgagttctgtcttttctcccgcttgatggaaaggcaatacaaatcatattccacagccatcttcacataaaagcttggggaggtcttgctctgagttgggaagaaggaggtaggggaggtgtacaggagaaagcaagtgaagtgattcggtcctctgttcattaaagcgggtaagatcagagtagtcacattcatctcatacatctgaatccccataaaagataaggtaaaccctgtaagaagaaaaatgccccaggccctcaagtttggggttcctaggaaacaagcatattagggaactcactggtgttaatgaaagaaagaaataccaccaagcatttttagacagttgactttgtcattcattacctgtgtgatactgaataagtgtggcacatgctgatggatagctgagccaatccctgttcaacctcctttttccaagggaggaagctgtggccaatgaaatgtaggaaaaagtcactgggtggggcttctggagctacagcaaccattttgtaataatgaaagtgaacagcatacacaaagtcttaatgtaaaatcaagagggttttttgttcgtctgtttgtttgttttggggttttagtgtttccatgctggcttaactagctagataacggctatcagtgttacatataataacattgatttgcacaccactttctggtcgcttttccattttctcaaactggtgggagctgttttttgagtgtggagtgatcatttaaaacaagcttgtccaactcgggacctgtgagccacatgtggcccaggatggctttgaatgcaactcaacacaaatttgtaaattttcttaaaacactatgagattttcttgaaatttgtttccttttttgtttagttcatcagctatcagtactgttagggtattttatgtgtggcccaggacaattcttcctcttccaatatggcccaggggagccaaaatattggacacccctgatttaaaataaagatctttgctccattcaaattctaattttgtaatacattttaaaaaacttattattactgtttgggtcctg

SEQ ID NO: 63348 - DNA, 4060 bp, Homo sapiens
aagtctgtagtgagccatgaatgcaccactgcactccagcctgagtgacagagagaccctgtctcaaaaaaaaaaaaaaaaaatctctgaaaagattatgcttggtgttttccttagcagtcacacaattccagttatcatgttttcatggtgaagttagaaaataaaagagagttatatttctagctgtagaaactatatttgtttgttgtcatttaagtggcctgtctggtactctaccatgaccgtacttcatgagagtaaccaacaaaacctgaatgtacttagtgtgtggtaggtgctcataggcctgagagacagatggcggttatgatgaaagacaagaaagacattgatcttctgcttttaatttgtgaaacagcaagacatccaccaagacgacattttgaggtggaggtgtttcctatgttgtgtcagctattcttgtattttaacagaatcatagaatattgatgggaagggcataattactaggaaaaaaatcatagaacattgatgttaaggaacaatgttaaggtctacctagtccaaagccttccttttacagaaacagccccggatgcccagtgagggaaaatgacctgcccaaggtcacatggccagttaatgatagagccaggagtaatgcttgggtctctgagatttgctgttatttaatcccatcttaacggctatgatcaaaggacatagtttctctcacacataaagaaataacttgacttttttaaaaagctggctaggtgactaatgaactatgtctaccgtgaagtgggtatccttagtcaactgccaaggcctgtttgtgcatgtgcttttatttctgcgtgacaagccctcatttggatgcacagtgaacacacatacccctgtggaaagatcattaactgagttgtggtggggcccaccggtggtcaaaccacatgtttgtgtgtgcacaggtggaaatgatggtcattctgaaagtgttcacctcctaccaccttggggctgtgtctcaaacatagaagttccctctcctgggtagtaaccctcttgtcttaattaaaaaacaaaatctatacttgcagattgatatctgcctatctatcatctatcttcctctgatatatgtgtttgtgggtgtgcttggtgtgtatgtttgtgcatgtgcatgcacttacatatataaaatgacaaagagatacatattttcttatcagatggctttgtcagggatcttgtgaaaaaaaaataggcatacacatacagtttttaacccagttatgaccttctgcatcaaaattgggttttgtagggtttggtaaattacattgcaatctactactcattctgacattaagtataaatgaaattaaactgtaatgaacagaaaacacagctttaaagaaaaaagaagacattaaaagagaggctgctggactatatgccctttctgaatactggggcctcagattttgtttctttttaatttatgtttgtgccatttgaacccccctccacaagcccctcctggagcagcctggacagcccttatgaggtgagacatcaagcccttctgattcacagcactgtagggcagtactactgccacagataagttgagcctaagccacataattttaggatctactttaaaatgagagcccgggcttagaatttttctccaaattctgaacattataagccaacaatgagaacaacaacaacagcaacaacaacagaaataacccaaagcaaatgccccccagttctttttgccctaatttttcaccaatatcaaactcttaactttctgaatgtacaaagagattcttattttaaatccaagaaagaaatgacctcttcaaattcataatgaggtatgcattgaacggaacacagcccaaggtgagtcattcattaatcataaacaaaacagcccctgatcaaggacacataagcacacactgtaaaaagaggccaggttacccaatccctttatttaatattaactacattatgtttttcatgtgagttctgagaaggtgattttctcactttatttgtagccagctcagtgtgaatggataattacttcccttaatgctgtttcccctgaaggttaaccctgttcaacaagacacgattgaatcttgcctctcacggttgggtggggctggagtggggggaagggtctgcatccgtagctaaagacttttagctggaattcttcaaggatgaaaacatccgccaacaggaatatttcaaatgacatgaataatatttgtgattaataacagctaaccagagaagtacaatccaagaaatacatgattagcttattacagacatctgatgtgctaattatcttcaaaaatttcattgctgatgactgttttggcagaaatttgagcaagggaagaggaaatttaaacttttatgtaagttggaaacaaagcatttgggcaattggactttagaagacctgggaatggtatttggtatttaattctgtctgatgaggaggaaattaaataatgagaatagaaatcagtgtgaagattgaaacttgagtcaacgagaacttggccgtcattgtcagaagctcttccttaccttccttgacaaaaggctcctggccctgaaatgaacgggtaacatgatgcggtttggcaagacttgcctgggtgccagtcatgggtgtgtatcactgcttgtggaagaccaacagttccctaaggatttgcttctcattcccagtggagacctctgcagcaccagctactttcactgaagcatcacagaatatcctaacacatggtaggggacccaggagaaagccatacagctacttctgggaggagcctggagtacacactctcattttactgatagaaaagctgactcccagaaaggatgagcaagttagcaaagatttcaaaaggatgattgaattcaggccacagatagccagccatctgctgtgggaatagtgaactgatatcacagggccatttgcgtaaccacacatgttctctgtctcactttccagaagtttacaatcaagaaagacattttgatgttgatggcaaacaaagtaggcttaaaacactcctcaattcaactgcaaagaaggagaggcagactctccagcagggagactccccatctccagccctcctttctgtagcttcattgccaaggtgctccttcttttgtttctttctctaccatcccctaagcggattggggtatctttgtattctattaagtaggtgcaaaagtaatgcaggttatgccattattttcaatggcaaaaactgcaattacttttgcatcaacctaatacattctggaagaaaagaagcaggggtcacagcaggcaactgcccggggtagtgatcaagaccaacgtgcacctcccagcctggacaggagtagtcagatttatgattctgatccccagaaaaccagataatccgcattaagcaaaggtccgcaaaacaatgagtttatcagagcaaaccaagagttaaagcagaatgctccactgaatgcaacttaagcctcatgaggactgagacctgtgctaccttatttactgctctatcccccttcagacccctcacccactgatctagaactggtctgacccagattaggcacttatttctagaaagaacaactgatttgaacattttgagcacctacgtggtgccaggctgctaggcaactataaaagagacaaaaccactgccctcaatgagttctcagtgaatgcaaacagaagagaaggtgatgaacccagtggactagtggccaagggagtggactcctggtggccagattagttccttaactctgccatttattggctgtgtgacttttgacaagctagttaccatctctgatcttccattttctcaaatggaaaaagtggagagtaataatcctaacatatatagaggattctgtgaaggctatgaaatcacagacgtacagattcagcacagaggggtaactagaaacagagaagaagtcagctaaatgactacttcag

SEQ ID NO: 63349 - DNA, 1613 bp, Homo sapiens
agttgtacttatagaggatttctttaacgaggtcaagctgggactaggtatgttttagtgtcttgtgccaactggctgattttggaagctaaaagaagaattagcaggagggtgaattgtcttttatttagagtttaaaaacagctccagggcatgtttacccaataggttctgccctactagtcattaggaaagaaaacttcttgtactttgtgtgtttttattttgtgatctttccctaaagagccaagagagatctctgtcattctatcaaagatatgataaagtctctctcgatttcaccccttggttcaccattccttatgggcatcatctatgtgagagacactaagcccagttctacggaggttatgaagggaacaagtcttgttttcttctcgcaatgttgtaattgaagtataaatagaagcataatttgggaattactacttgtcctttctcatcaatcaccactctttaagcgtgccactgggataattctaaaagtgctaagtccttcctctcaattccttccctgacaatatctgaaagggttttaggaagtatagtaatatttgagttgtatgcaaatttcctctgcaggaaaacatggagacggtggctggggtatcggttgcacacagtctaaacattccctgcagtcttaattaaccacatttgctttcctcttgcttcaggctgagtcagcccaaccaccactgaagccagttaccagcctgtgtgatcacgtgatgtgtgactacatcttggcctgtgataaacgatcgtgtctcttgacccacaggagtttgtaacattcttttagtgtataccgagtcattactattgcactgaaccaaagtaaatgaatgtctactgccattgtcatagaaaaagaggaaagaaggaaggaaggaaggaaggaaggaaggaaggaaggaaggtaggatcatctgctctatataaactcccctgatcctcccaggcgcaactgaaggatttgtgctttcacaaagctttgcgtagacctgcgcctggttgtgcattcttttcagtcagtcactgtggtaaggtagtaattgcatgcctgggtttaaataatgattcaacccttatcaattggccatgtgaatccaggcaaactatttaaactttgtaaacttctcttgctaagcccttaactttgtactggcctagccctaactactctacacatattaactcattgtttccttttgacaatgttataggatggtacttcattaaccccaatttacaaccaaggccaagtaacgtctccagggttgatgggtgcatttccttgtgagggtgaaatgagatagataatcagtgtaaaacccttcttagcacagtgcttggtccatagttagcacatcaaattataattttcattcattagtttttaagataaagtttacataatattataatgtgttaggcattattctaaatgttttagacatatcatctcattcaactctatgaagtaggtatagttttcatgtccatttcatagatgaggaaagtgaggcacagacaggtaagagatctgcccaaggtcacacagctgtttagtggtggagactaaattg

SEQ ID NO: 63350 - DNA, 673 bp, Homo sapiens
ttcagagcatggaaaccctgactctctcaaccatgtgttctaatgcagatcctctgcagtaggggtagagtcctctgtgtacaagtggcaagctctgcaggttgaccacctcggctcccagcctccgatctgccccctaccagctgggtgacattgggctgatgactttaccgtctttgtgcttcagttttcttatttgcaaaattgggatgataataataataacatctaccttatagggatgttataagacttaaatatgttataaggtattttctgtgtcaacaaagcttggcgtattggacatgccttagtgttacgaaacactattatttcaaggcagaatctaggttaacacgtgtcatttaattgagtaacacccatatggaaacttgacttggaattttgctcagtaataggacactttgctgcccccttttctcttttctaaagtgttttcttcaccaaccatggtggccaagctctttttttttttttttcattctatgtctccctaggacttttgttttctcactttgtatcttcctcttcctgaacaggtctctgtaactttgagttatctctagacatcctcattccagccctatctgactcatttgcatatgtcattagcatgtattttgtgtgtccctctcttaacaaatcttagaaa

SEQ ID NO: 63351 - DNA, 3083 bp, Homo sapiens
ataatacactggggcctgtcagggagttgggggctaggggagggatagcattaggagaaatacctaatgtagatgacgggttgatatgtgcagcaaaccaccatggcacgtgtatacctatgtaacaaacctgcacgttctgcacgtgtatcccagaacttaaactataataataataataataataataataaacagtttatctttcttttctcttaatcattctaatatgttcttaacagccaggtgcaatgttagctcagctgccctttagctgccaaataccttccatgtgctatcaacaagatgattaccttgggcccaaagtgcaatgcttacccaattatagaaactgtgtcaacctggtgttgactaccactgccactgccattgtgaggttaggacttgggcaatcacctggacaatttaatcagaaatcatccaacttttgaagaacaggtcaggattgataacttagtgcaaagttcccttggatgatggtacaatcttttcatagcctgttattctccacacatgcacactcacacatgaacatgcattcacacacatgccaacaacaatcatcagtaggtatttttaaaaattcaaattgtaatatactaaacaataagccatgttgatatttcatgttcctttctagtctttggccataaacaaatgtcactttcatgtgattataataaaatttatagatttcattcgtttttttcttacatgattttgccagcatttttctccatgaggattttccaaatgctttgtagatgtcaacaatggaatccttccagctggaatgagtttgcactctgtgctgaaatcacagtcggggactcaaagaaagagccacttttaaccttttgtgttttctgctctaaggaatgaactcctggctgctctttctttcaggaattaatgtgtttggataattgtctcaagtgggagctcgccacaggaaagcaggtgtaggggcttggcttttggcagaggcttagtttatttgtcatttattcactcatgcattcattcaacaaacattccttgaatatctatccattacccaacagacatgggtagcaatgctatctgcaggcaggtcatggaggctggatcaggagcaggaagatggaagaaatgaatgacctcgagagctgagtgtaaggattcacacctgccttccaaaaacagagataccagctgagcagagaagaatgaagcgcacgaagagaggcctgtggttcaatcagaccaaccaacaagaactagaaagacagggcgtcattgcacagcagacatcccagattaaataaacagatgtcaaccatgaagactgaagatttggggccttggaggcaaggacagatcctgaaaaggacagcaaagaatcacatgagcccatcttgaatgtggctcctgggaaagcaatgtattctaagcactttgaatccaagatctgctgcctgagtcttgtagagaggccgtgaactcaagcagggctgcctgcatgtgaatcccacgtggaagctaggtgacttcaggtaagtgacttaaccttccaggaccacattttccagatcctgaaacagtgatgacctaaaagtgcttagctcataggtttgtaatgaggcgtaggagagctcatacttgcacagcgttcaaaacagtgcctgatacaaagtaaatgcttatataagagtttttaaataaaattaatgtacagtggaggaaagcatttcatgacaatacttaattcttttcagtacccctaaccatcctcatttttagagatttacaaatctatatgacaccatggtcttttttcttcctaattatttacatgtggtttcaactatggcttccttccccaaccgtgatgaccacagcctcctactcctcttcccccagcaatgggtaccttcactgttgtgtcctgttggttgcaagccaaactgaagcattgtctaggtgccgggccgggtactcaaccttcacacatatcagaacctaaccttttggcctgccctgtgttctcaagctctaacatgcaataatacttcccagcttccctaaaacccccagacctctaagctggttacataccagtgtggtgttgagtcgtataccaatctggcaacatgttgatgtttccatgcaggaatcctcacagccaggcttcacagctcagcaagggtcctgtgccatccctgcctgaagatcattttgcattttttagctggtatccagcatgttgactaagaacaagagggatttctttgaaagaacaatcaggatgccctagctcctggggccttttcccagctcccaagcctgggaggcattgccacggatggcccagctctttggttgaaggcctaactccaggaatggtgccatcatttcagtggttaataacaaacaaaacagaaagatagactgcatgactcatgtacactgccacctgccgaggcctgggagcaaagatttggcaaggactaaggaagaggacacagaatctactttctttcctcttctttttcttttacagaaagactctttgtttttgccattttatgcacaagctaaacagattacagtcaagaaaaatgggggcaggcccaggtgtctaggagatgggagagaatttgcattccaattgtggaacgtatcaaaaggcgattctttctgcctcaattggaaggtgcagctcaatttgggggcaatttcaacaagaccataccttttatctccaattcaaactgggggcactccaaggatgccctggggaatcctggaaggaaagagcagcacctttatgaaggcagatgttttcatttcctcccctctagatccttgaaggttgaaggttgaaaaacatgaggctcatttttttttctgtttttgacttctagtatattcgaaaatggagaaataccataagtcaattgcaaaataaatgaatttgagtatgttaaatgttaactcttgtcaaaataacacatttcgtgtacccacattgcagtgattgtgtgtgtgacttcatttatggataacgtcaaaagtttgca

SEQ ID NO: 63352 - DNA, 1319 bp, Homo sapiens
ccctgtcttggacccctagactagaccaagaaggtgagcacaccatggtatttcatgcagtgtctatcttctgaacgtgggaataggagaaacatgctgttctgagagaagaaagccaccagacaatacaagaggcttcctcccacgctgggccatcttttttattagatttgggaagttagtacaaggagataagttaggttcaggctattgtagctgccccagacagccaattaggaagggtcaacttaaggattactatgtaccagagacttagaaccctattgcccaagaacttatgattccacaaatgaagagaagacaagcaacacacacacacacacacacacacacacacacacacacacacacacacaagtgatttgatagtaattcaaggcaaacgtccttccaggttgactctgatccagccagctgcacagccaagtgtttgtcaaggggttgaatctcttccaatgtttgttttctcttgttgtttctctctcctacgtcatctcttgaattctggtctctgtcatgcaaccgcactttgtccccaacattacttgtttcctctttcgacaagtacaaatttaacatttcacatttttaaagcaaatattttctccatatcaaaaaatgacaacatcattcttctgattgctccagccaaaacttgggtgtcatcttcctttcctcttatgttttcgtcatagctgcatccaattccatattttaaaaatatatcacaatctgacaacttcttccctccccctcccctctttggtgtcaaactcctcctttccctcctcctctccccccatcgcatccatctcacctcggctaaatggtctctctacttccctgtggcaccccacctacactgtctgttcttataccaaggagtcatcatcaataataccagagagatgcaaagtccttccaactctccatgatctggttcccattacctctctgactatatcctgcctcccatagtgcaaaagaatttcattcaatcaagcaagtaactgaggagcaaatggagaggcaaaggagagacacagcgtaatcaccaagaaggctggacagtgaggaggctgatagataagagtaggacttctgtttgcagaagagagaagaaacatcatagagagtggcatataagcctgtctctttccctttactcctccgcatgaaaatgaaatcctgcagtaatcatattcattgtgtcaatttacatgtacgccatgtttcataagatcccttgagtaaggtaattaacacgccctgttcttcaattgtttgtccctttcttg

SEQ ID NO: 63353 - DNA, 417 bp, Homo sapiens
taccctggtctctaacatgatcctgggaacatctggaaggagaaagcagcacaggtgagtaaaagtcagacaccactgtgccctgggccatggcattttctgctgcctacatccggggctccagcaggatacctggccccaggcattatttggagaggtggctaacattaaacaaataagaaaaatcactaactaggccagcaacacctgtatctggagacacacgatcccagcacacctgcatgccaagagcattagctcattaccgaacatatctgagcaccctcagaacacgtggtcctcggtgacaaattcaattgcacttggcacaaagccatggcgttattcacatgccatgtctctgggcctttgccaaggttctgcaggatgtgggactcattgaacacaagttgtagg

SEQ ID NO: 63354 - DNA, 881 bp, Homo sapiens
ctttccactctttcatttcctctcttctatggctccttttggagcagagaaaacctagcttctcgaatgaggtggggtgatgtgtttagggtgggtagggggaaaatagagggaaattgtggtagatatttttttgagaagatggccacaataaacctttccatccctttgccctgtccccctgcaatgtgactgctgctccctcaacaagaggtagaatctatttcccaacccctcttggatctgggctaaccctttgttttactttgaccaacaaaatgtagaggaattgatattgtgtgattctcaaggctagacctcaaaagtcctttcagctttcactttcattctcttggcatgcagtggcatgatgtgaaaaaaaccaagctagtctccctgaagaagagagaatgagtgaagagagaaactcagctgatggccagcaccaaccgcctgacatggggtgaggtcatcttggacttcagcccagttaagccacaaaatcactgaagatgcatgagctcacctcaggcaagaccagcagaaaaacccattgctgagcccagcctataaggcttacccacaggattatgagaacacaaaattacagttatttaggccgctaagttgttgcacaattttttatgaggcaagatacttgatagagacataaacaccaggaagaaaaacattgggtaatgtctcaatgtattattacagtacagctatgccttaaattttacttccagagattttagcattttctaatgtcacacttatggattatatgttaggaaagtttacaacatttagaattggggtttccccaaggacagtggggaaaaaggcagagggtggaaatggcagggatgacatagaag

SEQ ID NO: 63355 - DNA, 833 bp, Homo sapiens
gtctttgctgaatatatgtatgttgcactgaattaggtggaaagggtgtcctgtttcccataatttttcttttctactattagatagcttcattgcagcatacgctccactgttttatggtttctatgagacaatatttgttccctcatcattagacaggctatttgacaagatgggccactttaagggatataccttatgccgcctttcgctcttctacaattcagctccataaggatgaccttcagacatttttacacccaattcccccgcagcaccactagagggcagcagagaacacaatgatggcaagatggccattttgtccagtctttgtcttcagctctcctagtccctcaattttcccagctttcatccttttgttaactttggctttatgggtgcaagtttcagtacagaaaagcctgatttgctttagagcaaagaaaaccataccttttttcttcctgccttttcatgtggtttcttagagaaataatttcatcaacgagccaaaacactcaaagtttacaaaatgcacctgttttgttttgtttttaaatatggcctctcctttagaaaagaaaaaaagaaaataaaatcttatctactacattaggcgagagtttcccttctgagcgccttttctataagatctttaactgagctctgctatcagtctcttcagcctccattcttcttgtgatccaaaatccagcctggaaaaaagctctcattggcaggataattaaagtagatgaacaagtccttcagtcccagttaatcccagtaagcctaattcagcttctatagatggaaggataaaagtgttc

SEQ ID NO: 63356 - DNA, 606 bp, Homo sapiens
gggagctcagagtttttcccaatgccccatcactcacaaataaagaaagggaggctcagtgaggtcatgtggcacccccagtttataaaaagtccagcccagttctcagagtttattggccacatcatgaaatggtcacatcctttatcactgaaaaccagaagaatatttttgagagtgaaaggtggcactgttcatgatcactgtgggacaacagttaggactgtaagttaggactgtcctggggcaactgaacacacaggcactgtgccaacctccttcaaccacactgaattccaaaagagccgatatatggactttgcaccccacccttcccaatgtgaaacccttatgagaggccttctcctacagcagtcatcgaaagtatggttgtttctctttattctattttatttcatttgtttatttattttattttattattatttttaagatggagtccctctctgttgcccaggctggagagcagtggcaccatcttggctcactgcaacctctggctcccaggtttaagtgattctcctgcttcagcctcccaagtagctgagattacaggcaccaaccaccacacctggctaatttttg

SEQ ID NO: 63357 - DNA, 1153 bp, Homo sapiens
aaagaatgagatgaaaaataaaaatgaaaatatttttttgttgaccccagtggattatgttgcagacataaaatttgaagaccatagctctcatatatagtgttaactgaaagggacacagtatctagcatttcctctagcagaggcattggcaaacgttttctatgaagggccaaatagtaaatattttcagcttttgggccagacagtctctgtcacaactgaaaatactcaactctgccctggtagtgtgaaagtggctgtggcaatatgtaaagaaatgcacatggctgagttccaataaaactttgtttacaaaaaggactgcctttagaatttcacctgtgggtcatagttttttgaccactgctctggtaaaatatcatttgtataaaagccaaaaaacacacgcaacttacttgaagttttcacaactgtataaatgtttaacactgaacttgtattgacagaaaaggggaacagagttcattgcatcaaattcctgtttgacagcagtaatggtcatctgtgtactacttaatggcttacacattactttctcaaaccttatctctcttgatcctgatgatgacatttccagataaggaaggcaggtaatatgatttccattagactgatgagagagataaaaggccacagggttggtttataaggtctagagccaaagctggaatctaggacacgcggctccacaatctcatctgaatttgaccaaaccacattgccttgattctagaaacatgtttccaaccaaaattaccaaggcttcacatgaactcaacatcctcaccagcatgtgggtcatgggagtgtgctaagcgtctagaatgcagggatatggattgaattgttgatattttatttgggaagtgtaagtccccagtggtgaaggggagggaaaggaaatgatgcaaagtatctatggagatggcctcctggattgaccactggttcacaatgagccacgatgcagcacagcaggaccccagagtcagtatatttgcttggcactctggacttttccagaagaactgtaaggagggaccatatcatagagatgagaggggaaaattgtctgtttggctctttcctgtcctttgctttccattgatttcaatgggataaaacaaca

SEQ ID NO: 63358 - DNA, 519 bp, Homo sapiens
tgtaagaaactcagaaaattacaaatagaagggagctcccttaacatgacaaaaggcattcatgaaaaacccatggttatcatacttaattgtgaaaaaccaaaagctttccttacaagatcaagaacaggcaagaatgtctagtcttaccactttgattcaacattgcactggaagtttcagtcaggacaactaggcaaagaacaaatgaacaacgtccagattgacaaggatgaagtaatagtctctatttgctgatgacataccacgccaaaaaaaaatcattagcactaatacatgagttcagcagtttgcaaaatatcagataaatttacaaaaattaagtgtattcctatacaccagcaatgaattgaaaataaaattagggaaactatttcatttataatagcattacaatgaataaaattattaggaataaatttcatgaaagaagtgcaacactcatacctctaaaactataaagtgttgttgaaaggaattaaagatctaaataaatgg

SEQ ID NO: 63359 - DNA, 1118 bp, Homo sapiens
ttgtcttttgggctagcagaagagagagctcttttttcaaggcaatgggcagtgcttttagaaaataggatccaaggtgtggactgcttcaggggtatctttagctctcacacttatgtgcaatttttcctaaggaaaggctgcacctacctggtctgtacctttaacttccttcttctggccagattaccctctgaacgttgacccccatctgttcaccatgatattctgccatccttattccatcctgatcctaagcaactaaacaggctgtctttgcccccctctcagttttatctctctacctctctctttctctacctcacagctgaccaattatctgactcatctgatccccagcaaaaataaacaaagaaacttggcacaagcaccattcacttgctaccccccccaagcaggcaaaaagccagaggctgaaactcccccttctcttccctgcttgtagcaacacaggcacttgtaccattctgttcacccacctctcccatcagaatgggacccccggaaggcagaaactgttagacatgttttctgcacttttcttggcttgttgcccaattagtgctgactttgaattacagggagaaatagggtgaaggtaaggatttaactggaaaattgtgaggtcatatatctgagaacgattgctaaattctcaagaaggttatttcaacataggcactattgacacataggaccagatacctttttgttgtgggaggatgttctgtgcattataggacattttatcaacatctaaaaatgtcttcagatattaccaaatatcccatggggggcaaaatcaccctggtaagagccactgccctagtgtatcatgggcttatgaaactgacaatgctaacaccatgttcatgaaaagacgttagcgttaggagaaaatgagctgtagggtttccaacataggatcatttcacatcatgcctttccttacttctagtcaccacatgactccctaccaaaccacataatgattttgacccacccacccttctgagaatcagcatgaaaccatgcattcctattgacccatggaacatcaaaacttccggctttaaatttcatccctgaatttatta

SEQ ID NO: 63360 - DNA, 3214 bp, Homo sapiens
gatgagtagcttggcagacaagagacttacctcagacccttagggttggggatatctttatacctctgtgtgacctctattctaccctagtgacctttgcttcatggtcatttgaaccaagaaaggaacccatttcccatgtacaggcaattggaaacagtattgagcaccatggactctaagaagatgcacctgaacacgaaccagcacacagaaaaaataaaataattggaattttttttaattccatgcttcaaagacttcagtttttttccctcttctgccctgttagaagcttccacttgtgcttgtaagattcgtgactgcaactgccttaataagttctttctcttccgagcaatgagttgatccagccttgtttggtacatctgttataacacatcgcagactctcataattattcttttatgtaattctacacattctgattagctgtgtctgttccaggcaagcagtaggagtgtgctaagtgcccctcattcaaaaagagttcttcaaaacagtacaaagtgaaattaaagtaattattaagtcatagaaactaaacacaattccataataggcagagggctggcaaataactagcacactacagtcagagaaatgtgttcaggactgctctctgaaatacttcctggtatcaggttcttggtaatgacacagagtgagtgaagaggaaggaaaacagattcgagggccactttaagatttaaaaggagccttctcctcaacactgatggggaactcaagaagcagtgttcaagaagaagagatgggtgcaatactatgtctagaaaagcctgccttcttgagctcatctctttagctctcatgcatattctgtggaccaagaagtttttagtatagaagagacaattaaattccagcttttcaccattgtacctcttgcaccagagtgagtaatagggcagagtgcaatagacttaaattagattgcagcagaacatgtgtactgaccttttctcagagcagatctatttactttataatgcagttcaacttgtaggaactgatgtactcctagctggagtaaaggttaagaaatatgtgcatcttaattcatctggatttcaactctgctctagtcttctgcttattgtatagaccaacatgtgctggccccaacaaaatggagaaagcaacatgatttggaagttagtaatgcatgggcccctctaccgcttagtgcagtggttttcaaagtgtggttttaggcaggattgtcagtgttacctggggtcttgttaggaatgtaaatgttgaggtcctgtgccaaacctactgggtcagaaaccctttgtttcaacaagcccttctgatgcatgttaatatttgagaactgtgtgtgtgtgtgtttgtgtgtgtgtgtcccctccaagtgcttttgatgtgtagccagagtcaataatcactgatgtaatttcctgtctcctaaaaaatggaatgcagcaggtaccactggtgacacacaaatgttaagtggtagacaagtaacttcgcatgatctggaaggtgtgatttaaaatggcagtggaatgtaattttaaataatattgaatctcttggtgaaaaagtgaatctttttctatccttgtcactgttcaaaaaaactttgtttgttatgaacagagactctattttctctctaacctttgttaatcttccttttaaaataaagacagagcagggcccaggctcagaacctctagtattcaacagcatcaagacataatatgattaatattattaaatgttatttgggttgtgtttatgggttgctttttatttatgtcaaatgacactgtttttcactatatgatagtgatgtatatttttccttttaattaactttttctcaaagaagtatgaaacaatttaaaaatacatatttggcaagtcattcaaataatatatggctatcaggaactcacttacaagacagagagggaaggcaatttctttggcagtgttcagtcattacacattatgcctaatttccagcaccggctccatctctatctccaggcctcgaccctcagaaagaggacctgaagcctgagatatttgccatcagtgaagaaaaatttcattatggttactacacaatttactaagatagaaaagtgactcatacatttcagaacaatgtgtcatcacaaaatttgaaatcaaaagggttctgaattacccagatgattaaaatgtcaaaaatagcccattcctcaaaattcagggtaattgaattcgggttgatcttgaaaaaaaaacttagatttttttcatttttataaaagcaatgagatttttcaatataatatttggaaaaaatagaaagaagaaaaatatcacatcatccattgttatattccataaagagacagtagtactattaagattttggccagttttcttccagtccttttttctccatttaattgtcacacgcacacacacacacacacacacacacatatatatatacacacacaattctgtgccttacttcagcatgagagtataacattttcttttatattttaattagagttttattgtatagataatagaaaagtaaataaatcacttttaataagggtctctatgaccacaatttcagtacaaaaagtacatcttttgggttgcttttggctgcaaataacagaaaacccaactcaaattggctgaaacaataaagatatgtattatctcacataacagaaaacccaaagtggagtagattattctacaatgaccggcttgacagtgacaataggacctgggttcctacatcttcctagtgtgagcttcatcctcagactggtagtaaaagggttcaacagttctaggtatcaaggccagtttcccatgggaaaagaaaaaataatatttttacttagacctgtcttagaaaagagaaaatgttctgcagaaattccccaacagacttccccttacctctcatgagatggagttgggtgacatgctcaccacttctgacccagtcatgggtcagggaaaagaactttacctgattggcttacctcaaattccttaggaggtgaatcaagtacctttccctccaaaaaaaaggaaaacagatagggaggtctttttagcatattgacataacaaataatgtggtgcaacgtttaaagaagatatttaacatttc

SEQ ID NO: 63361 - DNA, 636 bp, Homo sapiens
aaaaaaattgtcctcaaatctatgattgactcatttattcaacaaatgtgtactgagctctcattatggaatagatatacacacagagagagacatacagatacacacacgattaatataccttggagacataagcatcaaaaatgtctctctcccaataggcatgagcttttttattgttaggtttctgactcagcagagcctctccaagcactcagcacctgtaacttttcctatcccatttccccacagcagctctgccaagctttcagcaccaaacctcacccacttgtcaactaatggactttgtccctcaatgggtaaacagaggccatgaggtatgcagttcttttgcaactatcaccccaaaccagaacttcaaatcatcccttttttttcctttgcccagcaaaacatattcttccatctgtgttctgaatcccactccaccatggtttggtttggctctgtcaatttacctctcatttgattcttcatcttttcccactccactgtttcttcctagcaaaatgttccagtcccattcacccttagagttaggggagcaaacactgctgagcccctctcaaattaatcttgtacctccctcccctaaacccactaactatgtgtcca

SEQ ID NO: 63362 - DNA, 973 bp, Homo sapiens
caacactatattagttgtatataaatatatatatatatatatatatatatatattccttaattttttcctttcaggtagaatgttcatgagaaactaaattttcatatactgaatctgagacctaagacagatggccaatcaaaattaagttactcttcattttcccagctgagttagggctccacatgttaccaggtgttatcagatatgacaagaaaagaaaaaaaagaccctatctttgcttctaatttgcaggatgatgaaaagccccttcctttttttcctcaccagtagattctttcaactcccaattgtgttttcatgagaggcacaaggtagatcagaaaacccaactgcaaaaaaaaaaaaaaagttcactccagctttcgttctgagaacagtcagatcaaaagactttttctgaaggcaaaacaggtgggtttttccctttatacttacaagtgaaacaaacatgtactttgtactttcactgaacacagagcaagtggacagaaccaagcttccctgtgcttagtcaatattcatacctgcaaaagactatacagtcctacaaaagaaataggcacctggaatcggtgacttataactggggcaacgggaacaggatctcaatagcagtatttcaaggaactttcacagaataaggtgcaagtgagaaagacatgtaaggtaacactgagaactctttcaccttggacacgcatatacctatatgcatagccacacctacacacacatcgtataaccacatacatatcagccctcttcctctcagaatccagctctttgggaaagtgagagtgcaatttttaatcgagttcagcgtatccataaattggaccataaaatgaaagtggcaatggtgaattcccaggagaggttaaaaaataaatgtatatataaactacaaggtgatgcaaagcaataaggtacattttatgccaaatatca

SEQ ID NO: 63363 - DNA, 745 bp, Homo sapiens
tcaaatgagcctttgggagacagaattaactgagggcaaacaagagcttaactttaaaagacaaagagttggcttatatcaagttgacacttccagataagatactgcattataccaggttatacttgcagtaataatttttgattggcatatcatttgccactaactgctgcctggcttccactgagcacacgcaacatactataaactgttatgaaagatgtctttgtattgttcaatatttacagggtacgttattttataaatgctccagttggcagaagtttaaaaagaaaaagcattaaaacatttcagatcaaaatgatcctctttgccttacaaaagaagtactttctaaagacaggtgacaattctgttcagaaattttcacaccaaggctaagtaaatgttcagcggtaaaaacagaattgctttgttcagctgcacaaacagatttcgacattgcctctatttgcgtattcctgaatatcctctttcagatcccacttttatgggaagcaaaatcaattttcttttggacaaaaaagtgagatctggtctaatgattttaatcttttaaataaacatgaactgaacttggagcacaagcttttcccttaagaaaagatctttgttgctcagaaagatttctttcaacccatgaacagttagtgcccacggcagtctaacctggggaaaaaaaaacagaaaatacatatttatacctatgttatttatttgttaa

SEQ ID NO: 63364 - DNA, 2764 bp, Homo sapiens
atgtctgttttcaagctttatataccctccctgaaataaatgttctgagcttaaatagactcaaaatagcctttctcagaaaataaaaaagagacacacacaaaacacccccaatttcctctggtcccttgaagtacccttgggatcccagtgaacagagatttgccacgcattgcagtgactgcatttgtacaataggtttctattttggtgtcattcgagtgttgcagatcttaaatcagagaaagaaggagttacattaggcaaggtaatggcttccaaaaataagagcatgcccagtttatacaaggcttgcatccacatgctaagttgtaaggagataaataataccccactggaacaattaggtagattctcagaaacactacatacttaattaggctgcctaagtcccttactgagcatacatgggggactttttaaagcatttaataacctgagtaaatccaaaatcagaggacacaaactaatccttaactctggctccagcgatcggccttttcttgcctctctataaatgcttagcgtagcccttagaattcggagagcaggaacgctccaaccaccaaagggttaaagcacacggaataaagtcccctcgatctatattttttgggaggcccctctgtgccagacgctgagctgggcgatgatgacacgcgagggcgagcaagagagaccctaatggtcttttacaaacttcagcactagagttgggaacgcagtataaacaaatagaaaggaacacgagcctccatcagccacggggcacagcaaactgttcctcactctagatgcaattcctcctcttcctgttatttattcattagttttgtttagcacctttctttcagcaggctccttatttcctcctgttatccaagcaatcacaaacaaactacgatttgaaagaaaaagagagggaggagggaggagcaggaggaaggggaaagaaaaccacattcaaaaggcacaggccattcagagcccggctgtttctctgaatctcgccctcagggtgatgttttcgacaaattcggcgctgggggcttcagggaggacagaggacaccggatggtgggggggaattccgcgcggcccgggtaccagggctgcgactctcgcccgcctcgctgctccgagcgacgcccgctgcccttctgaggtccacctcgccacctggaacgctcggtcctcgaagttggcgcagggggaggtggagaaggtggagtgaccccagggtgtggtgtggaggtctccaatcccgatctccccgaaatgcaaaacttagcccccccaaaaaaatgagaggaaagaagccacttactctaagcggggaggggcgggcaccccggttccgaggtccaaagtgccctaacgaaagggcagcaaaggccacctgcggggtcccaccacttccccccactcccctgtccaggcatactcaaaagtttgttcctttccgtccgtaagcggccccgaggccggctctggagtaggtgggggaggtaagaaggactgggggtgggggagggcaagatcatcggaccaggagatcagggacccctgcgtagcccccactcagtccaggggggctgcgatcgtgtttactaataacagcaacaaacaatcacacgccagcccttctttcagtcctcgggctctcttcgctttttgggggcagcaaaggagagtctggcggggaggtgggagggagcggaggggctgaggagagcgccggctgggggacaaaaagcggcgtgggatggggcagaaagagaagcggggagagctggacagagacgaaggctcaaaggtagaagagacatgggaggaaagaggccaaagaaaagtgcagcaggcggtgagcccgagcgcggggcgcgcccaggatggggaggtggcccccgccccccggcccaccggcccagcccggtcaccttgctgtagccgtagtaccccaggcactgcgcgaagtccaggctggcagggtccccggccgccgcggggtagaacctcacatccatgccgaagctgggcccggggccgggggccgggactggggttcgccggggccgggacccgcctcctcgccgccgctagatccaccgtcgagggcgcccgggggtggcgcgtgggactcgcggccggaggggcgccgggacccagagcccgaggagctcgggagccgcggccgccgcacacaaaggcgcggccacgcgagccgcgggagagcgggaggcggccggggggacgcgccccgccggggcaccgaggcagcgctgcgcgcgggccgggcgccgggggcgcggggcgcggcgctggggcccgggtcggcgaggcgagttcaggtgcgctgggcgaggctgggacggcggcggcggcggcggctggccccgctcctcctcctcctccccgggcggactgaggagacgagccgcggagacaaggggcccggcccctcccctccttctccccctcctgcctcagccgccggtcccctccccgcgccgccgccgctccgcccctcccaccgcgggcagctggcgcgccgcccgccccgccggtgcgctcctcggcccggaccgcctccgggagcgcccaccccgccccgccggccccatcacccccgccgcggccgccccctctccggggcccctcttctccctacctcgccccccttcccgctccggtcctctttgtccccactgcctcggagcgctcctctctcccctcctttcct

SEQ ID NO: 63365 - DNA, 1018 bp, Homo sapiens
aatcctttctttgataaacatccatgtttctaggcttaatttatatgacatgttattttttaataaccatagaacaataaaattgtaaaaataaccaagaaaagaactgagtctaataaagattctgtttcttaagaaatgggaaacaattgcatttgatcacagaacagccaaggactagcagcaaaataatctctcctaatttacatagatctgtgcgtgccaaacagatgagtgtttgcttttcgagtaatagtgcaggtgcgtatcctgcagtgactaaatctctaactcatcaaactgtttcgccagaatgggacatgccctctttttctggaacagtttcaagttttctccccagcattccagccacctgtttatggagttcatcctcgggagaagatgcatgcaattagaaacaagaaaatgaaaataaatgaccttgtttgttatttataacaaagaaactctgcaaaattaatgctgtgaagcttgacctcctgacccaggaaaaagagccacctcatggctttgtggccaatggacaatagtctggcagctcccattgtccagccaccctgacttttggatggtcattaaagccacatatccaaaatattaaatgttttacaagttagattagaggatttgcactttttaaaatgcgtgttttaaaaactgaggttagttagcacaagagattttctttttaaggacagcaggtaaaaatcatttagcttcatctactccatctatcctgtgtcaacaacatgttgaaggaaaggaaaagatttaaaaattctgaactagtgctttgggaattgaagaatggttaaatatataatagaaatcaaatagaaaggtggtctttgaaagtggttcagggaaaacattgtgtttcctccctgctgaggcctcagggaggaaagggggaattacaatgttctgttacataaatgcagtgtggatggtgccccctagagttgtgcgatgaaatagcattgctgtttttccttcc

SEQ ID NO: 63366 - DNA, 725 bp, Homo sapiens
acatgagccactgcacccagccacaaagataacctaaagatgtgtttactttgacccaggcagtagtttaaaaaagttttaatttgttgttcacatttaaaaactggacaatttctacataaaaatctgaattactcatgtctcttaaaaaaataacatctagcaatggtaggcccacattccttcctgaaaataattagctgggaaagagtagggactgacccctttagacacggtataaatagcatgggagttgatcagtaaatatttgctgaatgaaagaatacatgaatgaaaagtcagagccctataggtcagcatggacggcggtaaaggaacctggctgagcctgaaagagaatgtgatctaagattaaatccaggatatgctggtaaatgtttaacagccaactctttggggaggaaaaaagtcccaatttgtagtgtttgccgattattgtgatgtaaatactcccatcatgaccaatttcaagctaccaacatgctgacactgaacttggagttggaaggagatgaacaggcataatcaggtctcgtgagatggcccaagccggccccagcactccactgttatatatgaggctagaattactacataactggaatagcaactttctggaccatatgcctggaacacagcaggtgctgaataaatgtttgttgatccaggaactgactgtgttgaagcccacagatgggaaatca

SEQ ID NO: 63367 - DNA, 926 bp, Homo sapiens
ttctccaaaacattgccccctccaaaaaaaatgcttctcgttgtgggattttttcctccacactgacagagagtttgaaagtaaagcagccgactagagtgtgggtgcccacgccttagaacaaagagattaaagaataggcttttcttcaaataaattcgatttttttgcaacaaattcagggcctggacagtttaatgaagaataaaaaatgctcagacccctctctttcagcttttccaaacaaacacagtcatttccaaccactcacaggtgtttttcttcccaaaacaaacacagaaacaaatatttacagagttatgaaaattcaatagaagtcacaggggcacaaatttcctcacctgcatccaagatctctggcctgggattatcaaacagaacgtcacacctactttccattacgggacaggaaatctttgagccaaagagaatcagtctgcagaatgtgttcgtaaggataaaggcctcatcttttcaagaaagtgtttgcagctccaaggaagaatggactttggacaaaggaaacaccagtgactttttcctcatctgcccatacgtgcagaaatgcccttgaagagctcatgactgccttgcgaattaatccctatgttgaccaacaacacaaagagtggtgctgactaccacactgaccaccaggaataatttcctacttaggtgtttgcgggaaaggctgttgtttgcttttctcaaatgtcccggatgtgaacaggtctcaaaattaggaaatgcagctgggaatggctgctatcaacaacccttatttcatcttttttctttcttcaatagagctagagaagcaggcaagaaaagaaaataatgcaattatgaaaggagggaggaaagacagagggaaggcagcggggcagaagggaagcggaaaaaag

SEQ ID NO: 63368 - DNA, 2145 bp, Homo sapiens
attattttcctctcaaaagggtctgtatataactcaagtttgagaaaccctagtctcaatgaaataaaaatcaaacaatgggctgccctattctagactacatgattttgctttttagtggtggcagggaggaagaaggagtaccaggaagaggaatcatttattcttcctggtacaactcccagaaggtgcaaaatctgctaaaagttaagtttaaaagaatgggcttaaattatgttaatttattattggactctcccattacagtagagtatagtttctacctcttaaaatgaaaagcaagtcgtggttttcagaatcccataggaagaagctcagtgagttcaactcatgaagttctccttctaacactggaatgattgtggattcttgggtctgtttcctgacaaagtagttagcttgaaggcaagcgccatgccctgtggaaactaagttcctattccccttctcagcctcacatggagtggaactgtgggtaaaatcatcaggacttttaaatttttctttctcctccttcttttggttgtctcctgggcctatcatgtaaataaaccatgcacataagcagcagaattctgaagctattgtacagggtaatgttgacttttcgtgaaggagaggaggtcaaaaacagtgggtgttattttctatgtggcactcaaagtattcaaggtaagcttgagtattctggggtgaatattttttaaaagagacaaagataatttttgcccaagacttgcactgatgaacagtgccattcatcagctctctgatgaagcatatagaaattccaacacctaaaaaatggaggcaggacatcagaagacccagaccaggaaagtgagcttggacagaaagaacaggtgactactgatgtcttgacagtgcttctgttcacccagctccaggatggaatggtccatccaaaattcaagagagaatgaaagccagttgtgatagcccagagaaggtggtggctactaaaacagatttcctttgttttgttcatcccactgacctctgtcactcgtcattcccaaggtacacagagcgcattcctgccccattgctttttaggtaaacattaaacagcacttcacatggaaagaagccaaagtgtttgataattcatcagcagcagcaaacctgagtgtttctgtgcaatgcaaattgctttggcttccacacagctcctgtcgcttcaagtgcggatggtaaatagccttccttgggattactatcaagtattcattttaacaacattaatttacaacgtgctatcccactttacattgtgctacatgacttattcacagagccagcccttcggcgcctgatgttgattcattctaatcaccgcacttgcctgtgatttttaggttaatgggacctggactggaaaaggattgtttgtgtgggaatcattcatggcaaaggcagtgacacctccttcaaaaacctgtgtctttctggcagagtgttgctggagatggccactggagaggctgagtcaaatcaatctcctcacctgaggacttcctaagaccagcgcactgaaggaccagcagcaacaacaacaataatgctaatgctcccttatggtaagttacactttccaagtcccatctaatctattattctcacaataaccctataaggtaaatacagtgggtggtttaagagtatgggatctggagactgtgtcttgggtagaaacttgatctattactttctagccaagtgaccttgggcaagtgactcaatctttatttccctcaatttcctcatcttaaaaaatgatatataatagctgtacatattttgggggtacacgtgatattttgagacctgtgtacaatccagaatgatcaaatcaggattgggatacccattacctcaaacatttatcatttgtttgtgttggaaacagaacaatttttctcttctggctactttgaaatatgcaataaattattattaactataatttctctactgttctatagaatattagatatactatattatattagtaatatgtagtatattaatactataatactagaacttattccttctatttaactgtatgtttgtattcattaaccaacttctcatccaccc

SEQ ID NO: 63369 - DNA, 579 bp, Homo sapiens
tctgaaaaaaatactcatacaccagaatcattatagaggctacatgtgagcttcaatcgttgatttatattatcttttttggcctcttgtcttttctgcatttccaacaatgatcatgcattataattatattattttaaagtttttttttttttttaagcatgtcccaatttcacttttagtatggcggagtgaaaccatccaggtctgtctgtctgcatgaccttggacacattctacccttttggacttccgttttctgatttgtaaataaagaagctgattctgaaatctcttttaaggctcatatgttgagtcatctaagaatatctgtttcatcctagggataaaacaagaataagaaaacataaggataaggaagcaaaataaatcttaatcctacaactaactcagcaatactaaagcttttagagggcttggagatcttccaaaatcttcttgtgtaagaattatttgaaagaaatattccactgagtaggaaaatgacagggaatttctgttctatctcagtgccttagatgagaagtaggtggcaccagggtggcaagctggaggggt

SEQ ID NO: 63370 - DNA, 1248 bp, Homo sapiens
acagagacagacgcagacttcctgacagtcccttcccattggtttaaagatgccaagtcttccatctctgcaaggccaggtgcattacacccgatggaggcatccacttaagaccctgcatatcacagtccaaatcattaattcagactaaagtgcagtgcttgatagccagaagcaagatatgggataaaggaagagggacatcttggcaaggaaggattcgagtagacatgcttggagcatacctgtcacaaccatgtctttggacagccctctgcacccactctgcagaaggagagggcctcagtcaccatggggggtaccagataaccctgatccctgacagcagctaattattccagggttggacatcagaggtcatcagttgtctaactgaagcatttgaaggatagaaaccaagttggagatgtaaaattcagagagaatcagggctgagtctctgagccatagcagtcccaaaccacacacaagctactgttatgggaaggcatgaagagattaatgacgcagagactcctcaacaacaggagagcatgcaaccaggaaagaaaaagtagagcaaaagagcattgcctgaagatgttgcacctcccaagaagcccaactaactgtttctttgagactttcatgcatctttacaataaaccagtcacttagctaatttagtaggtctctattagttacaaccaagcatgctctgagcaatacatttttaatcatggtgactgagatgatggtgggtccactaaaagtgtcacatctggtaaattccaacttttctagaaagcagctatgggtactggaacttggtcatctgtcatcagtcacctgagaattagatgtttcattcaacgttttcctttaatagggactatgactattgttgacaagccaaattaggactaagggaaataagagattctaagttgtcaatagctaagtcacaaggttccagaggaaatgactcatctgtagtgtgagtcatgacagaggaatttgtgtcaaaggggcatattcccagtcagaatggtgattattaaagagtccggaaacaacggatgctggcaaggttgcagagaaaaaagaacgcttttacacagttggtgggagtataaattagttcaactattgtggaagagagtgtggcagttcatcaaaaatctagaggcagaaataccactcaatccagcaattccattactgggtagatacccgaaggtatataaa

SEQ ID NO: 63371 - DNA, 1265 bp, Homo sapiens
aagggaaggaagggagggagggaagggaaggaaagggaagggagggagggagggaggaaaggaaggaaggaaggaaggaaagaaaaaaaatcaaatttactgtttattaagaaaatttggtctgggtgcagtggctcatgcctgtaatcccagcactgtgggaggctgaggcaggcaagtcacttgaacccaggggttcgagaccagcctggtcaaaatggtgaaaccccatctctacaaaaaacagacaaaaattagctgggtgtggtggcatgtgcctgcagtcccagctactacagtggctgcagtgggaggtcactggaatctgggaggtggaagagttagagattgcagtgtgccaagattgtgccactgcactccagcctgggctaaagagtgagaccctgtctccaaaacaaaaaaggaaagaaaataaaataaaaatttttaaagatcaaacaacaaaaataaataaaaaccacttgccaggaccctaggggggcttatttgccatctagtcctagtactcgagatcatttaaaattctctctctcctgcttctcactcacttactcattcaaacaaacaaacaaaaagcgcttgccactcatttagctcaacagctctttattgaaccacaaggtacaaagttccattttgggtgctgtgcagtttacagaactttaatcgcaattaaggaggcctgagcctacaggccaagagggcttgtgtgcacagggtcacctaacagctatgactataggtcaggagagtggccaacccaaggcaccctgcagaagggaagctggggacataagcacccaacctcactctcctccctgcctctggtctctcccaggtatacaactggccaaacccagcttgaaactagtaggtatataagcctttggtgttgcccatttaagtcaggctccaaacacacagagcaggatggagagtggatacagaagacatgtagcaccacccacatggatcggactcttggttttttatttatttgtttatattattttttaatagagatggggtcgcactatgttacccaggctgctctcgaactcctgggctcaagagatcttcctgcctcagcctcccaaagtgctgggattacaggcatgagccactgggcccggccagtttgttttttgaaatcaggtctcactctgttgcctggatggagtgcagtggagcgatcatgcatggctcactgcagcctcaaccttctgggctcaagccatcctcct

SEQ ID NO: 63372 - DNA, 5412 bp, Homo sapiens
gcagcacaccaacatggcacatgtatacatatgtaacaaacctgcacattgtgcacctgtaccctacaacttaaaagtataaatatatatatatatatatatatatatatatatatatatatataatgagtaccttgcctatcctgttccatatataaagcacagcgtccagcacatagtaggtgcttagtaaacagtagtgaggtgttcagggcatgtgccttggaataagataatccagattcacgttctgggtacattacttgctaactcctctacctagggcaagttacttaaacatcgcaagtctcagtttcttcgctgagaaagtggggagagtaacagtgcctactttgtaggattactgtgaagattaaactaaattgtcaatctaaaatccttagtgcatgagccaggtatggcagcttgtgtctataatcccagctacttaggaggttggggtgggagaaatgcttgatgctaggagttctagaccagcctgagcaacataaaaaaaaaaaaaaacaataaaccccatctcttaaaaaaaaaagaaattaaaatttaaaaattagccaggcatggtggcacatgcctgcagtcccagctacttgggagtctgaggtgggaagatcccttgagctcgaatttgtggctgcaatgaacaatgatcacctggatgacagaacaagaccccatctcttaaagaaaactgttagtgtctaacacgttataaatattttattattgttatttacatacttcagcctaccaaaactcctgttttccatggagaaaacagatctgttgataactctgcagtttccagaaacactgtgattagcagaatgagaaaaatgccaggagaactcagaagagaaagtcactaggaagacttaatctcatcaggtgatgccagaatccagaggttgtaatctaggactttgcccaggcatgctttggggcacagtggtggggagggagctgttgcaaagatggggcaagaatggtctggacatgactcagacactttaaagtgaaagaatgggaaattgtctggcagctggtacttaccatgggcagtcagcactcctctgactgattcaccttcaccagggcaccagcctgcagtgaagtagctggggctggttccttttagtgacacccaccaccccttgcccttccaggtattgtccacagatgacacctcctcctcctcctcctgctcctcctcctgctctgcctcctcctcctccccctgctcctgcttctcctcctcttcctcctgctccttctcctcctcctcctgctcctcctcctgctcttcctcctcctcctgctcttcctcctcctcctcctgcttctcctcctcttcttcctcctgctctttctcctcctcttcctgctcctcctctccttctgctcctcctgcttctcctcctcctgctcctcctcctccacctgctcctcctccttctcctcctcctgctcctcctccttctgctccttcttctcctgctcctcttcctcctgctcctgcttctcctcctttctcctgctcctcctcctcctgctcctcctcctgctcctcatcctccttctcctcctgctcctccttgtcctcctctgcccttgatattcactttgaccagattacaccagtacagagagtccaaaggttaaataggcacacactcacacacaaactcacactgggctagaacaatgacagagcgtcctgggggagcagagtgggggccggggggagggggaaaggaggattgcaggcctaactttcacaaatcacctgaaatttccactgaaggcattatctccaaatgttgccacagagataaactgccaggattacaagaaaacgtgaagacgttcccatagaactctgtaatgcttatatccatcaccaggaatgtctgcccttggcgccctaaacatagattgattgattgattgattgattgattttgaggcagagtctcactctgtcacccaggctggagtgcagtggtgcgatctcagctcactgcaacctcctccttccgggttcaagggattctcccacctcagccttggagtagttgggattacaggctcctgccaccacgcccggctaatttttgtattttttgtagagactgggttttgccatgttggctaggctggtctcaaactcctgacctcaagcgatcctcttgcctcagccttccaaagtgctgggattacaggcgtgagctacggtgcctggccctaaatatagatatttttaataaatcctctacttatctcacaacgagctcaatcgctttgcattagatcgttgggtgtgttaaaagtattcatgtgttacattaaatgtgaattcaacaaaagcagagatttttgtgttttgttcttcattgtatcccttgattgtagaaaagtggcacatagtaggtgctcagttaatcgttgttaaatgaagacataaatgaaatataaaccattaaatgtccaccatatttgtaagcgttttggcatgtcttcattgaaagaataccaggcagctgggagccatagtttactccggtaatcccagtgctttgggaggctgcaggtgagaggatcgcttgagaccaggagttcaagagccaccagggcaacatagagagaccttgtctctacaaaaacaaaacaaaacaaaacaaaaaacaaaaaacacaattcccttaagccgccccttccccttccactgctcagagaaggccttccagcagagcagagcacgaggtcgctggcacacacccatcctccaccagtcctggcctctgtagagcaagccagcagagcaggctgtttctctcattcagggacggtttagggggtggcaggaaaaaatggttgctgataggcgaagggcctccctgggttggagagaaccccagcctcggatggtcccagcacatttaaaagagaagcagtgccaaaggtggggtgcactgaaagctgctggatgaagggaaagatccttgtgctcagcccggaaaaccggaggatggataccaggccgaggggtccctccgtgccccaagagaaagttcaccaagtttagatcccagtgccccgcagcgggtgaaggtggtcccgccccaggccggatctggccacagggctggcggcgcgctggaaaaccgcccacgtgggaagaagccctggctgcatttccgccctggactgcgctcccgcctgccagcgcggtccctgcgcagccgccccgcgcccactaggtggcgcctgcgctctagtgggcgcttcacaggcgcagcgacagcgacagcgacagctcgaacctgagtcccaggattccggggactggagggcagcgccggcagccaaggtaggattcctgagccccgggcgtctccctggagcctctgaggtcggggtggacagcggggcggccgctgggcaccgcttgcggtctgcagagataaccggaggagtcggggcggcagcacgtgttgtagccgtgggggggacccagagacccgcagcctcggagctgggcctagagcaaggcagagcaccaggtcgctggcacgctcgcatcctccccagccctcgcctcccagagcatgcccgaatccccaagccgggcgtcctcgaagcggaaagcagccactgtcgcccagagccactccagggtggcagccgagtgctgataaggtccagagcaccacttcttaaacttgtctgcccgttggcgttgcttgggaagcattaaaaaaataccgatgccctagttccacccccgcccccccccagagactcagatgtgattggtctgggtgggggactggacatctgggtattaaaatgtttgcaagagattccagctggcagccaaatttgaggacccttgatctaaggagttggagaaaaacggaggacatttgtttgttctaacccagaatgctgatgattccctcctcctcctattcctccagttcgccctcctcctcctttctcatgtgccttttaagcaggaaatgcctctgcctttgtactgtcaaacccaagataacaaactaaccatcccccaccccccacagtagggctggttctgaaagggttgaactcgaaagtggacaaggaacagaaagacaccagtgtggaatgtgagcgaagactcttaggggtttatgggtaggaagggggttcctccccaccctgatcccagagaagatcaggagactggctggagctgtcttcctcattttggcaaacctagctgattaggcagtgagaggccttataacgagccttttttacaactagtaaaagggcccttttacaactagtaaaaatgagcccttatgtttgtttgttttatagagatagggcctcactatattccccaggatggtctcaaactcctaggctcaagccattctccagcctcggcctcccaaagtgctgggattataggcatgagccgctgcgccccgctgaccccttatgtttatataacagcagtgttactaacatgggcatagattcccccccataggcagcccttcctttgtgaccttggaaactcactgaaccatcctcagcttcagtttttgtatctgcaaaatgggtgtgaaaatcgggttgccttgggaattattcacaataaaagctactgtttactaagggttcaccctatgctagaggctttctgtgcagggccaagttagactcctgaccataacttccacggtagaactatgaatactgcatttgatagccaaggaaactgaggctcagagaggccaatgatcttgctcgaagttatataattaattaataagaagcatgtcccatatttgaacccaggcagtctgctcttgagctcaggtgcaaaagaacaatactctgctgtttcccttgttgaccaggacagcgtgcacggggcaggcgcgtggtgtgtcttcacaaacactagctatcactgctgtgagctgagcacttccactgaattgactcattcgctcattggaaatacatttattattgagagcctactgtgggccaggcagttttccagatgctagagataaaatatgagtaagacagaattcagccagccccgaatgagagaaacaggaagaaagtgcagtagattctcattattcacaagttctaaatttgcaaattcttccctgtaatcccagcactttgagaggctgaggcaggaggatcgcttgaggctaggagtttcagatcagcctgtgcaacagagcaaggccctgtttgcttaaaaattatacacattgaataattcttaaaaaaaatttgtttgtggccaggcatggtggctcatgcatataatcccagtactttgggaagctgaggcagaaagattacttgagg

SEQ ID NO: 63373 - DNA, 615 bp, Homo sapiens
tctggaaatgtctgcaggtaacctcgggtgagctgaggagtatgggtggggcacccatagtgtctccaacaaagtgtttctgactttgctttctaagatgtgcaactcataccacaaggggtcttgtgagatggctttggtgtggcacagagagagacatggtacccaagagcacaaagtctcagaatgggaaagggatttttcccttttgagctgtctctttgatcctgctctgcccgcctctcacccctggggctgccctctctccccagagcaggtgctccacccacgctggcctttcacttcctccaacttgtgggactgggactcttgcttctgactgcagccaacagaagtctgggcaaagtactagaatgctactgtaacacttgattgtctcctctttcattggaaagacagcagtcctccagttcagggcatttaagaggcaacagtaagtgtgaccatttaataacattgttaaaactgtaacaatctaataacattgtttgctgttatgtttatctttacagtttccacctgtacatggcttttcatgtatggtagtaatataacgtttcccttaaaataaatgtatataaatcgtgtgtccat

SEQ ID NO: 63374 - DNA, 1274 bp, Homo sapiens
tttctagtacagcagtttgttattacagttgctcaagaaatatgtgtgctgggaaaataaggagtgtcactctacacctccaagggggagacagtgtttgtctaaacacaggtctttgtctctacaacatgctaccccacccacccctgctgcccaagtaagctgggctttttgagtcattcgtgatgtgtttttgaacacaacgagggggaagagctcccacagtctgttcagttcttgctacaagaaatacaagctgggtttgactgaatgacaaaaagaaatctgttgagccaggaagcgtagtaaataccgtgactctctgcaaatgcgcacagcccaaacagctttttccagtctggaaaaatgaagagatttgtctgtgcaaaaaccagccaagtctccacccctctccctttctactcctccacccccacctcctggctaggccttccaccctgccccagacattcagtcatcagctttcatcctctgtgacttgcattgccccaggaaataacatgcccggctctggggagatacaccagcctctcccaagcatctttcagggatgtctgtctggttgggttttgccagtcatctctgaccttggccagtgctggctcacagcaaagttattcattacgcaaagtgggtctggtgtcttattccttgtttattcccttccttctccttcccactccagtcttcccccttttgctttgaaagaagctttgtcccatccctacttccatcaggcagtgtttagagagaagatttgccaaagatgagattttaaaagcatttgctctcagctagtacagggcatggaggcaggatggaaaatctcccagggactgtcaaaggcaaccagttcaggacagtctttggtggatacagagtttctagatgggagggacttacagggagaatctggttctgcaccttgtcttaaagatacatttgcataacaactatgcagttttctctttgatggtatgttttgggaggtggtagctggcaaagactatggggcaataaagcacccacccaaaccactggagcagtggagacaacacatcaaacctgcagttcattgtattgggaagggcactggaattggaatcagaatttccatgagtttgaaccctggctcctatgagtaggcgtgtcttattcaccactctatccacagtgccaagcacaatcctgccaacagcaggtcagcaggtgctcttttttcccctcaagttgggggtttgccctgttgccca

SEQ ID NO: 63375 - DNA, 1075 bp, Homo sapiens
gttagggttgcaaactgggggtgctcgggtaaacttggactgctagacaggctttgtttggctcataacatcgtcttttgcaatactttttacttaagtcaattcccaaattgggagacttcacgtaaaatccaaatcttcacttattttggaaaaataaaagatctggcaacagagggccacattcgtccataatagcaatcagctagagccagaagtgagtagctgctgcccctttcacagaggacttgctgtctccagtccccaccactctggtcagctgcctttgatcatctttttttttttttttttttttattttttttagagatgaggtcttgctatgttgcctaggctggtcttttaccactggcctcaagcaatgtccacctagagcactgggattacccccagacccagcctgcctttgatcatcttaccccccaggacatttatgttgcctgctgtgcctaaaggcacttgagtttcctgacatctgccttggggaggaccttctatcccctgggctcctggtacatcacacacccttcctccctgcccccattgatgctgatttatccagtattctggggctgggggctgggttctttctgctttcaaggggataagttcccattccataaagacacacaaggccacaggctaaggaacaggcagggacctgttctttgcttcccagataacacacacccgctttagcaataaccttctgggaatcatgcccgtgacttttcttttttctattccattagtgattttcaaagaggaagtttcagtcagataaaaggagcagatggcactgtacgaggcctcctgccgggtaaatattttggaggagccagggcttttctgtgagttgctcctcttgcctggtaagctttgatttcccaggttattgaggtgtgttctcctaaggaaggaatcaggccttacttaaccttgataattaaaatcactgttctcattgcccttccttcataaacaaggaaattggaacagagctaagagaagatttttcatgcagtttaggaaagaatgagcaatggaaaaaggaa

SEQ ID NO: 63376 - DNA, 3020 bp, Homo sapiens
agaaaatgaagttgaatagatactaatggcaaaactgaaggtgcttgctataaatgctttgtaagtcctcaggcacattattgaagatcataaaacaataattcccttctcctatctcatggagcattttttattccttttcaaataagtttcacatatttaatatctttgagcttcataacagtcctatgagacaaacaggagtacaggtattgtcttcccatttttacagatgaggaaatcaaagcacagagcaggtgaggactttgcccatggtcaacatggcaaggtagtgtggactgtgcttagagtcacacagagacacaactggctctgaattccctggcagatccactgggactggaaactaggacatttagggtatgggttaatcaaggcctgccctgggatttggatcacccacccaggttcattcctgagtaaacagtttagactgatggcagttgagtatgtcaaggacccattgttgatgccctggcaggtggcaagggaaagaactggaaggaaagacactggcacacgaggaacaccctcacatgactgatcccctttacaccaggcagctgggtacaagacttggtcttcctcgtcccagaaaaaaatgccaatcaaaaataaaacaaaaagaaggggaggccacgctggttgcagggctggttcctggacttctttcaagggaacttgatcctggagccaagagcatcctttgccaggatgtggagggagagaagaatcccccagtcaaatgaggatggtttggccagagtctcagcatcctcttaagtgttgctgacatctccaaagagtcttccaaaaaccggagtccctcctctgcctccaggttctgaacacattgagaaagaagacaaaggaatggcagggagccaacataccaccttaattaccactaaagctagcatggaggttgcagctgagtgtgagaacaaaatgagcttcctgaccgagcctgggagaaggatggggctgagctgatcattccagagagtcttcccaagtcacccattcagatcagtcattccattattgtggacagtgagagtgaagataaagaggggtgtttaggaaaaatctctccttgtgaaaaccaaaagcaggaaaacatgtgagtgtggcaaggtattaatctctctgcacatcagtcgagatctcttcttcagtataatggggatagtgacagtgagggttctgtgggatcacgtgtatgacggtcctggcatacagtaatcgctcagtaaaggctgtttttgtgtgcagtccaggttcatggcaggtggcctttctttcctccccggcatgaagcccagggccccagagtcctgccgggcttgtgtatcgctctttctctccagctgtaaaaattcatgagaatgtgggtgtgcggtggctttccagtttcttggcttctccccaggctatgttctcccacttgggggcaggggggtggcagacatccttttcacagtggtgagtgccaccccaccccaacccccatgccctgtcccagcagagtctggctcaaagttcaaagccagggtggctttgttgagtaatttggtgacattgcctgcctgcctgcccaccatgctctcacacgcccatttgctaggcatctgctgccctgtgttttgtggtgtggaggatgggaacagctcacccccccccgactgaccgcggtgaggctcagcttccttcctctcccccgcccttgggctctcagtcccacacacagccccactcagtgaggtttcggatctgctcccaggctggttggcgctgactccatctggatccacaccaaccccttcctcctgggggttcagagtgttcttggaaggaagcctgggaagggaaaggccttctccagcattccccatccagtggttggctgacagcatagaactgagctgccaagaacgctggagtcagacagaactgagttcaaatccccgggtgaccttgggcaagctgctctctctgcttcagtttcctcatctgtaaaaaatgtgacagtaacaggatctgcctcctgggatgattgtgaggattcagggagatactaactgtgatgtcctcacccctacatctggcaggtgggaagtgcttaagaaatggtggccctggagccagggatcccctgccttcccatgggtgtactcacagggaggaggcgaacgccgtctccttttgctcatcccacctcccaaattagacccctgccgtagttactctgacatgaccaaactggtttggtttcctgcaaactccttttggacaaggactctgtctcatttgtcttataactcccatgcctagtgtggtcctggcacttacacagcactaaatgtttggaataaataagtggaggataaaggagcaaacgagtgcctggtgggcagcatctgttcaaggactgttttctgaactccaggcagttatttctgtcccttccattttccctctctccttcctccctccctcccttccttctctccttccttccttttgaccttcctcttcagacctcctttccttcttgctaaatggaaagagcttcctcctttccttttcttgtaatatccaagctgcaagagcatcccttgagagcccttcacccagccgagagcagcgattcctctttcaaattgagtctgtcccctgactcattcattaaaatgcatagggcatgtgaccaaactgcataatgagtctctcatgaggaaggcttggaggcagggagatgctgccaactgcaaaggcaaatacttcccccccagctgtggatcaggctcattggctgtcataccctgggaaggctgggggctgcagttcatctccagtaaatcagccaagccctggagagctgcagcctggcgcaggctgtacggtcttggaagctgtgttgctttggagaatccaacccatgacttttctcaaccttcttccacccatttctagtttttcatttatttaaatatact

SEQ ID NO: 63377 - DNA, 1541 bp, Homo sapiens
ctcatcattgcctctcaggcactagggccacccctatgttccatttttaggtggtgagcctctctgaatctgcaaattcatatcactttggtcacaacctattcagctagctatgtggccttaggaaaatcactgacttctctgaatcgcattaactcatctgcagaatgtgaataacaatagtacccccatttattgggttgttgtaaagcttagatgggattatctattacagccctaagcactatgcgtggcacatagccaagatgcaattaatgttagggattatcatcatcatcattatttttactctaatctgtcataacccaattcgctcattcaagaactatttattgagcacctgctatgtgccaggcattgtccttgaccctgagagtagggcagtgaaggagtcatacaaggttcctgccttctaggggcttacattctagtacaaatgtaccacacctttctgtttgataagcactttcttccccattgtgtcatgttgttctcactaatgcctttcaatcaggcaaaggcggtatgattgtccgcattgtacagatagaaagctgaggcttagagaattaagctaacagagatagctagaaagtggccaggtacaacttgatctagggtcctcctggctcgtttctgtgctctctcatgatggacactgatgattgttttggggtgaggggcatggaagcagctctcagagccttgagagctctgacccaccagcagaagcacaaaagagaaccagggactggctttggttcgattgcgagtgtcccagttagttctgtccatgaagtctgtcaatgactgggcctaacaatgtgtgcctctgcccggtgtcagccttgggggcctggaggagactttatcttaaggaaaaagtgcttgcttcagcacatggccagtggggcctggctgtgacagcaggcagctctgctgtggcagctcagctgtctgagagcacttccccttgggttccccgcagagcaggagagaaggtgtctaggcctatgggcttggtgaccaaactgcatggtttctggtagtgtgcctggaactcctgctgtgcaagatttcctatatacacccagcatccgcctagtctgggctgggcggggcagggctgatcctgtctgagaacacaggaactggaagtctgtaccggggcaggtggcaggggcaggcctggcaaagacccagggagaggacaccaagggccagccaccgcacagagagaccagtgactgaacatggctgggccggggtgtttcccagccccgtcacagtgaaaactcacccgtacccggtgaccccaggtgacaattctgaacctgcaacagcagtgcataactgatagtgtcacctctgcctaatcctcctggaaacacacacacaccctgctttatttcccgtctctcaacacccttccttatgggtacttcataccagtcccaagagcaggcttttgtttactttttcttttttttttttttttgagatggagtcttcctctgtcg

SEQ ID NO: 63378 - DNA, 2786 bp, Homo sapiens
tgccccactccagcctgggcaacagagtgagactccgtctcaaaaaaaaaaaaaaaaagaaagaaagaaaagctgggaggcctgagattttgtgtctattatacctaagggatgaaagagtcctgacctggagacccgaaacaatgtttggctgcttttttctttgtctcttgtaaaccaacatcagcaatgagcaggccacctcaagtgtgactcaatcaacgcgaggcaggaggcatgcaaaacaaaacagaaaactcctggcagccttaatatagcgatttttctagcaatctacatgactatccaggcccaatgcaccccattacatatgcaaaacatctgacgtttgtgtaacaagcccttaacccctggctgttattcttatttccaaactggggtgcatcattagataaatgcagaaatcaagaaccgtcgctcctagtcaagcgtctgtggctcagttctcagagccaggccaaaggagtaattatagctttcctctatagtgtacggggcaggaggctgatttaataaaggaagcctactgtctgtctccagcctggctctgactcatggaacgagggagtcccagagcactacccacagagggtgggtggtgagcagctgagggtgggaggtgagggtggccgctagcaaggcctgggcccagagccctgagaatgaggaaactccctgcttggccaggaggaacctgcagctggagccagaggaagtgaggctcagacagagcagctgctgttccagcaacagcagcaactgccgcacccttgaaaggaggcccctgccgtgtggacccgtaaaataaaatgggttagtaattttcatattcagaattgattgggggaaacgatcgaattgcttctaatggggatggccacctttgtgtgctgtaccagggtctttggtttcttttaggggcctgggtcgatggagtctggagtgatgagcgttcggttaatttggtttctcactttggcagctaattaggtcttcacgaccacagagagagttctgagctgggagtggtttcagctacaccgagggggacggcccgctctggaatggatttgtgttccaccttagataggtcaccagaggtcatcttatccttccttctgcctccagctgctttctccttcctcccctgacaatcagccagacagaggcaacctgacctcttcctcctccggactcctccgggcgggagattcggctccaccccttcccttcccgctgagtcacacacctcccagtcaggtgatcctcccctgggcccttccgagagcaccttgacctatattccgttctctccatgacagcagactctaagagtcccgggagagagcccgccaggccagctggcgtggtgccctggcagccccagactgcagaccaggcgccccgggcagcgggagggggtgctcccaccccagaggcctggaaatggaaagttaggaggctggtggctgtgtgcagggcgggggaggaggaggtggggagttgagtcagctgggaaagctgacagccactggcggccgcgtgcttcctcccctccctctctgggctcctcagctccctgccaggccctgaccaagcaggctgcaggggatgaagcggtgaagggcagatgccattgtggctgggtgatactgcagcccacggggagaggtgaggaattgtgcaaataatgggataaacctacatgactcacccggagaatgtgagccgaagaaaacttctcctgccacaaggaccgaattcccattcccaaattatccacaaaatggcccctacttattttgtctatgggttctttgtgcagttgctgcctgtacagtctttgtgtcctctgaatgtgaggagaatagggctgctatgggaaaggaaattaaaagagaagtgatccttgggtatcacacctgtaaaaagcgatattaactgaaaatcactgttccttttgaattagaaagcactctgaatttagactcattcgtctttttttttttttttttccaaaagacagggtcttgctctgttgcccaggctgctggagtaaagtggctgatcatagctcagtgaagcctgggactcctgagctcaagtgatcctcccgcctcagcctcccaagtagttgggactacaggcatgcacaaccatgcccgactaattttttaatttttttgtagggatggagtctcaccatgttgtccaggctggtcttgaactcctgggctcaagcaatccacccaccttggccttggcctttcgaagtgctgggattacaggcgtgagctgccacccccagcttgagtagaatctaccttcacaaacacttagaagctctatgacattggcaagtcactataggcctctgtctccaatctgtaatatggggatttttaataaaaccatcctactactacatcagatggtgtgaacatgaaatcagatgatgtgcataaaacatgttattatatataattatgtgtaactatataatattttctctagatggctatgtcactgccctgtaccatctgaaagggttgttttacttgttcactgtgctcatgatagaagagcctgcctctgggtgtgttcacaagtgtaaatagaaagctgtagcctctggctacattaggatttactgcatctaacaagcagccccacatagcttgtttacacattaccgacagattaggtgtacatcatcttattcctttatatcaagaaaagcaagtttatcataagatggataaaaa

SEQ ID NO: 63379 - DNA, 748 bp, Homo sapiens
acttttctgttttacatctcagggttcttctgccaaaaaagaaaaaaagtctttttcaagaaagaatttcctcactttaaaaatgtttgaaaatctttggattcattgatcagctctagtatacggttattagcagaggtttgcaaattctttgaggcctgtagttcatctgaatgtttagtcttttctccatttgcctcatgtgcttttctgcttacacttaccactagctccaaccccaggctgatgaaatgaacaagtagccaacgaataccatgggaagattctgactcattatccagttcaatagcttgtattggggaattttcttttttgttttggtgaacatatatgttcttatttctgatattatattgttcataggaatgtagtcatatttgctactaaaaaacgttcatatggtttgataccacatttcagcatttcacaatgatctgcaacttccaaatgctctgccactagaacaagtctgaaaatcactcaactggccttaaaaaaattagctataatttgttgacaacttaatatgcgatgactttatatgtatcatctctaagattcagattattatccctgcagagaagatatctttgtctgtgtcttactgataaataaggaaactaagtctaggtgaggttaaaaacttgtcttgaacacacaggattccagcttgtatcagtgccagcatattctcaaccagacaacctctaaatttgcttctcgattt

SEQ ID NO: 63380 - DNA, 3620 bp, Homo sapiens
cgctcaagtttttcatttaagtgggatgtcattctgctgtgatgtcagatagatgagatgttactggccttaaatttgactcaacaagttgaatttgcaaactaaagcactatccaaataagtggtgtggggggccccagagataaactctttctgtgcattcttggtctaatatgtggttgttataagtatccttcagggaatcaaagttggaactgtaaccgccctttcagcagggtttcttcccagccctgtcagtatctcagctaaatagagttatgctgatccactctggagggccttcatggggaatataaagaatgaaattacttggcaaataccactgtgtataccgcagccattccattctggctaggcataaacaagcgcagtgtcgctccttagcggaggctgaaattcaagagatttctgtcaactgtgaacgtgaaatatcacctgcactggatcggaaatggtcaacagttttgaacaaacataaagtaggccgaccgaagttcaaacatttaattcttttgtctagctcacgttttcatatgggttttaaatttttaattcggtagaaagccagctaaggacctgaaaggaggagacccttagaattttagagctggaggacttttggacaacttgtgcagcctcttccttttacagaaggcaaaaccaaggccctaggacacgctaggatttgatgtaggtcactcagttaattcgtgaaggatcgagagggaacccaggttttccagtacgccccctgctcctaaaccagtatcaccctcccccacggctgtctctctctcttcttaaattcttgcgtttatttttctctcccttcgtaactgtgcaatggagaacgggagcctgagcctcgggaagacagggttgcaaccgcaggctaggtgcgcgctctcccctagctcgcggcgtggagctgggtctccgcggcgggcgccggctactgcaggtgctggcacctgggctcaatcgcagcatcatcgcgacacgctccgtgctcccgattctacagcacgggcgcgtgacacccgggtctccgcgcgaaaggagaacgtgggactaaatccacggctccttaagaaggacgtctttggaaactctcgcccttcctcggcggacccgagctgcccgagagatgccctgcatgtgagtgacctctgcgccgaccccgccactggtcagctcgcggctggggcgtgccctgccggggcctgacgtggcggcggggccgcggggcgggcggcgcgaggggagaggccgccgtgagggcgcggcctgacgtggcggccgcggcggggctgccgggggagcccggaccactgcactgccccgcgctccggccagagggcgcccggccccaagccttccccgccccgaggccgcccagggctccgggagtaaccgcgccagcgattgggtcggcggcgcggcggggccatgttggagcggagcaacgaccccgcctcgcaccgccctccgccctgggtcgggccgcgccaggagggaaggggagcggcgaaggggacgctccctcttaggcagcccgacgcggctggagccgcggcaggagcggcggcggtcacgaccgcccctccgcgcccgggccaatcagcggcgcgggcacaaatatgcaaatagcgcgccggtgctgccggagtgccgctcgcaggggctggtggggtcgcgctgggggagtgaactgggccaatcaggcgggtgcgtggcggcgcgggggaggcggtgccccttcactcctccctccactccctccctgccccgcgctgacaggggggcctggccgcgcagccggtaagtgccgccgccgccgccgctgccacccaccgcctcgggcgtggggaggaagcccgggggcaccgcggggcagcggccgctgctcaactggtggggagatgcgggggcgggtcgtgtcagacgggtggtcgcctgaggccgcccccgcccggccagccgcgagtgtcagtctcagtcgaggcggggggcggcgggggcgcctcagtcatggcgaagcgcgagagtcagcgagcggcggtgagtacgtgcagccgccgccgccgccgccgccgctgctcggccggtggggggaggggggaggggcaggcggggcggcgcccccgcctgaggtgagggatccggtcccggggccggggtcgggcgggcgggcccgcggggaggccgggcagggggcgctgcctgcacgtgcggcccagcccgcccgcggcccgccccgcgcctgtcatggctgcgggctgctgcccccgccccccggcccacagcccccggggtcgggacacggcagccgcgcctgttgcgtcgtgtggaggtgagggccgggcggccagggcgtgggaaggcgggccctcttccccgtcccgcgcgaggtcggggcctcccccgggttgggttccctcccgacggtcgggcttccctccatcctgcagcctctttccctgcccgtgctttctcgcctccgtgagtcatgacagggcgtcccgcgcgggcacccgacgtcccggagcacgggacgtccccggcgctttcccaggccttgcctctcggttccgaccgcagtgccttccccgcgatccttcaccccgagtgcctctccccgtctgcagcgtggcccggaccccgccagcccccgtgtgtgcggccgccgtcattttctgggtacctgggtgtgggacctgcgggatggctccagggctctctgcgtggacatccagcccaaagccaagcactacccggaaagcccgggtgtctcactggctgtcacagctgccagctcagactggtttctgtttgttcttatttttatttttaaaaaaaattttttttggggggggtggtttgcttttttttcttttttaagaaaaataaaacttttcagaacaaagtagatgagaattttgttgttgttgttgtgatattaacagtgctacagttactttcctgaaagtctgggatttgacgctattgtgacatttatttatgtgaaatattcatacctaagaattcccctgtattaaataaagtttattttcattaataaaattaccgtcagaatttagtttctcaattttgtatgctacttttcaccttttccttttttccagttcttaaaatctccagttctacttaaccagctatgatcttaaacgaaaagaaggcttatcttgtgtaatgttacccattccctagactctagataactgtagaagtagttttaaaagaaccactaggtctgcaaacacttgaatatacaaaagctgaacttaaaggaggattctgcattgcagagggaggagtttgtttttgttttttgcaatgcaaaaggatgatcatagtgtttcttttcccttgggtttacagaacgtgaatttagagatgctgtgttgtaacaacaggccacatggagccttacgttcgatatttgataagtattaaataaaagacttctattgctcgaagcaagttctgtctgtattatgtatcttcgaagactttccatttcttctaattctgctttttttttttttttttttttttttttggtgttgagacggagt

SEQ ID NO: 63381 - DNA, 2606 bp, Homo sapiens
caagggcagctcggaagtgagaagcgtggagtcatttaggtcagatcccttgcactgtcataactttctcactgttaggatttttgcaaaggcagtttcgtgaacgtacagagacaggcccttgctattatccctattttttagataaggatatccaggcgatgaggaagttttacttctgggaacagcctggatacgaaaccttcacacgtcagtgtcttttggacattttctcgtcagtacagccctgttgaatgttctcacggtggggaggtacgtgtttaaaatgcggggaaggtgcttttatttcacccctggtgaaactaggggagctaatttttttaaacatgatttttggcccccttgaaccgccggcctggactacgtttcccagcagcccgtgctcaagactacgggtgcctgcaggcggtcagcgtcgtttgcggcggcgcaggcgcggtgcgggcggcggacgggcgggcgcttcgccgtttgaatggctgcgggcccgggccctcacctcacctgaggtccggccgcccaggggtgcgctatgccgtcgggaggtgaccagtcgccaccgcccccgcctccccctccggcggcggcagcctcggatgaggaggaggaggacgacggcgaggcggaagacgccgcgccgcctgccgagtcgcccacccctcagatccagcagcggttcgacgagctgtgcagccgcctcaacatggacgaggcggcgcgggccgaggcctgggacagctaccgcagcatgagcgaaagctacacgctggaggtgcgctcgcgggcggaggggcgcttccggcctagttggcgtgaaccggtgccttccgagccgcgtcgcgcgcctcgagagactctcgggcgggttgcgggctcccagccccgagaggggtggggacttcctctgcgctattccgaggctcttagccgctccgagggctaacccgctctcgccgcgctttcctgcggcttccgaatggggaacgcgtcttgccctaaagtagcacagcaaggctgagatcgcgctggggtcccgttgaggaaaatgggtgtgtgtggcccatctgaccccccgcccgccttgttagtagaatgaactagtgtcgttgtcaagaccacacggacaaggggaggggacttgcccttatttgcaccgcgattaaccgggttgtggcacctgggtctccaggcgtctccgtctgttcgcttccccctgttaaccaaattgcctttgccctggcgttgcgggcgtttgagtcaacgtgctgatgcgttttgggctgtgtttacgtctgtgtaaacaaattaatactcatttccccccaggccagatgaaatgagccctccgccgacccggatgtagacacatgcccccatttgtcactaggatcaggactgtggctacctcgagggctttttggtcaccccgggcattgcacaggactcctgttgttgttgcgatccgggtgtgttaggtcgcagccttcggacagggcttgcagatgagaaaaatggccattctagccagtgagtgtcagctttgtatgcacctccccttcatgggccaatgggaagtgacacggaagtacggattgtttatcagctgtttgactgtgtgtgtggcatttaaacctgaggccatttgatttctcaagtcgttttataattaatttgtagaaagagtcgggcaaataggtccaggatgcaaagcctaaccaaggtattatttaaatatgatgtttttggctatgtgtactgatgagtgaggttatttttaatttgtatttgcattaatagaattttaattcaattactagttccctctttgaattgttaggtctgcagaagatagtgtatggtggctttagaacccgacagacctgaaaccgctggaaaagttcagtatggtgatctctaaactggagatatttgtgtttacctcacagagctgttctgaagattaaataaggcaataatgtagtttctggcacataaagcacccatatggacagtgttttcaagtttactaagctctttgtatatttacatgatctggctgagtaagctatgttcctattcatctctcagtgcctttctgtagtctggcaaagagaaggactggttggctttttatgttgttttttgttttttgggtttttttttggtaaatggccttaaaggcttccaaacaagctcttattttaccctcaagataatcctgtaaatcagatagaacaagcattatcgccatttatttgaggtatttcaactcatagcagttaagttgtatgaagtctagtgatacatgagcaagtatcacgtaatagctggttagtaaattatttttgaaaacatgtttgattactcaattcttttgattactgagactttagtttcagcttcttagcccagtttattcagtaaatgatttactcagtaaaatattcatcaaatatttcttgagcacctattacttgctacacattgttctaggtgctggatatagagcagcaaacctgctcttgtggggcttacagtgaggtacgctgtgacaatatgggatgtcattctcatgggagtgcaag

SEQ ID NO: 63382 - DNA, 699 bp, Homo sapiens
atataaagagaagacaaacctgaagcaagaccaaagcattagagaaactctttcatatagggaaactcatcctataaggatgatacaatcagtgtgtacaggattaactgaaacacagaaagaaatgttttttcctagtggccccaaaaagagggcaaggggttactaagcaattagacaactgtacaaggctagaaaagtcccccagcacttacatgctacagaaggttaggtgctaagaagctcaaaataatgtggatgactgaaatcagtcactgcctgttagcacttaggttagaaacaaagaatgaagctattctctcacttgcctgggtctgattttgatttgtccctactgggtatgtttcaacatttcaaatatcaccagcataaactgtcatccttcgtcaaagacaaaggtcgacatgagtcagagactaaactaccatctcataggtacttccttggcgcaagtacaaccaaacgctgtttaattagctatataaaaacatgtatatcatatgcattgctccagtgatgggggcatctaaaggccctgaattcagcacaatgcaatatgccaatgtagcaaaactaaacttgtaccccattactatgtacaagtaaggaagagatgtcatgtatatagaaaaaaagtaatagtggtgtttgttctcctagaggtgagattatagtttt

SEQ ID NO: 63383 - DNA, 3031 bp, Homo sapiens
ccagcagcaacataatcacgagaaactgtagcacacttttcagggtctagtctaggacaagcacagcatacatgttctgagaggaatgacatagatggaagcaagacatgttacatccttgtcacttggaaacaattttagaatttctgcctgtttggccacggctgcattcctttacatcacccagctgagaagtctgggtcttcagcctgcgcgaatgacagtgcgtggcagagctaaaactaggctaaaacatgagtgctgctgttactctacatgccacagcgcactcacatcaccccgaatcggacttaagaaattacacgttaagaggagacagagcaggggccagaaaaaaaaagatgaaaacggcccgggccaggctcgctggggacagccgggacccgcggcggcctcggaccggcaccctcaccgcgggcggaaacccgtctctgagcactcagggaatctggacaaacctgtctcgaggtgatgcaaggcgggggccctgtcctggcctcgcagctagctcgatgctggcccgggagccgcgggcccctccagtgggggggctctggggcccggcgacgcccccttaaccagagctcggggtcgggacccggccggggagggcgggcacgggccggggcgagccagctgggcccccctctccctcgggccgggccagcccagctccagccgcagtccccagcagcagtcccgggctgcgaggcggccagcgcagcaggtgcctgcaaacgcgcacaggtgcccggccccgcctccgtgtcccactgcggccgccgtcgccgagtcgcgagcgcctagaaagatggacaaatgccgggcccgtggaggctggcggccagatttacagacacctcagccctcgcgtacccaccagcctgccgggcagtaagcctcaccccagtgccttcaatgcagagctcctggctgccaagcgccgccgcggcccgacagcatctcccgccgcagcgccagccctgcccctgcttgatccccgccccgccccaccccgccctgccctgccctgccctgccctcggcagcgggctccgccccctgctgcacgatcctggggcccgaggcttccgcctggcctcccggcgccaactggctctcacacctgcccgtcaaagacgttcttccgggggcgttgggaagaacacactcggtcctgcaaatcaaatcaccccggtttgggtgggactgcacttgaccctccccttacgtaacagcgcctgggacggcctgtcagtcatggaagtatcggccccccggggagggatggggcagagacaaacaagcgccgggtcacaattggccagggcgtctgccagtcaccacggagaccttcccggaggtttattcgcacagcccacagcgcaaccgccatgcgcaggggctggggcatacgctaacgtctgcaagccaagcttttggggagggccgggccgcgcgactgcccagtggctcccatcgctaggtcctactgcgttgggcggcgctgcgaggcccgaggccgccacgtcgggcccacagggtaccaggggtcagaaggacacttggcgtggcatcaagaaacgcccgttctctccatcagtgcaggagctgaaggctggagctgaagggagctcagctccaagtgggccctgggcactagagcagccagaggagctttgtaaatctgtgtgtgtcggccccgacctgcagcatccgagtgggggccgggggctggggggaggggggaggctgaggaccaggaatccacatctgtcacagttcgctgctgattctggcgcacactgaagttggagaacctctcccatagcaacatagttcctggtctttttttttttttttttttttaattcacacgctctcatttggacctcccgtctgctttcccatggaggtctctctctggcctaattctgtgactgctgccagctgctttccaggcctgttcttaccaacggtgcctccccgtggttagtccgtccaatctcggcactccacttccacacttgcgcgacagccctctccccgcaagcccctgccccttttctagacaccagaggcactgacctgtctgtgacaccgcctcagtgtcttacactcagaagccgcattctctggccgggttgtttggtccatttttggttgcctctgagattctggtaagtgacttattaaagggcaggaagccaaattctcctgatgttaatcccaagggttggttctgaaacccagcttcctcccctagctgaaaacacttctgagccacttccttttgtccccttaggacacatttaggaatgttatcatgccttttaatacgagtcttaatacagaaaggcaggcaagcaggaaatccttttttcaggccacaggtggtctcctttggcacctctgtggcccatttcctcccaatcttctttgaagctcattatcctctgcaaagctttttttctgctttcctcctttccccaaccttcagttttcaccgaggacccacataggtatttctccagctcacatctatccactgagcttccaatgcatgtcatcaactgcgtacttggcaccggatgactcagacgcacaccagcatcagactgcacatggcaggaaagccaactcaaaccggcttacttagcaaggggatttctctcccatgggaggattgtctccagaggtggtgccctggtcttcaggctctgctttccttgcagtccctggaattgcactttcaggctggtagcaagatggccgcggcacacccaggatctcacaaaattaaaagtatccctttcttccagtggtcccttttgaaatacatgactacctttcccagaagctccgcagaagaaatgcctgcaggtttcaatggccagaagtaagtctctggccacaacgaaacccagtcaacggcaagtggaaggagtccgccatgatcgacttgggctgagattttccctagatctctgcctggactttaggcagaggag

SEQ ID NO: 63384 - DNA, 3019 bp, Homo sapiens
aaactcctgggctcaagcaatcctcctgccacagccttctgagtagctgggaccacaggtgtgtaccactacctcacccagctaatttttttctttttttttttttttttgtagagatgggggctttaccatgttgcccaggttggtttcaaactccaggcctcaagccatcttcctgtattggcctcccaaagtgctggggttacagatgtgagccatcgcgcctggctggagccactgatttagtaagaattgcatcctaatggttttgcatgaaccaacgattaaaaacagaaatgtagtctgctaagaaaagttatctgaatatctggaactgtacaataatgagcaaataatgaggcttccaggagagtattagggtcattcctacttcccacttataagactgacttcctgtcaataactttgttattatgaatgtcgagtccataacagacttattctcgtggcccttgctgcctacttcatgctagccaagtcgaatccagttttaaaatacgccggatgcagtgcaggagacactaagtggcgaactgcggttgccgtgctgctgaaatttagtgagggaagccccggcccgggtgggtggttacgcattccgcacccggtattgccgcatccgacctctggccaagtcaggcctcaggtccctgataactggtgtgccctaaactcgctctgcagaacgtccttttttttttttttcctctaatgtgacaaggtacaaaacattccctaatgtgcccgagaagaggaaataaagactgctggaaagaatgctaaagccaggcacacagctttttcctctgggaatgtgaataacacagcaaacgtgaccgcagagaggcagtggctgtacatcctactgggctcgcatgagtgtcatttgtatttttctcagtcacaggcggcggcttctcttgacaccatttagatggccctttcagaagacacttagcgggtcaactttcccttgttctaactcagctccagcctgggaagatgctgggtgcggttgaggaatccacgggttagggaactccgcctggcgggtgcttgagtgccctctggtgggcaataggaagaatgcaagtagcaaagccgaaattatcttctcaagttgctcatacagattttaaacaaactccttcccttaaaagaaaaagaaatcctaagtctacattggcattcctaaaaatcattcctaaaagttttatattttccttaaccaaagggttgaatagtctcaagcagggtagcatctccaccaaaggtttgagtacatggagatgaggggtggattcaaggaaaacatttttactgagccttccacctaagacgccttaaagatcctgtaagaagccattccgcagggttgccacacctgaggaaattcagacctttagcccccagaatctccccatctacaactacatctctccctccacatcaaaagcaaaccttggaatcttcattccctaaatataaatgactgagtttaatccttccgcatacgttaggacttaaagccctgcattaaagagatcaatcaataatggtggagtttccagtactggcccagggcataatgacaaattctctcctccatcacagatggtccgaggaaatgaggggatggtgaagggactggggagaggctaggggctgtgagaagcggggatcactacacccctccccgaggctccacgcttacactatgtaggagcatggtaacatggcctaggttgaaggccagccccaaatttgcccacgcaattaaggatgaggtatgtaaatggggacacagcatctctgagcaaggtgtgtttaggtggaaatcaggggtggaggtgtcactggggaggtgcaacattcctagtgacacaagtcactgaggaaccaggccatcacccaagggtcatgtgacccagcttctcaggacaaatatttatttagtcactgaccaaatagagccactgggctgtcagtattagtggagtcaggcaggaaaacagatgaagccaggtggtgagccctctggggccaaagagagtgtgggagagctccctcagcccccaaccaccacctgtccatatcctcatgatgggccccggtgcttcctggggtgcctctaccttaagtcacatggcatggggcatggtaggtgaccccgtttagcctctgcttatcttcccttctgtaacagccacagccacccgtgtcggaggcagcccttctagaaatgtgagctgattagagagtgtgccgctattgcttcctgaccagaaatatcgctctccagcaaagggcaaggtcacacatggacagagggcagcagggggagcaaaggttacaccacaaaacaggcaacccccaaatcgttcccacacctccactgctactaccctggtttgagcaaccgtgccctatgccccttggcctgggtgagggtgccagactccttgctgggctctgcctcccctccatccttctcatctgccctcagcgtggccagcagtgtgaccacgctgaacctgggtcaggtcaggtcactttctgcttagacccctctggaggttccccatctcacatggacaaaaagcctatggggggccaggcacagtggctcacgcctgtaatctcagcactttgggaggccaagatgggaggatcacttgaggccaggagttcgagaccagcctgggcaacatagtgatactctacaaaagaataaaaaattagccaggactggtggcacatgcctgtagtcccagttgaggtgggaggatcacctgagcccacggaggttgaggctgcagtgagctctggttgtgccacttgcactccagcctgagtgacagaacaagaccctgtctcaaaaacaaaaaacaaaaaacaaaaaacccaacaaaacaaacacaaacgccccccaaaacaaaatataaaaacctatattaggtccattttcacactgctgttgaagacataaccaaaactg

SEQ ID NO: 63385 - DNA, 982 bp, Homo sapiens
agggcaaatgagcaaactgtgttagggacctacaacttgcaggatctggatagagatggcaattagcagcatcaactctcaccttcatggctgggatataacatttcaaattggtcctggacgtggggataaagggcggcctgtgattcaggcctgaggatgtggaggtgtcttgggctgggctgctttcacgccagcagaactccagggccaactccagggccttctccaggcggcagagcggaccctaggaccccggcccgcgctgcagtggggagggtcagcaacctccacccaccctcatcctcccccatcctcccgggtactcaccgtgccactggccctgcagctagctaccgttgctatagcgccgacagcgtggcgggcggctggccgagaggagcacgggagaaacatggcaggctcccgtagcctcctgggaaatgtagttctccttggactctagcctgtttgctcgcggggtagcggactacgctcttccagctgtcggacctgggaaattctcctgtgctaaatcccgtggcgctcgcgggtgtcgccgcggtgcatcctgggagttgtagttttttctactcagagggagaatagctccagacgggagcaggacgctgagagaactacatgcaggaggcggggtccagggcgagggatctacgcagcttgcggtggcgaaggcggctttagtggcagcatgaagcgcaccccgactgccgaggaacgagagcgcgaagctaaggtatgtcgggctcccggggcctggagatcttcgtgcgctgtgagcaaggatcagggaaccggaagggcttggtttgatggcgagcggatgcgcggtgttaaactaagggatgacagggccttgtcagcaagggacctggagatattagaggggatgttacaaattcgtgctcttcaggatgcaggccgagtcttgttggatcggctcaaaaatgagaagcaagat

SEQ ID NO: 63386 - DNA, 723 bp, Homo sapiens
gtattactttatttttatatgtgttatatgtgattcttttaatgccttctcagcctgttgctcagagattagtgggaaggaataaatgtaacaagtagactttgggggtaatactgataagttaaaaatgtcattggtttatagcttcaagggtattttactgaaattgcaaatgttctattatatttagaaagagaaggaatggaaacctgactagtcattatactgaggttgggaaatctggaacttgagttctgaatcagttttctgtagatagcctgtttcacagtggatttgcttaatgttttaccggtaaacaggcactcctgtttattttcagctcttgcctttcagcacaggatagctacaattgttcagagtatgcctctcttgtataaataacaatactgtcattttctctaaagtcatcctttttattaaagaaaccctttaatagtcccacatattctgtagttatgcatttctgtgagtgcttactgaccccagcacagtgtttaataaattattgaactttgaagaacctttgagaagcaagggctttatgtgactgagcagcagacatgaaaaaacgttatcctccagagtatctaacagacagaaatagaggcttgatcagacaatataagcaccgagtgaatgatggtaataccatgaaatatttacacccatagagcatgcgagggtggggaggagagtgtgggt

SEQ ID NO: 63387 - DNA, 1219 bp, Homo sapiens
ataacaaacatccttccactgtgctcctgtccttctcaaaagctttctgaggctcctcattacatgcaggatagaatccagactccttagcttgactttcaggaccttccataatcagggtgcaatctatcattccaggcttatctttcattttccccctgctggaactgaattttagccaaaaggtctaatcactgatgtcagagtgtcttgtcctttactaacttttcagctctgctatccttttgcctgcttttaatagtctgttttctttctcatttgtttattcctttgatcacttaggcacagagtttttttctcctttcttcatacttatagcatggtttactaaggcattttaattttattacctatatcgttagttttctttttatgactatatactctccgctcctttttatgtcgacaatgtaaatatttgttgtggattgatttgttgatttttcatggtttagacatctacttgcttgggaaaaaggggatggtggagggtcaatctgggggctgaagcggtactctagctgtgtgattttgtctttttgattactactgaaattaactatttgctttgagcaaactaatgctgagttttgtggatttagtgtttgaaaagggccctgagagggaaaaccctggagttgagctccttatccccgtttgccaggctggatgagctccatgtccataccactgcattgcagtttgctgaagtgtgtgttgtgaaatagcaatggaatttgtctgtggtttcttgccagcgaggaggaggaagaaggattctgagtaaatcagacatgtaaattagtaaggcccatgggccttaagcgaattacacaataaagcccaaagaaattcactttggcttctttctgctttttgtgtgtgtgagaaggcagctattatgtgtttgctttaggccagaggttcacaaattttttggcttcagaacccttttatactcctaaaaattgttgaggactcaaaaagcttttgtttatatgggttaaacctatcaatatttactgtactgggaactaaaacaggaacttttaaaagcctttattgatttaaaaatagcaaaaccccttcattacaagttaatgtaacattttttatgaaaaataactcttttccaatgtaaaaaattagcaagaagtgtgccattgttttacttttctgcacatctctttactgtcta

SEQ ID NO: 63388 - DNA, 729 bp, Homo sapiens
agaacagtgcttagcacatagtaggcattcactaaatctttgctgattattaaaatctgagatataattatccctatttttccaattgagtaatcagggttcagagaggtaaagtaacttacccaaggctacgcagctactaaatgctagtagttcctggtatttgtactgaatgctgattacaaagaccatgttctttctgttatgccacaatacataagtggatctttatttcagattctgtcatttatagcagatgattttcaggttgcctttttatgtaaatgtaacatgactcatgaaatgtaaacagccatttgtgtgaacatgaaaggtcagagccaagagttaggccacaggcaagttaggaaagtgagatatagcacacccaccacattcagtggtggaagaaaagttacctgattcctgccttggagatgtgtagggtagtgaccttggggttgggctgcctgaggaggttcctatgctttgatttctgaatggacaggatccctaaagtcatcgaccctagtttgggctcttgtacttcttctatcatcttattctagttggtggaggcagaggttgaaaaatcaaaatgttggctccttcagcctctaaaaagtaataggcttgaatttgcttttgtcactaacatgattatggtgcttggtctgtgggggcttcactgatgcattctttttaacagccctgtttgtttgtttgttt

SEQ ID NO: 63389 - DNA, 1712 bp, Homo sapiens
gatatcactgtttctgttttccaatggggataactaaaatatggaaactcaatccttaatggatccctgacaatctcaatgacaatccatagtggtatgccacatgactcttctctttgtcactttcaattcatggtcaacacctcagataggcattttgagaagcagggcagtcctaccacacttacctagtaaagtcattttttcacattcagacttgactcattcatttttcttctgcatacttcctcccactttctgcatgtcttctataatatctcctgcactctgcctcattcagaacaggctagattatgctatagtaactgataactctcaaatctcagtggctccacacaataatatttcttgtccattttatgtatcatttgtgggttggcacagagtcactacccattaaagtagctcagagatccaagcagccaccagctggttgctgtggcagaggggtgcagagtatgctggagggtcttgcagtgacaatgacatgttccaggctggaagggatggccatcatttttcactggacagaagtaatcccatgtttcatccatcctgaggggaccaggaagtgtaattttacactgggcccaaaaagctgggtggcagaggaggaatccagaactatttggcaaacagctctaatgaccagcatacattcttagctagtgattcaccttaacttcattgagaaagtcagagcattctctaactaccacccctccaaaagaaaccctagaacgtactcatctgcctactattattacatttatcatcctatctgaattcataccttctttttccttctagcctattccaatataagaagtatcttctctcctatccacatatttttgatcacatactcttatcagtagataagcacatacagtgacatcctagaaagtgtttaacaagtggcctgtagggggaaagaaccagccttgatttttagtgttttttgatttccgcagtgtaaatactctcactgtggacagtttcaagccaccgtcacggtgttactgaatgtgcagttggaaagagatgcacacagtgggctctcatgagccagtgtggactgactccagcacaccaccagtagtgtgctggtggtagtactcatgtactcgtgtctgttttataataatattcatattaaacctatttgtgtgtatatgtgtgtgtgtatatatatatatgcatacatattttaataatgcttgagttctttcattttatattaaaaataaagcagttctacctctcccctgtgccccaccactcttccagatggccttacaaagccttgcatacctgacttgggggctactgctctagacactcaaggtctcgacttctttggttattcactctctctgcatcgtcagcctctttctcttgtatcattctcatgagtgtactgagaaactctggtgttctctagcgtcttccatcattagagattgtcccttagtctagccttcttctttatcaaaagctccatttttctactccccttcatagcagaaccattcagagacatctctacatgccatctcacttcctcctctttcattccatcttcgcctactccaatctgactttcacccccagcactctactgagattgctcgtgtcattgccatcagtgattttcatgctgccaaatctactggatcatctgtcttcat

SEQ ID NO: 63390 - DNA, 2154 bp, Homo sapiens
cactgtatgattttattttataaaaccaattccctctggacaacctgagtgctacccacaggtagatgaccagaaaaaatagctgcaaactggtgaaaaggcctcagcttcatttaagcaattattctgggtactgggacagccttgaagctaacaacagtttatttgccgagattaatttatttgtcagtaatattgattgtcgggggcctgtttcattctacttaagattccacaaggcacagacagcagcaactcgtgcgttatttttccctctagaatttccaggacgtcgaggagacgctgtgcagcaagttctgtcaaactagatcttgccaggctgatccccagggcaaggtgcgtgggttctgtttacattttgccaaggcagcaaaaaattgtttgtttacacagagggatcttccccccaccctcgctttttctcccccaaagcaggtcacccagcagtctgggcacctagtatgcatagagaagctgatagagcattctgtgacttaaccctgaaatcattatgcaggattatccaaatattaagcctgctgaaagttgggcttttctggtttcccgttgcacggagattgctcagttatatccaactgtccaggaagtgcctgagcaagagtgtctgcaaagaaaggacagaacagaggagaggtgtggaggagaactcactttcatcagaggatcgactttcaggatggccggggagcccagagcattattgtattacacattgcactgaaatgcgccttgttctgccccccccccaccccgccccctctttctttcttttctttgagtgttttcgaaatgaaagagtttcttcttccaaattgcgctgggaggcaaattcttgaacggtgtaatagaaaatgttagacaatattccttactggagctattgacattttggatagttgtgacactttgatttttctcaaaacatatggatcaagcctggctgcattattggacaggaagtcctgatgaaaggcctgcctttatctttctttttgttcccccctctctgtttgctcatggctttctctctgaatataatcgtggatttcttaagctgtccggggagtcgttattgccttactaaatatttcatggtgcacagcacaccgtacctgccaaatgcctcttatttgttgtcaaaaataaagggttcgtccttcggagggggaaagaaaaaagatagaaggtttcttctattgtttttattttcaagtttctcgtatgcgccaaatgcacagaaacgctggaagcctaggagggtgtgcctttttatttgccggggaaaaggctggccacttatttatttgtggcttatttatttatttgctgcacgcttttttctatgattcccagcacttgtttccttgcagtttcccttcctatttgttcagaagggaaaagttcaaagcggctctgtcagcagagggaaaagctttgctgaatactaaccctccagcgcccgcctgcgctgaccttgagcagcggtaaacggtcccatcgcaaaccggcatgtgtgtttggttaggccaggtcggcaggggtcagggctcacctgaggccagcggtgcggggccgacctgcctgagcgaggagtaatgcatttttaaaagggacattctcgccttcgaatgggcctaatatggtctctgtttaaaaacctgtcagaatcccaagcacacactccataaaatataaataagtacttactgtttgcagatgttgcttgtttttcataatgtttgtatttgaagtttcgaatcctcacttcctgtcagcctccctcgtgcctccccctcctgcgtctctaggaacaagggggaacttcagatggcaatttctcaatgaagacactttctgtcaaatctgtcagcgtccttagcacaattagcattctctttttctttctttttcttctctccctctctctcactctaacacagaggtttatttctcaccacggctttacctgtgccgggggagagccacctctcgtgttagtggcatttgaaagaggcttaagtctcagcgaagtgtgattttctaggccctgaaaagcgatgctttaactcgagaggcctgtgatctgcacacttagatttattggaaagaatt

SEQ ID NO: 63391 - DNA, 1479 bp, Homo sapiens
aagccgtaaactcataccacctctaatatactcagtcacatgaatactttgcttaagccagcttgacttgagttgctgtcacttgcaaccaaaagcatcctgacaaacacatactctggtatcactgaggggcaagtcctactagagagatttcatttcagctgttctgttaagaaacaatttgaattagaatgtgggaatggtgggtgtaggagtgatgagaaggagaccaaggttaatagcaaggaggataatgtcatggagagcgtcccatgcaccaagcactgtgttcatgtttcccagcaactctcagaggtttattatccccactttacaaatagaaaactgaggtccaaagttacttagctcataagaatacagcctaattggcttcagatttatctgatcctaaagtggagcccattgacacctagaccaaaaggttggggttcacatcttaatccttagggcacaaggacctggagactcagagcctaatgttggtcctatggtcttgggttagatgttccataaagttttttgtatccattacctcactttgttctctctgcaacctgtatggactttgaaccatgaaaaattccattccttttagttctgaaaaattttatgcaatagtagttagaagctcttactacaatgcaaattccagttaatatttaggtaatcagactgcctggaatgtgtgaggggaggttggggaggatggggggtggaagtagctatcaaaggaaaacaaactttcctctgtcacaattattgcaagatttgggcctgtcaaagaaaaacaggcctatgtgtgatacaaaaaaggtaagggtctggaataagtgggttttggattatttctgccagttttgtgtctcgatgtgagtaaattttatgtacattcctcccttttctctcctccatcgtcccagctgtccttctgctgggtctcatgcctcatcaaagtgaaaggatctcaaaacctatttcaggaggtactttattaaaacagatggattgggtttctgggttcctctcttgccaaactccgaagaaaaccccaccaaatctttgatcttgcagtgtgtacaggtatatgtgcaattaactcctgtttcccaaactacccaatgaggcaggtactaaaaggagggtcccaaataagagtaacaacaatcccctgccctaagtatgcttctcctggttctgcggactctcgagcctgtcttattgtttctgagacaaggtcttgctctgttgcccaggctggagtgcagtggcatgatcatggctcactgcagccttgatttcctgggtgcaagtgatcgtcctgcctcggccttctgagtagctgggactacagacatgagccaccatgcttagctcattttttagtttttgtagagacagggtcttgctatgttgcccaggctggcctcaaactccttaattcaaatgatccgactgcct

SEQ ID NO: 63392 - DNA, 697 bp, Homo sapiens
aaagttctagaacataattatttgagggtacaaaagcttcttattcttttggggaggtaaaattatatatattttcagcaggacatcctatgccaaaactatgcagcaagaattcactctccgtggccacccttgtgaaaagcattcacagccattcgtattgatcagtttctcttaatttcttcttctcctgtttgtgtctgcttggggtgtgtgtgtgcacgcactcatgcacactcatgtctgcatttttaaacagcttgtttgtgtattggccaatgtggcacatctagtgactttcccaggatagaattaacatattatgcaattcacccatttaaagtgtacaagttgtgcaaccatcagcacagtcaatattagaacattttcatcactctaaaaagaaactctgtacccattagcagtcgccctcatttcctcccagtccctgtgaccctaggcaaccactaatctttctgtctctgtggatttgcctattctggacatttcacataaacagcatcatataacatgtgatcttttgcaactggcttctttcatttagcatggtttcagagttcactcatgctggagtatggattggtgcttcattcctttttatggttaaatagcattccactggatggctataccaacattgcttatctattcatcagttgataaacatatgggttgt

SEQ ID NO: 63393 - DNA, 435 bp, Homo sapiens
ttttcctcttataaaactgaaactctgtattcattaaacaataactccctgtccccatttcccccaggccctggcagacatcatgccactttctgtcttcatgaatttgactactctaggtaactcatgtaagtggaatttatttagtatttgtcctttagtaactgactgctttcactaaatacaacagtcatataatttaaaaaaccattagatattgaatccacctggaatttatttgtgtgtgtatgtgtgtgtgtgtgtgtgtgtgtgtatagtgtaggtaataatttaattttagccctcctgacaaatgattaaccagtttcccctgtattgtttattaaagagacagtgtttgtcacaatcctttaatatccaccggtatcatactcagtgttccacaggtaaatgcctcatgtttgggagcctctt

SEQ ID NO: 63394 - DNA, 696 bp, Homo sapiens
tctggaaatcttgagatgcaatatagacaaggggaaagagctccaggaacagacaataccaacatcttcaggtgtgcctgacttggaagggctaagtggactgaagtgcatggaggagaggaagcttttatctcatgcatcctgagttagcggccttcctcagattgcactcagggcatctccccagagagagcctgaggcttcaccaatctcctggcttactggcacactcagcacatcgggcatagtctaggggtacaaggggaagcctggctctcctcctcacctagcaggcctcattaggtgatatgtccctggttaggcagtattgacccatggctagatgactgactctggcttcagacagatcaggttcaaattccagctctgctgacacacctatgagcccatggttgtgtaatttactccctctatgctttactttgctctcctgtaaagtgggactcatagatatgcctaccaagtatatggctaggtggagaattaaattagattgtaaatagcaagagctcagaacatataataaatgctggacactatttgttattatttaattcaccatgttgaatttagggatctagttctcaatcttttaggattagaaactcaattgtatgggccaagggagaatgaaatagactcacattaaccagcatggagtctgatgtataaacc

SEQ ID NO: 63395 - DNA, 615 bp, Homo sapiens
tgcctgaaagtgaaccacactccaggctgctgctgaaatctacattttctcctggtttatttacagattgggtgttagagcctaataaacgggaggatttttaaaaggtcctcaggatagcagagccaagctaagcaaacggctcgtgtacacagcccaggtgagatgaaaggccccagccatcaggcgaccactcaaggttctttatcggtcggctgggcctctgcgggtttgagtaaacccaagtaggcggtgctggcggaaagttcaaagtcattttttcgagcagataacgcaatcaaaagtttgtttatctgttgaaatatttaggagaacaagatatcactttgacctgcctacacctgcgacctttgtgaatgcagttaagatgtgttttaagcttgtttgtagtcttaatctttaatgggcttctgcatttttcaaagggtagaatttggcattaaaaaaaaagagagagagagagatttctgtgccatcaagagaggtatgtttggtaaccttagccgttcccacgcattctggaaatcaagagaaaaaagtgtatggtccgatctcagccttggaatggaagcagtgtatctccttcccttaatc

SEQ ID NO: 63396 - DNA, 1025 bp, Homo sapiens
aagaaggaagagaaaaagaaaggaagagagaggagaaaaaaagaaaggaaggaagaaggaagaaaaaacaaaagcaaaccagaggaaggggacacgttctcacagccacagagggaaaccattaccaacaggggatgctggaatacagacagcacctcaaggcttcagacaagcctagtgggcaggacccagggccagtcatactatttattggctctacttccttggtgttggctctattcaaaggctgactcatcccagcaggctcccaagactatgcttacagttttccagcttcccaggaagtgaaacctgcaggagaagtgaaaccaccttgccccagcattctcaactttgatcaggtcacatgctcacttctcagccaatctccaaagcttgtggaatgccacatgctgattggctttctcccatcacatgcttctcttccggctcaggaaacagagtccagtgtaccagaagcccagagatggaaaatggaagaagaaatcatttcctagagggaaatgggggtgcaattaccaggaaaagaataaatgcagaaatgacaagctgatgtctaccacaagcaaaatttgccttccgagtgcataacctcttcttggcattgcttgtgtcagttgagtcggtgtggtcaagaactagtgttctaagatctgttgactttggcttgagccctggctccattatttactagctgtatgacccttggcaggttaacccagctctctctgcttcagtttcttcatttgtaaatgtggttaataatattactcttctcatggtttgctaagtattatatatgtatatataaagcacataacatgataacagtacatgctaagccccccaaattttaggcatttaacattcaacagatatttgttgagcacctactacatgccaactacgtgttaagtacttggaatacactggtgaaccaaacaaaaggataacaacaaaaatcccctgactttgtggagttaacattctagtgtagaaagaca

SEQ ID NO: 63397 - DNA, 589 bp, Homo sapiens
cctaacttgtcggccagctctgattcctacacaccgctactgagccacttaagtctctctcagcctcagtttccagatcattgctttgtctaccacacagggcctgagagagatcagatgaaattagatgagagagggctctggacactggtgaagccacacatgggtaaaatgaccttgaagggagccccacgtgctcacagggtggcccttgagccacatcaaaggcttgcacttcctgagtcattgtttgtgtgtttatggatgagttcctgtagcggtcacccagccccagtgccctgatagctctgaagcatgcgctccagggtggggccagcatcacgagacaccgaggggagatgggagggttgtgggggtgggaggaaaagccttgtttactcccagagagcttgcctgccaggcttggggccaggatatctatgcaccttaggtcaggtgttgcacccagaaaaggctgcagagggcagcacctcgggaagaaatccaggcacttgccttctagcctaacccttccccattcccattccacaccttcactgtgcttcagctgttcttcttctaagtgagc

SEQ ID NO: 63398 - DNA, 706 bp, Homo sapiens
agcctgggagaccctgtcaaacacacacacacacacacacacacacacacacacacacatacacacaagagtggtcagacagagctcctgatgctttatgagaagccagaattgcaggggttttatgtgaaatttcctggattgcaaagcactgggtgtaccaaataaacaccactgggggctgtagctggcccacaaggcactggctggtggtgactcctgctaataaaggtaactccttccatgatccgccttgaacattgggctctgcaatgccacagctgccctagtgacccttggcaggcaccttcttgagtgattccaaatagttatgacctgtccttggtgagagaggaggggcaggtctcttgagggtagtgaagcagtacaaatgtttgcatttctcagggatgcaatcgatgtaaaccagataaatgaaaccacagaaagtcagtagctgaggcagggatgaaatgtgtccccgtggcctcttaagcaattagctttgatgtccctggcagctgctgaattccaaaggcaattccaggggctttgatttgaagccagtctcttaagacccacttaaaggcagggggtacccagagaagagcaaacccagggtgggtggtggtgatgggggtggggagagggagtggttgttcctgtcctcaatgtctgcagagttgctatgtagaagggtgagtac

SEQ ID NO: 63399 - DNA, 855 bp, Homo sapiens
acacaagccctgggagctgagatatgtcctaacttacccagctgagctgtgaggtgtgagtggctctaacattttccagttgtttctgaggacctcagatcaaagcttccctttgcctaaaagcatctgcctgctggtgcgggcctttgggggccctcagagagcactaaggttagagtcctgcaagggtgacaccgttatgccacaagcagttgggcgagtttacagctctctgtaatctgagagtagagtccagattggtttgatgaaagagggtaaactgtgagtgggcgtggcttgaggccccactggaagcccagggagatctggggaaagggagggcttttctgatctctcccaattagaggattaggcaattggcagtgcagggcggtaactgggggccagggtggcgccagggctggacagcacagtccctctgagctgcacggagacctcgcaggcccccggaactgtcgcccttccaggatgtggctccctgctcttgtcctggccactctcgctgcttccgcggcttggggtgagtccttctgaagtcaaatatgcggggcactttttgaaatccttgttctgggccgaactgggcgcagatgcgtagaaaggcaaagacacaaaaggtccggctccgtggcggggcgcgacctccgtacttggaattggacttggagcagctgagcccagccagcctggcccgcgcggagacacagggagggtgaacatgctgagaccgccctgcactgcttgccccaagaaggccggcagccggcccacctcactccgcacacaagagaaatttaggcagctcagtttattgtcccataattcgtcccgtta

SEQ ID NO: 63400 - DNA, 1606 bp, Homo sapiens
agcctgcctgccctgcctttcctcttctatccttggaagccacagtaaaagccccttggcctcagatccgccctgtcccctccccaggctctgctgcttccccttgtgccccgcgcactggtgtccccctcctgttgagaacatgagtaagaaactgtctttttaatggcaagaggtcctgatatagtggcctgaccacagctcaaattttctattcatacactacgtttttaaacagcgcctttatttatccatccctttttcgtgctttctacataccaggcgctgccaagagtgctttagaaacagccacccatttcctcctcaccaaagcccagtgaggtaggcagcactgccacctctgtttcagagagggggtaacccaagcacggaatagcgcagtcccttgcctaaggacacacagcgaggaagcgcccagcggggactcgaacccacgcactctggctccagagtcgatgctcttaatattatgttgagccgctctccgtgatccagccgtaaggggactaattaagggacagcaaactgagctgcctaaatttctcgtgtgtgcggcctgaggtgggccggctgtcggcctgcatttgggcgagcagtacagggcgatctcaggatgttcaccctccctgcgtctccgcgcgggccaggctggccgggctcagctgctccaagtccaagtcctaatatggaagtcgtgccccgccgcagagccggacctgttgtgtctttgcctttctacgcatctgcgcccacctcggcccagaacaaggatttcaaaaagtgccccgcattttgatttcagaaggactcaccccaagccgcggaagcagagagagtggccaggataaaggcacggagccacatcgtggaagggcgacagttctcggggcctgcgaggtctctgtgcagttcagagggactgtgctgtccagccctggagcccagccccgcccagagttaccgccctgcgctgccaattgcctaatcctctaattgggagagatcagaaaagccctccctttcctcagatctccctgggcttctagtggggcctcaggccacgcccacccacagtttaccctctttcatcaaaccagtctggactctactgtcagattacagagagctgtaaacttgcccaactacttgttacataagggttcacccttgcaggactctaacctcagtgcactgtgacggcccccaagggcccacaccagcaggcagatgcttttaggcaaagggaagctttgatctgaggtcctcagaaacaactggaaaatgttagagccactcacacctcacagctcagctgggtaagttaggacatatctcagctcccagggcttgtgttttcatagctttccaggctctcaagcttggaagcgatcttaaatttcatcgagtcccctttctgaggcctgaattagcttcacaatatcctgccaactggtccagcctcctgtcacacaccatcggtgtcagagaactcactactttccaaagcagggatttttggacagaatgtaaaaatgaactccgtccccccatagtccctggctgttatcatccatccatccaagta

SEQ ID NO: 63401 - DNA, 1734 bp, Homo sapiens
ggagggattgcctaaggtcacacagcaactcaatggcaaagtcagaaccagaacttgaggcttctgccttccagcacagggtggctggcagccatttctcttgcttttatacatcaggaagatattctaatcagtagccttatctaaggcaaattgccttgtcagctcattgacccaggcttagcatggtagggctgaagggatagaaatagccaggggaggctgggcactgtggcaacccttcccgctcggtaatcctagcactttggcaagccaaggtgggaagattgcttgagagaggagttcaagaccaacctgggaaacatagtaagaccctatctctacaagaataaggagaaaggaagaagaagaaaaagaggaaggagaagaaggagaaggagggaagaaagaagaagaggaagaagaagaagaaagacagagagagacaaagaaagaaagagagaggaaggaaggaaggaaggaaggaaggaaggaaggaaggaagggacaaagatgggagccatgtaccaggtacctggggagctatgttctattttcccaatgtcacttggcaagcctgcccttgtccaggccacaccactattgacatcaggaaagattgggcaaccagcagccataaatcacatgacagtcccagagctgctgatggattcttgcccaaggccatgagttgtagctgaaatgaaacttctggagacccaaattcaaaaaggcatgctcattagcactcattctagccacgtgcaggctggtgaggggcattctgtgatgggaatgaggatgctctgacagcatgagaatcagtccccagagctaactgactctacaaaggttgacctgagctttagggttcctcccttacttttatccaggacagaaatctggctgataaactgcatgctaataaaaagcatccctatctctatccacaagggacaaattgggaggtcctcctaaatagaaagcaaggctagtcccactcactcagcacaacacacacacacacacacacacatgtgcacgcatgcgcgtgcctgttaaccatcctgccctgttgccctagtcagctgacctttgcaacctgggaaacagccctggctcttggcctatgaagattttgtggtgctgtgttcacaaaatataaaagataaggattagttcttctcctgaaccactgctcaatcacatgcccgcttgtgacaccagccaattgtgcaaacagaattttttggccactcctaggttttgcctgggtctggctgcagcctctgacacctttttctgcttcatgatgactctgcagattgtgatgggtgaggctggagcctaccaagccttacaatagatctaatttttgcttaatacatataactcccctgcaacacttcagctgtaagcaatacgtctcttgtttaagtggcagttggttggtggggggcgggggggatattattgttttccctggggaacaccctctggtttcccatgtggaactatatgatgtggaaagtaaaatccgaggaactggccttaacttctaagcagggggtaggacttgggagagtgagcatatctgggggcttcaaatgaactcccccaaacctctccacctccatcagtttactcagcagatatatggaaagctcgtattagagcaggcattgggcacagcaagcccatgtcctgctgggcccctcactcagctttgtctct

SEQ ID NO: 63402 - DNA, 1098 bp, Homo sapiens
tttgaaaaaagatacctcaaatttaagaaaaaagtcagattccttttaagcagtgtcttttctgaaagctttcaggtcactaaatacgcaacagaggggaaaacaaaacaaaataaaaattaaaagttaaggcactgccaataaagaatcaatcagaaaaactgatcatgtgaatctatcattcaaatgatttttaaaaattgttgatgtgattacatttcccttttacccaacagggggtagttccaattccagacatgtagctgcactgcctggatcccaggccaaggtcctgctagctagagcccgaagcacacagcaggcagccttacggggagcttggagcctgtatcggcgtgggcaggcgcatagatgttcaggtagaggcagtcttctgacactccgaatttcgggtaatgcaccttgagcatatgttgatctaagagcagccactctgagttctggaggcaccttggagaaggagaggagaaaaccctcagaaaaagttatcagcaaacttgcctgggaagggccagttcttctgacagcggggaggcctggccgtctcctctgcctgagcagaagaggcagctaccggtacaaagtccaatcatgcccaaacccccatggtttccaaaacaaacaagcaagcaaattataattctcattgatctggttcctgggtaggaaagcacatggtgtagaataattgcaccattacccccaccaccctcccatgcctacaccaccctcctatgccaccaccataatatagacacacataacgacccaagctggcccaacaattccccaaactgtagagggcaggacatagtcgaataacaagggctttgcccctgcggctccctattctgtccccagatgcgcaaaggaacatttccaggcctctctacctggaaccacccaggatagactggcagggagactcctgcacccaggctttgctcaagccgggcccttgcctcgactgctctctccctgtatctgcgtgctcacattcttccctttgttttagagtcactccaacttgccacctcctcccagaagccttctgagatttctccagttctaccatac

SEQ ID NO: 63403 - DNA, 519 bp, Homo sapiens
aggggcaaaaccattcttttatctgaggcaatccccaaaggggagatagctgcaagctgtaccactgccagcagttggggaaatatgtccttcattcctagaagctgatctaggtggcacatcacaatgcccaccacatcccctcatgccagacacaaagaagcaggctgatttctttatgtccatctcttctcctgcactaataattcaaggctggtcagcaaatggcaaatccatctgagttcccaagctttccaaccagaggtgaggcaggataagaacatcttgacaatgaaaataaacacaaagggaattcccggtggaagtatgccaccaatggaaccatggactgtgagtcagctgttggccagactcaaggggcagacccaaccctggtaaattcttgtcaaacaactcaccctcatctttggaagtgtagtttaagacatcaatcctcaatacatacaaagttgaggaggctggataaaaatagtaaaccaggcacaatctccacattcc

SEQ ID NO: 63404 - DNA, 2617 bp, Homo sapiens
gaaacaaacaagtttgctttcagagctacagaaatgcccaactgttaggaaaaaaaaaacaaaaaaccgttttccactggccgcttgcctctcttatccccatgcaaccttgcctattggcccctttccctaggagagcccctggggctgtctgatggaactgattgtaaaactattttgtgcagtaaaaaagtcgtttcttcaaaatctgagaccacccagaacatgcccaatctttggcaaatatcgactggtttcctcagtatttgactagctgtacaccgagtaactgtcccgggtttctgggtctttatctgagaagaaatgagggggaaatgtttcagaagatgaaaaaaggaagaaaacctctcatccaaaatctgttcaaaattcattttgtgcgtttcgaagggggaggacaggagaatttagtgcaaagacggcctccaccaaacgaaaccgtccaacatttgcaaaagcttttaaaataaactgctcagggatcaggggtttgctggaaactcccggtcgcttgaagccctgtccctccactccgggcaccctggcctccccagggtgggcacccctcctgcacggagagcggcggctgggatctcggagcagggtcggctatggccctggaggcagcggctcacagagaaaaagctctggcttttctccgcccgctgcgttcctcttcttacagcctcgggtgtcacatattaggtgctcaataaatgtggacataggaaacgaaaagtccgaatctgtccttacgcccccaaggcgaattctggggcgcgcgggtttattccgacccactaccacatcgcgtttcctgaggtaacccggcctcggctctgcggccccagcggctggagagccacggagaaggcgggctacgggcgacaagatggagagccggcccgagagggacagaggccgcgctggcagcgagctggggggcccacctgaccgtcctgcgggcagcccggccccgcgctcccattgacaaggaggtccgcgccgccggcgcgtggggcgggggcggaggcggggtggggcgccccggcgcgcgcccggccccactccccgcccccgccagtcccgcaagcacccaccccgggggagccgcgggccgggagggcgctggggggaggggcaggccgctccgcgagcgcgtgtgcgcgccgccgccggctgacgcgaactccggcgcgcgcctcccccgccccgcgccctccccgtcccgggggcccggcgcgcggccctgctgacgtcagctggcggcccgcggagccgggtgcgcagagccgctggcgcactcgcgcgctgcgctggcctcctccccgccccgggcccaggcgcgcgcgcgcttgttcgctctcccattttttttttcccctccctccctgcctctctctctctccctctccctcgagctcccggctggctgcggctccctggcgctctccctctctctccggtaggctcaccgagcgatgcgagctctgggagacagcgacgccgcctcccgctagagacctgcccctcggcccggccccctgcccaaccctgcccagcgcgcgggggtcggcgaaggcgccgcggacgcaccgacggctgaagagcggcgatgcacatgcactagcagcaccccctaactcactccctccacatcccgcgccgccgccgccgcctcctccacctcctcctccgccgccgccgcctcctcctcctccggcagccgcggcagcaggacccaccctgccccccaccccaccctctgtcggctccggctgcggctccagcctcgactattattttatttattttgggtcgtgcacaagcctcagtgcctgcagtccgcgcctcctcggcccgcgggcgcctcctcccttggctccggagccccagaccccggccaccctcgattcgacaaccccagacccctgccagctgccgcgagtctccgctgctggaatcttgttagcggctgtctttttggagggttctggtttcccgacatttttgtttccagcccaggagaggatatcgtgattttccccccttgagcccaggctctgctctctgggggggtggggggcgctccaagccggggagccgtgccagccgagtcgtgcgggctgtggcagggaaggggccaccatgggatgtactctgagcgcagaggagagagccgccctcgagcggagcaaggcgattgagaaaaacctcaaagaggatggcatcagcgccgccaaagacgtgaaattactcctgctcggtaaggaccgccgctgctacccccatcccccgaccccggccactccgcaccccctgccaccagctcccccaccccactcgcgcccgggagacctggtccccaagttggcaccaccatgtgcccaggatcgcccaccccctcgcatgccttagtccccccctccccctgttcccttaagctgacactcaccagtttttccccactgtctgtgtcccaacaggggctggagaatcaggaaaaagcaccattgtgaagcagatgaagtaagtccctgtggcattgggattcgtacttttattaagaataatttttaaatcgtttttattacat

SEQ ID NO: 63405 - DNA, 781 bp, Homo sapiens
gggagtagcgactcggagacaattttcccatctgcttgacatgttcttatttttattcgagagctccctggggctttcttcgcagagccccccttggctcgccgcacccttctgagccaggggtaatttagcttggggcttctcttgagcttgtgcaacccaaattgatggggaggcggggcctggggaattgccctttgcaacaaggtgcatgttgcatctgtctggagcccttgcagatctgtaaatgcaagccgcgccacccctttctcccgaggggggacgttttaaaacttcagaagtctgtaatcagcagtggcggactcggagcccagtagaagccccagccacctgagctggatgaggtttcaggcgttgcaagtggtggacagcgcccagccgaggccggaaaagtcgatggggctcagttcggcgacgctcggctaggttcggtgcggtctgggcgcggggctcggagggagtcggcggtgttcggagccgagtcggtgctccggcggagagagccgagccgcttcggagggggtcgaaagcattcggaaatactcgggggaggggagtgcgcaggaggggaaggaggagggggagaggccagagtctgcaaattaactttgcatccgccaaagcaactgcttttcctgaacatgccccataaattaggttgatttaatgagaagtttaaaaatatatactgaatcccccaaaggggtgcctcgcctttttttattcaaagagagctgagctctctgaggaaataggtgtg

SEQ ID NO: 63406 - DNA, 2614 bp, Homo sapiens
tttgtcttctcagtctctggttaattgcttcattttttgaattgcattttgtatctgtttctggtatatagaaatacagttgacttttgtgtattgatttttaaattgatccaccttaattgttgtataattctaatagttaatttgtagattctaaggcccagagaggggagtgatctgactaggttcctatggctagctagtagcagagcaagcatgaatgtggtcctatttctgctgacttccaaggagagaatattcaggaagggttagggaaagccaggtggggagtaggaaataacatttattgaacacctgttatttacaatgcttaatatgcagatcagcttaactctcattggaggcagattattgataacccctttttatagatgaggaaagtaagattcagagagatgatgaaataaacgtgttcaggcacatcactgaaagaacagtctacggttggaggagtgctgttgctctatcaagcatacaccagactacatgccttctgcatttgagcatagacacccccagaactccctgggcctcctacctccagctatgccgtcctccagggtcccctcccagcccagctctggggctgcctctattaaggctctgctagcatctctagacttgtgcaggcctggttactgtcaactcttgggttgagtttctgcccaaagttctgaggtcagtctccacccctgcccttctacatagttccctcccaaccaaggaaatgagttcacaacttgttgagttctaggaaccaaattaggagttgctctgggcatcttgtttcagtcgcgacttgaaaatgcggttgaggttttatgactgctttgttatacagtggcctagagagaatttatggtcgcagtgcttcccagcaccccctcccgcttctcgttgattgtccagagctggctgcatacaaggagagggtttgcttctgctggctgtgcaaaggcatggggaaatgctctgtgtgtgaacacagcccagcagtgctctattcagcgtgacaacttcctactttggaacacatggctcttcacagggtgactgtaaattatgcaactccagagtcaaagaatgaggaataatgggggaaaggaagggacaaactgcaaacttcagcctggatctgaaatgtgagtgtggagacccaggctgcttggcaattgatgggaggagagtcttcaacgactgagaaaaaccaggaagtcctgtcgggactacttgtgagagtggcttttactgtttaaaaaatgtaaatgttcttttcaaactctgtttatcaattcagggagagttttagaaacttggagggacatttacaaaagaaagtagtcacatgcgttaccaaaagtaattgaatgccatacatggtatgtaacctttgtcccgatggctccaactcgtccttttttattattgcttcatgctaaaaattggtgctcctaagggcaattgtacagattctcaccttctcctccacccgcaatggtcctggaatgcagtgaactctgcttcgataagctttgtggaatgttcctgtctcttggctgactgtcatctctcatgacttgctgctttcagtggtcccacctcaagcattattccccttctcttgttctgctctgaatctgcgatggcccagaaaactaaacgaccagatttgtcacaatagtgtgtagagcaagaatgaataggatataattgaggacctgaggaactcttctagaagtagagtgtttgtgctttagtgcttggacttgtctgcatttctgcctatctatgacacaggattaagtatgtaaaaatgaattggcagttactatacagatgtaagtgatggtgacaaggtcgctgttgtgctatgtgggtgctcagagttcttcattgtgcttgtccttcctggctcctggtagggtttcgattcacagaaattactggacaggtagcttccagataagagtgatgaactatcatttctgacaaaagatgttggacaggctgtggcagcaaggaggtgatcagaagactccctagagcacaggggatctggcaggctttttctataaaatgacatggatacacacagggtcaggctgcctgtgggcagagacgtccccaggagccctgcccggtggccagcaccacggacatctgctcacctgtggcagaactcggagtctcacagctaagccaggccagacccagttgctactttttggtcaagacccgctctaggaattcttccagggaagagggaatgtgaatttgtctgttttcagatatgtgtagcctttacacaaaagtgtttgaaattatttggttaaaatgctttccatcgaggttattctttctttcttcttttttttttcccactctgcagatatccattgagcttctactctgtaccgagcaccatcttaagtgttgtaactgagcaagacacacaaaatctctgccctcctggagtgttctgacattcttgttaggggagacaggcaataaataaggaaaatacatagtagtattatacatcagctggtgacaagtgctatggagaagaataaagcaggcaaggggcatgagc

SEQ ID NO: 63407 - DNA, 1542 bp, Homo sapiens
tatggagagcaatacacgtttctgagagtcagattctagcagagaaggcaccagattaaaagtgagctgcttgctgtaggccaaggcttttgcttcctctgccgtgtcctctctgtgtatgaatgagaagccagcacccataaggatgcaagtcatggtgtggaactcagaagcagagcgtgaggtgatttcctggaaggtggcagtgtcatctgaatgtttcaggcctcaagaatccaagcttgtggatttctattcctggttactacaggcaggtctgtgtctgcccagccagagagttgccaccatttacccttggagcctcccagcgaagatgctgcccatggagctgcttttgaagggggagtgcttctagctgtctgaggcaggctgagggccccttggccaccttgacactcttgttccccaaaggctccatgcccccttgtctgtgggttggcaccacataatgacatgttaacccttggcctgctgatgttgattttaccttctcttgagggaatataaccaaggcactggaccaaaataaacagcccagatgctgtgctgacccggctctgctgggaagcatggtattgatttgcccccagcctctctaccttcagtaacctcatctctgcctgaggctcctaagctgggaggttgattcacttctttccttggcagtgtattcacccaaacacccacacccactttgtttatattcctaaagaagccagcattagctatttttaaggactgtgagtggccctaggtgcccaaccctcctggtctggctgtaggcaggaggtgacaccccaaggagagtctacctgtctcaacctctctggtgggaaaacccagtagccaccagcctagggaatgccaaaggcctaagcaaacacttgtgcagccagccagcctcatggccttggccctctggccagaatgcccttaggctgagggtactcatggttggtggggtggggcagttcagactgatctccaaagaggggattgacagacatgctcggggcctgcagctgaatactgtctttagggaagtgcagctggaaagagggtttagctgtgattcagccaggcctgcagttcctcagccttgcccatgaggctctaatagccagtttaaggagagctcactgaaagtctgcatgaacccatgaactgtttcacagctgacccagcttcccagttctgcagcttccattttcccctgtccctgggtggtttgcttctcaaatccagggagtcttctccgagggtacaggagtttttgagggagtgtggttcagaatgggaccagccccttcccctctggttcccccccaactcctattccagtgaccacattgggcatgcagggggccctttccaactcaaagatcctccaagagaaaacattctagccttaaaaattgaggaaaacagtctacctctgtccccctggtcatctgcttgagccagagaatctgtttcactttgggggtgggcagtgtgtggccatcgggagctacactggct

SEQ ID NO: 63408 - DNA, 1745 bp, Homo sapiens
agggagatgtggcctctgctaggctgttgcggctgagctgatgatcagggcaatttatccattcttagaaatctggtgagccctgcttcggctctgtgcaactgctaaattcagtttgtatggatttggcttggaatcacggccctgacgttccatttgattcagcttggctggggtaacgctcaggtcttttgtagaagagttcacaacactggccagttaaagggtggtgtgccctcaggcagtcagaaaatcttgtccactgactcattcattaacccacaaacagaacaggcattgccctaagtatttgggggtatgaaagaagctgatgtggatgtgttcctgtcccagaaggagctgatggttgtatctatgaaggtaagcatttttgtagatacgagcaccagccaccctaagcaaaggcagagaatgcttaggccagacagagggctagggcacttgaatagaaagagagcaattcttgggtacaagaagcccaagggaagttttctggaagaggtggcatttgagctggcccctatagaatcaataagattgggaaactgatatggtgtactttctctgtcaaaacatggcccatggagaacaaaaaacatagcaattgagacacagtaccaagtctggagggtagacttataaaaattgtgaaaagtgttgggaaaggaaaatgcaggccttttaggagagactaatgggaggtttataattcagattgggtgtgtaggggggtaaggggcaccaggattcaaactcggatcttaatgtttccagagcccacacccataattactgccctgcttcctcccagctgagatctctgcagggcccctgggtgaatcagagacagaagtcaggcctcccaactccctgggtcagccctctttcctcacagcctacctgctgcctgagctgctgcctcagggcacatgcctgtctgcctggctgatgtttcccatcagtggctgactccacactgtgctcttggaggtgaggtcagggacagcccaagcacccagactgcttagggcagacatgcaaggctcaggccctcctgaagcagtcgttaacctttcttcaaaggtcatgttgtggaaaacccctacttcagcctcccagctgtaatcacaaagggcatcagtgagaaagccttttcctgggaatgtctgttcttggtaacatgcccaggtcacaatctggaacatcagagtcccgttcacagaaacacggatcctgttgcaggcactctggccccaccatcgcccagtcctggagggtacttctggatactggacgatcaagttcagtgtctcctggctaaaggcagctcacgtaaacttcgcagctgcagcctgagaggcacgaggacccagtgtgtccacgaaccagaggtctttgtcctctgcctagggtttcccataaggaaaagctcacacggcaccgctgtccccacagcgccctgctgtggagcttgttctctgtgtgtccatgttccccgtcatgtgccctcccactccagtgatcattgctagtctgctgctgtcacttccctcctcctgtccctcttcctctctgacaaccctttcccagaatgcctctcctctcccctccctgggtgtcattctcttcaaaaaggttttttaaagagcgaatgtttaatttgtgtttgttgactaaatgaattaatcaagtagggctcttcattatgtaatgccttgtacatg

SEQ ID NO: 63409 - DNA, 1543 bp, Homo sapiens
agggctatgagtgggggatggtggagagagatatgtccatctggggccactgtttacaggctacccaccttcacagaaaggagttatatgtggagccctcattttagagccagaggtcccaagcaatcacctgtttcattcagccattcatccagcattgattgatcattcgccatgtaccaagctctgccctgggcactacagtctgtgaactcagtcctcatggagctcacgtcgatatgtggggaaacagatggtatacaaataaaaatatacataccaggtggtgatacatgtgatgaaggaaaataaggaagaataaaggcacagaataatgtagggaaggggccgtagtcagactggtctgaggaggtgacatccgagcagagccctgaatgcaatgaggtatgcaggtctctatttcagagctcctcaatcttttgtccaacaagaacccctttgattatttgccccccatgagtcactatgttttgtgagctggtgtatcccagaaaggatgcatttggcaaagatgtagacgtagacatagacatagatatgaccgtgacccttggtcaacctgagaaacggggcaaccacaggaagttgatgcaacccagccccaaagccaacacctgacctgtccaagaggctgggcaatatacatagaaaatgagtccagagtcccagtggcttgtccaagcttatgccagctggtcagcagcagagctaagacttagaccccgggtctcctgagtgatgaaattggggtggaagctgccacagtcagtggcagtatttcccaaacacacaggcatgaaaaaggcagtggctggaatctgagggtgggtcaggaggcctgaggtcttcccaagaggaggccgacagagctgccttgaaggacttcctccaccaccaagggggagccccaggccagggccgatgatgcaggcctgagaaggattcttctgccctcatcacctggggttgcagtgttgatggccaatctgcataagaatctgagtcttatatctccaaagttcaagtcacgatatctgtaatctagggccaggggccccagaccagcaatgctacccagaaggcgagaaggaacagagctctagcaggcagttctctgagcattacgctgccgctgccgtggactgacagctggcctgtgcagcccccacctccacccaccccagcactgtgagctgagggaaagggcagggttcatgttgtttttcagataatgacagcagaggctctgcactggaatcacaagtcctggccttgcccctggctctgtctggtgacaattggcagctgacatctttgcttctggccagagctaccccttattaaaaatggcatctttataatagatttctgcaagtcattgtcaacaggacatccttcttgttttgtaccaatcattcctctgggggactgattttgcctgttactattattttagaactctttagaatacccttttattctatattattctgatattagaatatcaagttttaatatagta

SEQ ID NO: 63410 - DNA, 1650 bp, Homo sapiens
cagcctcaaatcaggaaatccaccttctcatcccacaaccactcccaacgtgttcatttggtaaatggtaaatgagcagattctctgctttggtccggagaaaccccctctgccgctcttcttttctccactgtggcttgttaacccttgctgctgttgttgctgctcctcctcctcctcctcctcctgacaagcagtggtcctcccagccttccctccccgtggacccagttcacatcctcttcctcaagaggacagacgcgggacgcctgactgactgcacgttctcccccgtccctcgtaccaagtatggcaacaataataatagctagcactgattgactgccgactgtgctgggcactctacatggattcattcttttgatcctaaccatgaaccagctctgttaccacgcccatctcccaggaacagatgcggaaacaagcacccggtctcagctagagtctggctctagaagcccccgcttcctgtggatcattaaagggattgtgatggaggaggagcggcagtccagtcccagggcaggagccagggcgctgataaagggagcagacgaggggcatttaatctagctggagatgtagtgaaaaaccatgtatcccaacagcctagggcctctgagtttgtgaccctccagaagttgggggggaaactgtatgtgttggtacattgtcacactgtcagaggagtctatgattcagagaaggagaatggctgctgggccagatgagcctccaaggtcccttccagctcccaagcctgtggttctgtgaccatataaggccagcatgcctggggagtctcactgcagctaagtgcagtcctacactgcaagggggaagcagagagcaaagggagcccaagtccaggcctcctgcagggtccctaaggcagcagagagagaaatggaggtgcggggagaaccagggtttctccttggttgcctcttcccagaaagctcagacctgtgcaggcgggcttggttgccaccctctgtctctccccatacccacgtgagatctcctctcagcagcgttgccaggtttccagagtccagctggcggtttctgtccaaagtcaaacactccacagtcagtccttggttgttcagacctcctgttccttatggtgcttctggtttggtggcctggaacacccctgagcgtccctgagttttgggtggacatgaattcagaatctagcttgatctccctttgataccctggctttgcagtcataagaaatctagtaggtccccaccctgacacacacacacacacacacacacacataacacacacagggacacacacgtctgcctcctttagtgagtgctctggagagggacaggtctggtgcatctgtgtactcctgactcatgtagttatgtcccactttatccaagcactgtctggagctcaaccctatgccaggagatatgggaagaaagcagagataggtgagatgtggtgctttaattttaaaaattaaaaattagtaaacaagtcttctgggagatgatctctgattattattgttatcagggtacaaaatatgtaccttttagtcatgtctctgttggttctaagtggcagaagcccaaatcaaattagcttattcaaaattga

SEQ ID NO: 63411 - DNA, 847 bp, Homo sapiens
tcactgacatttggattgccagcccttttcattagctgctcaagtttgtgcacagtggtatttcactgtggttttaatctgcctttccatggtgactaataatatttggcaccttttaacatacttttgggccatgcgtatatcttctcttgtaaagtaactgttcaggtcttttattcttcccttttattgggttgtttgtcttcttattaatgagttttaagatttttttaatatccctgatacaagttccttgtcagttatatgtactatttcatattttctcccagtctttggcttgcctttacaattagcatttttaaatggtaaatggtttgtttaatgaatgttgatttgtccaccagcttccacgtctagtccatacctccctttccagcattgggagccctttgctagttatttctatttggctgtgagaggttttcgtctgcagataaagaagtgatcatggtatcagaggttgaacttgtggactctggggtcagacagtcctgggtccaagtcccagctccgtggctcgcagatgggcaggtccttctcgtctgttctctgagccttgcttttctggtgtgtaatatgaggataataagtcacctacctccttgtgctgctgggaagattaaatgagatgatgatctcaggggcctagcacctatcaagggcacacaaaggctgggctgtacctgttaccactcctgttgctaaggcacgctagcaccccagggccagcccatgtgaaaccactctgcacaaagcaggcttcttctcccttccacctttaaatcgaaagcaccacctttctcccagttatccaagcagagaccct

SEQ ID NO: 63412 - DNA, 2039 bp, Homo sapiens
tgcttcacggactctttgctgttgacgttgatctcctggtagcatgaccttttggcctttgtaagacacacagcctttctgtatcaagcccctgtctaacctacgaccccagagtgactgacggctgtgtatttctgtagaatgctgtagaatccggttttagttgagtcttcacatttagaatttgaaaggaaaaacagaacatttctcatgtgctttgtagcttaaaaaaaggaaaactcaccatttcatccatatttctttttcttgcaaaacaaacatacccatctgcaccgacgcctgcccccgtcccacctcgcggcgcagcccctggagctcctgctggggggcagggcccatctgccgcctggggctccggtgcggtgcactggtccgaggagtgtgctcaggccgggctttccagaaggccacaggccactgcaaaccctgctgcctgccggccgcccagacaccacagacgccacctggcggccctaagccactcccgccacacgctcactccaggttcgtatagaaaaagcacagctctcactggccagtagctgccaaaaagaacacccatcgtataaggaaatccagccccatagaaaacaatctgcccaccgaccccctttctaaggatagcctttgtaggggttttttggttccttttttttttttttcagtttttgtttttacttttgtcccgccgagtactatgtattaccagccccccaccccacagatcagttttcctagtctttgggaaacgggttgtgttttttttcctttgccgtgttggatttccggtcccggctgacacctcccttcgtgtgtgcgcccctccccacccctgcctttgtttcggtgccctgtgtccgctctctcatgtggggatgtttgtgctgcagacaaaaagaacaaaaaaaaatttttaaataccacaagatggaaaaaaaaaacaaaaaaatttaaaaagatggaatgtagtgtttacattaaagccgccgttttcatgaccaatcctatgtcatttctactttgactaatacccaaaccctaaacctcttcacggtttcacttttaagacttaatctttgctgaagaagaccagtcacagccatttcaaataaagaggaggcaaaaagacaaaacacacaaaaaattaaaaaaaaaaacttaaaaaaaaaaggaaaaaagaaaaaaaagcccacgggtctttgtaagcctttctattcccaatcggtgaggtttctgtgatatcttacacactgccagtctacttctctgactaatggaaaattcctgtgtagctcaataaaagagaatgtttgtctgtactcctgagtctcaccctgtgccttccaacgatggttatttggggtgggcttcattctggcaggagagggaaggagggactcggccacacacgctggtaggccggtggttaggagtcccccacaggaccttcccatcccctcagtgccgtcactggagccccagctcagagcacagttgacgcgaccactgcccagtgctgcctgggaatgagggcaggggagccgccactttctcctgcgatgccctctcctcccggctcccggtgcctcctcaccctcagtaggttttgtttgcttttgagaaatgaggtggaagtggggattaggaaggaagaaatgcaagaagggcaggcaagccccctctcctatcatgcaggatcctctttcttctgtagccggcggttcccccacagtgggaggatgggtggtcccaagaatgaggccaattgcctgagcccatctgcacccaagagttcccagccactcacatgcccaggacgagcttgggcccagcctgaccaggaaggctgccttcgatttgctccctgactgcacctggatgccaggaagccccctgcaggccgaacacgcaggaggtaacccagcagtgcagtggggcacacggagtctgatccctgttcctcccctagactgtaggtctcacccgtcccctacattggcccgcttttgctgtaataa

SEQ ID NO: 63413 - DNA, 711 bp, Homo sapiens
aaaaattatagagaatgcaaattccttatacggccctggagctgagttttccaactgtactctggagacatctcagagtttatgtagggctctagggtgggtgtgtgtgtagggagagcaggcataggcctggccacaccaccacccatactttcatccaagcagctctggattttttttccacatatgtaaattaactctataaatgtttacattcaaggttttatttttggaaaagttctaataactataacaaaaaaaggaagaaaaaaataattgccttaggggcacaataaagccctcctgagatattagctcctagggacacgttgttctgactatagaaggagcagggagtatgtcaacgtcaggaccttgaaggaaaaggtcggcaccgggctctgcttagagctcttgctgggggtggaatgttggcaacataagcagtgcccagggcccccagggcctcctcattcctgcagtcagcttgtttatgtaaacatgagttgatcattattttcccaggtcaggtcaaatctaactgggcaagagtccataaaaacctctaaaatcagataaaacttctctttattcttaaacagcttcctcctcatttcccaaatttaaaaaatgcctaggattcattttactagaccaaagcttttctaccagaaaatccagcaagttaattattagatcttaataaaaaat

SEQ ID NO: 63414 - DNA, 593 bp, Homo sapiens
taagaaaaccggaaaatcccaaaatacatgaagattaaacaacacacctctaaataacacatagatcaaagacgatatctcaggataaattttaaaatattttgaattaaatgaaaatgaaaacacaagttatcaaaattgtgagatgtagtaaagcagtgcttgtaggaaaatgtatagcactgaatgtatatattagaaaagaagacataaacaagtttccatcttaggaaattagaaatagaagaataaattaaatccaaagtaagcagaagaaaacaaataatcaaaatgagagcagacatcaatgaaactgaaaataaggagtcaacagagaaaaatcaatgaaaccaaaagccggtcctttgaaatgatcaataaaatagataagcctctaagccaagctaactacgaaaaaaagagagaggacctaaattactaatacaagaaatattatacagataacttcttataattagaattgccaaaacttatgcaagaacaaatagacaatgtgaagttgtatagataattaataatcttccacagcagaaggcatcagcccacatgagttcgctagtgaattctgccaa

SEQ ID NO: 63415 - DNA, 1821 bp, Homo sapiens
tatgaggtacctacgtagttaaactcatagagaaagcaagtagcataatggttgccaaaggctagagggaggggagaattagtagttaattgtttaatgggtatagagcaagggtatccaatattttggcttccctgggccacactggaagaagaattgtcttgagccacacataaaaatactaacactaacgatagctgatgagctaaaaaaaaaaaaaaaaaaaaaaaaaggcaaaaaaatctcatagttttaagaaagtttacaaatttgtgttgggctgcattcaaagctgtcctgggccacatgcagcctgcaggttggacaggcttggtacaaagtttcgattgtgcaagatgaaaagagttctgtagatggacagtggtgatagttgcacaatgtgaatacaccactgaaatgcacatctgaaaaatattaaaacagtagatataacgtattttactaaaatagaaaaatcgaaaaaaaaattcactttcttatttttttctgtctgaaaaagagtagcattggcttgtatgtgcctataagccttctggagcaacataatacataagaaactaacccaggctgttaagggggcgtgggagctgggcacatgggaaaaggaagggagcatgacttcactgtatactcctctctaggttctgaaacttgtaaataaatgacctattcaaaaaccttaaacaaacgaaaacacttccctggatgctacaccctatcaagctaccacctctactgctctgtgtccttcttcataacatacttcctggtatggtctatttcttcagctcccactcatttcaatctaccataatctactgtccaacccctcgggcaatggaaaatgctggttcttttccagctaatcaatcactcccactctgccaaatccaacatgcacttctatgagctcatcttgtaagaattccacacgcttgactcttccctcctggaaacccaactcctctgtgctgtgctgccaccttctcctggtctcttccctctccaccggctgtcatggctcctccctctctgccagacctctgaacatggcagaacctagagctcagatgtcagccctcttctctttgaccccctgctttagatgtcacctccaggcgtcaatctcccaaatgtgcatctctcacttgatctcctcactgaggtccagaactgcccacagagcaacccagacttacccaaatagaacaccgcgacccatcctcatgcctgttcctcccgagtcttcgcatctcagtacgtggtaccactgtcaactcagctgcttaattcaaactcagcaaggcagcttccattcagccacttctctcatcccccatatccaaccaaagcaccaagtcctgccagctcatcttacaaaagtgtcctaaacctgccacttattttcacctttattacaaatacccctgtccaagcccccatgtgaatttcccttgactactgcagcaacatcctaactgctggtcctgctgcttccatttctgaccctctataattcatccttctcccagaagcaaaatcattctgttaaatatcctgtcagtcccctggtggtggtggtgggggtctgtaagaagctctgaatggccttctaatacttttacaagatctaaatttgcctgtggcctataagaccctgcatgttctggctctgaaatctcaattcctatcacagtgttgttcccctacttgccaggccccaaccataatgacctttctcagttcctagaactttctcacctcatagcctttgcacctactgtttccacggcctccttc

SEQ ID NO: 63416 - DNA, 2633 bp, Homo sapiens
ctcctgcctcagcttcccaagcaggtgggactacagacgtgcgccaccacgcccaactaattttttttttgtatttttagtagagacagggtttcaccatattggccaggctggagaatttttatttctactgaacagaaattggtattttcagaaaggtttaaaagagtgaaaaatttttaaatcttaaaatattcatgaatagaccagatttttccttcaaaatgatgagtacagtttattcattattttgtaaaatctttataccctacgtaaagaaagagttacataaaataccacacaaaagcattcagtaccagtacccaacacacaaaaaggaactgaaatgcttgttaaaatgaaagaccaaatatccacctgtcatttcatgggtgaaaataacttgtcaaacatccagcttccttgaaaacagacagaaatacaatctgagcaagtcctgcatccagtatctcacctctgcagccatgaaagccaaggtgtgcattccgtgggtgtagccggtgatggagcagacggccgccagtccacagcaggaaagcagcatggcaaccaacagggacaggactcgaccgtggctgctcatcggcgtggtgggcgagaaggaaagctgaaatgcacacagtaggaaactgctcattcttcttcatggaagtgttaaacttcactgagaaattcaaggtcaatcttggcttctctgcttagggttctgtgctaagcacagaaaagcatcccattactatatggtcctattctccaataacccaaatatgagcatgaggtgatatttagagatccgtgtcatttaatttactgagtataacaatatgcattatattttcatcccttactctcaaagatcctcctagcactgggattataaacctctagaagcaatgttccgagggtatacaactctctcctctcaccttcaacaggactcaggacagtgcctgttctgttctgtttctttctcaatcttgctctagtcctcctctctgaaattggcattcctagtctattagggctagcacaattgaaatgcaatccaggcacaggtttaccactactacaacgtgatgtcagcattatgcaaggagaggcaacagtctgaaaagaaggcctagagctgcaactcctgaggtcacaggcggagattaaaaaaaacagtttgggaggttagaagctcctgtttgtgacttcaaatgagggttgaatgtgaaagaaataaaggctgtgagagtgagattaactcaaaccaaggtgcaaggtccatgtggactgggtaaagacagggaaaaacaaggccctggagcgggtttaactgaggggcagcactgtagatgcacatttatctgggactcatgagactacttcaggtcactaatgggttgaaggttcactcatacagctatgatctgaaaccaagtgacagatcttgtaccagacataaaatgattcacttcgcaaacaaggaagctgagggagctaattcagtcctggcccggggtggaaatagtataaactactcagaaagaagagctccacgaaccagagtaagctgggagagacagaaggagactagaacagaaaatatctagaaaagaccagattttattgtttatgtatcaaggtttccttgcactgtgaacaaaacagtctgcataggtgaagtgaccccatgttagcagtaagtaaacactatggggttgggaagaaagctccccaggagacaacgattctgcatctcttggctgctgtagaaagttcttcaagaaacaggcaatgggggcctgatctagaagtcttcccagaagagctaccctgaccatgcctgctgtggctcattcacattacacaattcaaagttggcaaacgtggtgactaagcaagcaaaaagcttggctaaaaactcacatattcaaatcgatccttgcagagctgaaccatcaggtgcagaaagacaagtccggcaaaccagaggcaccacatgaccacctcttccactgtctggacattcagcacaccaaagatgaaaatgaacttgtagaaaataaaattccaaaatttgtctttgagatgctaaaaaagaaaaatgtttatgaaggtgagtaccatcacacctaccccatttgagggaagttaccataacaaaagccggcttctatggaagatatattctgcacttggctttctaatacttgtcctcaagaaaacagaaaaaaaaaaaaaaaaaaaaaaagcagccatctgaagaatggaggtaagacacccagaaactaatctgtaaactttggactataaccctaaatcaattatggaatgttagctattcaaaggatagcgatattagtttagtaacttatatattaagaaataggccaggcgcagtggctcatatctgtaaccccagcacttttggaggctgaggtgggtagacagcttgagctcaagagtttgagatgagcctcggtaacatggggaaaccccatctctaccaaaaaaaaaaatacaaaaattagctgggaatggtggtgcacacctgtagtcccacctactcaggaggctaaggtgggaggattgcttgagcccaggaggtcaaggctacagtgagc

SEQ ID NO: 63417 - DNA, 548 bp, Homo sapiens
tacaaattaacaacgtgactccttaaagattttgagaacttaaacacactgtactctgaccagatatcttttgtagagaacaaaataaagtggaaaaaaatcatagagtatgccctaattctatccatcaaaagggcagagacaccctagtggtaatgagcacactcagccagtatacagcttggcttctaaatatcattgcccaataacgtgaactaggaatcgttggtgaaatgtctgtttccagacctggtgcagggaaagtacaaggtgaacttaggacattttgtgccctggttttgaatgacactgccacttggctctgccatttagtttctgtgtgaccttgggaaagtcacttaacatccctgtgctttagtttcctcatccatacaataggtcttataataacagcatatacctcatagaattgttgggggaattatacataatatatgtgaaatggttagacaagtgccatactaggcactaagcacttaaaaacgcatcaaaaagcttccttgctctaaacctccacttaacatttt

SEQ ID NO: 63418 - DNA, 1717 bp, Homo sapiens
tcagttaaaatgatgggctgcctcttgacactgtgaatgttttgctgcgttcagacatcaaaggaaaactgtcatgaacatcaggtaaaggcagcagaaaaggaagcacagtttggtgtttgtttcattacacagctcccaaaggggacaatcgaatactaagcggcaaaaaagttgtgggagacggcctctctccaaccggaatgtccaaagacacctgagtgccgaaaattcccccatactcaacgtctgaattctcccctctgccctctcctcttcgtcggaagaaaatccgctaacaatcccatgcctgaccaagtgggaaaagctttcaacttcactctacttcgtccaaccctcgggataacgcactcccagatcccgacctccccttgaacctgccctctgagatcttctagtttctcccgagggtccctcagaaaacccagcccgttcctccccactgccccttaaccccttcccctgccccaggccccgtccgcgccccagcgcagaccatcacccgccgcctccccgacccccttcccggagccctcaacgctggcctgcccctcggggcctcctcctcgcaaccccacgcgatgttcctcccgcccgcggccccctccccctccccgcgcctcaccactctccctcagcagcgctcccgcgagcaaggccgcgccccccaggcgctcgccctcgggggtccctggcggaggggcccctaggcccaccacgcccccgcggataaagggtgacgcagcggaccccgcccctgccccgcgggcccggccgcctcgctcacccacacgaagaggctgtctgagagcaggtactgggccacatcgcgggcccggggtcccccggcgctcggccgggcgggcgccggcggctcaggctgcagcgaggccgttagctggtccggctcgccggggccggcctcgggctggctgagcgcgcggtaggcgctgatgatggtgcccagcagggccaggccgctgaggcccgtgtaggtgcggaggctgggccaggggaagcgctcgaggaagagcagcggcatggcggcagcggcgacctctggcccccaggcttccctgcgctgcggccgggcctctgcggcggcctcgcgaacggcgcccacgggctctggcgtcgctgccgctgccgctgccgccgccgccgccgcgccgggccgggccgggccgctcctggctgctggcgccgctccgccccgcgctgctcccgctgctgcccctgccggcgcggaagagcctgggcgggctcgggacaggccgccgcccccagcgggacgctggcgggacgggcgcaggggcgcggccttcgtcccccgcccccagcggtcgcgccgccgcctagcgggcgtagccccgggcctcaggccggggggcgggcacccagcatcatccgccgtccgcaccacggcttggctgggcccgcagacacagagggcacctgctccggccgcggcgcaggggtcactcgggctcgcaggcgctggcaggcgggcagggcctcagggcgcggggcaccctggccaccaggccgtcggccacttgccccccccccaccccattaaccctctgaagaggttacccccagcactcctaggggccgcgcagcttccctggtgcccgaaaccccagaagaaagaatattaacagtctttcaagtttctgctgtttgctagtagcct

SEQ ID NO: 63419 - DNA, 2183 bp, Homo sapiens
agctagatctcgaaaccttactgtcagagtgaaatctgcaaaaatgatactaggttataccattcgtatcacatcaacactcacaaagcaataccatgtacgtgatgcgaaagcataaacaattcactggaaggattaaaaaaacacacattttgaagtcggttacctctggagaggtggggaaaggatgagttaaaagcaaactccgtttttccccattatgaccgaatacataggatgggaacaagccttcctttcagaaaaggactctaaccctggaggctggaggatgagaaaggggcctgagagagggaggaaggcgcgcatccgccagcgggagttggaggcggggaggtgcagaggcgtgaagcgcgccgaaaagccgggggcgcgtcggagagtctataggagctttcacgagagaaatgcccgccaaggccgcgccgcacttacaggttgatggtgcgctccagggtgaggggcttcgtctgctggatgtacttgttgccgaactgagtgaccccccggggccagccggtctgcgagcgattgggcggtaccacagacatgctggcgagctccggcgctgacggcgagcagaaagtggcaggcagggtagactttccccgtgcgggaagcggttatctgcaatcccctcagcggctactgcccgccattaacaggacagcgcaagaggaggcgtaggcacgccggaagtgaacccggagcctctggcggcaggaagtagaggggcggtggcctgccagaccgagctccagtgggccaattgctggtgggatggctgcaatagctggagctcccattggtaaaccgggtataggttccgccttctcttactttggtgcttcccattgggtagggccgggaaacacgataaaggggacatgccgggagttgcagtaccctcaggaaggtagcgtcttgatctgcgtggcgtggttctgtgccttgggaagagatgaatgggaagcggccagcggagcccggcccagcccgggtgggaaaaaagggaaagaaggaggtgatggcggagttttcggacgctgttacggaagaaaccttgaaaaagcaggtggctgaggcctggagccgcaggacgccgttcagtcacggtaaccgggtgctctcagggaggggccgccacgcagaggtctagggatctctgaaaaagccctgggactcgcgcccagccttgggcagcggggccgcaagggaagaggctcttagaggactttggccacctcctactctcctgcctcggctgctgctccctttcactccaaattcggttgcaatttagaaacgtgagaagagggagaaatggaggccggagagttttgggaagcagagggtatgcaagagatagttgcattctggagtcaaagattactgagttagaatcctctcccctgattgggcgtcgccaggcaatggaattaaccttattaaacttcagttgcttcctaagtaaaatgggatagttcataatatttacctcggaaagtcggtgaatgggagcgacacactaatgcttgcaggcttcagtaaatgtttccctgagtaaggcccaatacacatgtggacaaatacaggagtggctgatgtcatttctcctgcaagggcattgctcagctgtcccaggagagtctagccagggcatttgtcgtgagctgccagcttgactccctagtgtactcgtctctacgcgcctgtagtttgactccatgatgtatgaaaataaacgcgctttgaccaaggaaaggcgcctacgttgaacgattccagcctcagctttaaatatcaccttaggtgttcagagctctgcttcatgcgccaggcatccccttctagagtttgccgtaatttttctttccgttgtcaagtgctttgaagaggtgagtcctgggtaggctggatgcctatagaaaacgatagcttagtgtttaagtgcaggctctgtactctcagtttcttcatctgtagaatggggagagtgataatgtctccctcagagctgttaaaaagattgaatgagatcatgggcctggcacctggtaggtggtgctgatgattacaggatggtgatctagccagccggaagcagtgggtaaatgttggggtagaaatcaaggaattagaggtggttatgcccgaactgaact

SEQ ID NO: 63420 - DNA, 939 bp, Homo sapiens
actccagcctgggcgacagggcaagactccgtctcaaaaaaaaaaaaaaaaaaaggaagaagaagcagtgttagagagtcagaggaattccgagttccaagtgacaagcagaggcccctggcttgaatctggggtcggttattactgctaacccgaaccaaaccccttccctcaggagacgtctcttttctaagctccctatgtccagggaccccgacctcgcctgactccaagtgcctgatgacaagaaaacgtcaacttctcagaaaagctcttcctctaagaccccactgtcctctgcaggatggagccacaaggtgctcgccgaccggttgccgggcaacacgggctgggggcggggtcggagaggggacgggatcccaggggcgcggccggcggagatcctgtggttccctggggcccgggctccctgcgggtgggagcggttaccttgcccgtttgggtggcggccgccaggcacgggtgagtcccgtcgtagcgccctatggccaccattcgggggctgattttgtggcgcagtttcagggtgaacacaggcagcagcatgatggcggcggcttaggggaggagggctggaagctggagacaagcgcagcggagctggcctcacgcgcccgggcaagaagtgcagggacactacctgcgcggccccagccgcctcaggccggacgcgaaacagcccgggacgaacccgtccaggtaccgcctgctcctcctgcggcggcgcagacccgtccgctctttttgcggctgcgcggtggagcctcggcgccttctgtggctgcgcagtggagcctcggcgccttttgcggctgcgcagtggaacccctgctgggccgcgggtgcggttgtttcccactgcagtaatttactcctgcgggttgaactctactgacgagcctacatgctcagcccaga

SEQ ID NO: 63421 - DNA, 479 bp, Homo sapiens
tctggcccagaggaagctacgatttgaaaccatccctataaagtttataaaattaatcagctgacaagggagggagagaagtgaaaataaaccaagctttcgggacattcagcattaatcactaggtcaccttgctccctggcctccttcctcatggtcattcactgcctcttgccctagaatgacgtaaaccctgccaccccttaactgctctatagataacaactggaatgttgtgaaacgttgttttccatttgagatagtcttccagtcctgcgtaacagtgaaactactgacgtcagctgatcggaaggactccgctgacatcagctggtcagaaggacaccatgagaagctgactcaccaaaaaacgcagtttccacatcctgacgatttcattcctcttaccccaaccaatcaatggccccaattttccagcccctcacctgtcatgatcctcttaaaaaccccagcccagg

SEQ ID NO: 63422 - DNA, 580 bp, Homo sapiens
tgtattaaccacctagcccctgaatgcacctcagtttgaaatctttaattcaaagtttcccaagaattcatcagctctggatattgttgactctaaggtgattcccaaattgagacggggccgtttgctcctggctgagctgggaactgaggggcctaaggtctacactttccccagccccctgcctcccaaccgctgacctctaggtcctgtaattctagcactggggccaagcacttcaaagccaaacaagatctaaatttagttggcacacatcctctttggcctcgacctgttttcttctgccaagcagaggcttctggactctgctcacttcctattaaaattaacaagcgttgcaggcaggcatcaaaggctgggttgtgcctttaatattctaggcaggcccaggctgtgatcacagcccctcccgcttcctctcttccaactgaactggggaaagtggttcggctgggagtgccagaatcagaacattggccatccttgtctgtttgatatctgcacgaaggaaaattccagggccagtagaacatccccacagcaattttcttcaaagtgc

SEQ ID NO: 63423 - DNA, 10963 bp, Homo sapiens
tagggctatgttaggctttaagataaactcatagtgttcttagcacaaatcttgaattacagcaggtgctcaatattattccccatgactactatggcagattagacatgcttgaaatttgttgactcctcccttcaagacagggggtcttgttcccctcctcttgaatctgggcaggttctgtcactgcttgaccaatagaatatggtgcaagcgacctgtgctagtttcagggtccagggcttaagagacttgcagctaccacttccatctcttgaaactctcaactgtatgacctgactctaattgccctgaggccaccatgctgaagaagccacatgtagagctctggtcaacagttccagctgagcccagcctccagccatccctgccaaagtgccagatgtgtgactgaagccatcttagattctccagaccagcccatccaccagccgaacagcaccaagtgacctcagctaatgaaacaaaagaatcgcccaagtgagcactgctccaactccagacccacgaatccaggaaagacaataagatggtcattgttttaagctcctaaattgtgggtaattggttgcatagctacagataactggggcaaccattgccaaatatttgaaggtaactgttcacttccagattgaacctgcctacctctctcagctgatgctcacatgatagggttttgggccttaggacccctgtgatcagctgtcttctggacaatgggagcccaacaatgaacacagccttcagggcagaggggggttctgcccaactatgccagttaggactctatctggaataatttaagcaaaaaaggaaatgattggctcataatggcttcaggcatggctggatccaggtgttccaagatattgtcaggctccatttcctttgtgattattttatttttgggctcttctcacggagccaaaaagctttagaaactcactcagcttcacattctctcaggtacaagtccagatggaaagactatctgccattctcccagcattcccagcaaaagtatcactgattctctttggttggtggctgtgtggcccaatcagagccaattactgtgactaggtaggtggaatggcctaggagctcacagatgggacatacgccatcaaaaccatatggactggtaataaggaggggtagttcttcaaaggaaaaccaaggatatcatcacaggggaaggacaagtggatggctgggcagcagatctatatatatccacccctgcagctaaaaggagaatgaaaaacataacctctctcattctacatggcatacctctcttaatgcagcccagggtcacgtcatcacttcacattgatgactcacaacagatattcagggggatgtttttccttatctaatatcgcttggtttcactccctcatcctctgccaagtcagggatgcaaacatgcacatgggtcctccctcttcacctctgtcccaagcacagtgaagcttctgggggcatggagatgaacagactaggcctgtggcctgctccaccttccctgagtcattatccttctctcccctcagagtcaaagtgattcaaaagagacagctcaggcccacaagcaagttttaccgccaacatggctggcacaaacccagggctagaaccaatgctttagggctagaaccaatgcttttgagggcaaaataagcccttctgtttcttcacagagttggattgtttgccttgagtgcataggtgaccatctgagttattagcaaccagggatttggtatataatactgtgcatacataaataacaacaacaaaattggtccactgcccagagagctctcgatccacagagctgccagacatcatgagatttcaaaagatcttggctctaaaatcagaggatgtttggatataaattctagtacaacccagtcatttgacagatgagtaaaccagggatcagaagagtccaggcatgtaattgccccaaggtcactgagtaagtgagtggccgagtgaccactgaaatttagtccatctgagagctcgcccccctgccctgtgcggtgtttttacaagagtgagcacgcaggttccagggtggtcaagaggtgtttactttcattttgtagtcggccttcatacaaggtgggggctgggaagggaagagcagtccaggccattacccccatgaattcatttgacaaatatttattaagcgtctactgcaaacttggcccggtgctggaagctgaagacacaattccagaggcagacaatgactgcccttggcatttccagtggtcaggggttggtgaggaggggcagagacaccaatccaagagtccccgcagtttatacataccacaggcacggaaagcgccaggaggggaaagaacaggatgtttaccagcaccttccacaggcagccacggtcatgggggtcaggacagggtccccagaggaagtgacgattcggctgagctagaaagacatttccacaggaacttacagtaagggctgcaaggacagcctgtcctcccccgcccaccacctcactaaactttcactgtggcaatcggcattccctaagcctgccaggaagcttccagtaaccacttcctgactcctagcatgacacacttcgggccttccaaggttgacgatctaaggcccttacacagcgccagacacgcgcaggcagggaggcaggatgtgcctctccagacaggaatgtggacgccacctgggctcttcccctcagcctccacaggggaagaatattcttgtggggtttttcccttccaaatgtctcagggcgattccagtgttcccgctagttcctccctcccaggctagaacacaaatccttcccactccctgcctggcaaacaccttctgaccctcaggcccaaggcaatggcccacctcctcccaggctggatggggtctcctcctctctgttcccccagcccctgagcttcctgaggaccaagcttgtggcttcttctccttactcttcctccttggtgtctctatgttagagggccgttagcatctgctggggcctggtcgcattcaccctgctctgccactcactggctgtgtgactctggacaaattaacttctctggacctgcagtttctcctctctacaatgagaatactggagagtccttatcttatgggttgctacagaattaagtgacatctcacacacaacacacttcctacagtccctgttacacgctaaaagtactcaacatgcaacggatacgtcatcagtaaccaccccacgggtttactgtgatgctgcacaattattaagccttggctgctacagagttgtaacctgtctgcacttccaaccggtttgggaatgcaagcagcattcccaagtcccgctttcacccgcgcgctaacggctcaggttcgagtacaggacaggagggaggggagctgtgcacacggcggaggcgcacggcgtgggcacccagcacccggtacactgtgtcctcccgctgcacccagccccttccgcgccgaggcgtccccgaggcgcaagtgggccgccttcagggaactgaccgcccgcggcccgtgtgcagagccgggtgcgcccggcccagtgcgcgcggccgggtgtttcgcctggagccgcaagtgactcagcgcggggcgtgtgcaggcagcgcccggccggggcggggcttttgcactcgtcccggctctttctagctataaacactgcttgccgcgctgcactccaccacgcctcctccaagtcccagcgaacccgcgtgcaacctgtcccgactctagccgcctcttcagctcgccatggatcccaactgctcctgcgccgccggtaagaggctggggatgcccagtgtagactgtagcgctagagaagcaatttctgacccctctttctttctctggtcactcaatttcaggacaggagttgctccttcccaaagagttttggggtatctttctctccattctaggttattcggagccccctttttaccgttaaggagatctgagttaatggcttgctcaagttcccaggaatcggttgtggactgaggaactcggccccgggctcttagtacgccgtcccttgttcaggtatccagggacggttctcacctctgtcttttctccttgcaggtgactcctgcacctgcgccggctcctgcaaatgcaaagagtgcaaatgcacctcctgcaagaaaagtaagtgggatcctctctttcctctaccccttccctgtcctccagcctgtcccctctccaccatcctcaggggaattaaagcagtctggggatgccccattgcgcggaaattgttgcctcctcagtgatccttatcagggagagcaggaatccttattcccggtgtcgctagtactcatctctgccgcctcctgtctgcccccaggctgctgctcctgctgccctgtgggctgtgccaagtgtgcccagggctgcatctgcaaaggggcgtcggacaagtgcagctgctgcgcctgatgctgggacagccccgctcccagatgtaaagaacgcgacttccacaaacctggattttttatgtacaaccctgaccgtgaccgtttgctatattcctttttctatgaaataatgtgaatgataataaaacagctttgacttgattctgtctctggtttcctttatatgccttaaaaataacggactggggtgagggattgaactgggagggcagagacctgggctgtggatggaaatgtgagccgttaagaaagagtgcattctggcaagccaggctactgcactgagcttcagcttctgtaaaactgaatggcgctgtgccagatcatatgggagcaggagggacacatacatgatcactttcagtttcacgtcaaatgtggcacagaaacttctccattcctcacttttactttcaatttccctgcccaacttcagttcttcgtgggattttagacttgaaagtgactacagagggtgaaatccaactccccagtggctggaatctgacatccggtttcccaaactccctgtggggaatgaccagttttgttttgttttgttttgttctccattagtcacagacctaaactctggtaaaataaggagttaataagaaaatgaaagtttaaaagacacaaaatacaaagacaattttttagattcaacaggaacttttcaataaatatatgaacaaattaacataggaaaaataaaagaattaccaacactacacatttgtccaagggtgtgcattgcatcctggaaacagttctcagactggccccagtgcgtggctggcacaccctgagcagcactgatccagacatccccacaaggaaccgtcaggcttgtgctgcccagtgtcactgacaggacactcactcgcacacccctgagagctccctgttttgccttggttctgaatctttgtaagttcctcccaaggtcaggctgaatttactcctctcaaatttcagccgttggctacttaaaccgtcaaagtggctggggatgtggagggaaatgcccagcatgttcccagcaagatgcagtgtgtgtgatcatgggttgcagaagacgttcttcctgtctgcccacgcaggggtgatggcattcagcagtttggagggtgtggtggcgctctttagaaaggagtgaagctctgagtgacttgtaattaaagccaacggttagtccccctggctatgcggagggaatgttatttgatgttcagtcaaagaggaggatgagtgccttggcccaggaatcaggagcacacttgcctgaaggtgctccttatagagttttagaaggcaacctgagccaagggcatgggttttcatgtcaggcagtcctagttcacagcccactttaccacttcctggctgtgtggcctgggcaagtcactcaacctctctgagcctacatttcctcatctgtagaaaaaagatggtatccctatttatggattaaatgagatcttggcctggctcctggctagggtttaatgaccactaggatcactctgtttacatggactttgttggagacagaatctctcttgataagctcttggggaaaaacgggtctgggaagaattactctgggtcagaggctggggagtggaatgaagctttcctgactgtgtaccagggggagggtggatgacttcctgcacaaagccctctgggattaagatgctgccacagcatttgaacaaacgtaagaaccattctaatttttcctatcatttgaataccccatgagccagtgaaagagtgaccgtgcagggacgaaactgattctgtcatcttccagatgtcattttcccttccaaatgtctcagggtgattccagtgttcccgctagttcctccctccccaggctagaacacaaatccttccccctccctgcctggcaaacaccttctgaccctcaggcccaaggcaatggcccacctcctcccaggctggatggggtctcctcctctctgtttccccagcccctgagcttcctgaggaccaagcttgtggcttcttgcccttattcttcctccttggtgtctctatgttagaaggccgttagcatctgctggggcctggttgcattcaccctgctgtgccactcactagctgtgtgaccctggacaagtaacttctctggacctgcaacctgcccaaggtcactcagcttagaagtcagaggctggaaccttcactacagttggcctctcatcttggctacagctggcagatcatgatgtcactgggctctaagccctgcctctcagagttcagagctgggtcagcccttggtcagttagtccaattgtgtccctggcttgagaggtggcatactgaagccaagagaggtcacagagctatgcagagagcatgactgccagctcagtgctctttctactgctgcctcactgccagattttcagtgtccttgtttttcacggaacatggtgacatagggtggtggttgagggcattatgatgcagtcagcatgcattggtgcaaaacctagctgtgtcacttatacctgagtgacacaacctctctgtggctcagtctcctctactgtaagataggctgaataatagggtctggctggtgacagcaaatgacttaatacatgcaaagaacttagaatggcacctgccatgtatcaagcagactacaatattatctatgattttattttattttgttttattttattctattttattttattttatttttttgagacaaagtttcaccctgtcaccctggctggagtgcagtggggtgatctcagctcactgcaacctgcacctcctaggctcaggtgatcctcccatctcagcctcctgagtagctgggactacaggcacatgccaccccacctggttaatttttatatttttagtagcaatgaggtttcaccatgttgtccaggctggtcttgaacttctgggctcaagtgatccgcccacctctggctcccaaaatgctgggattacagacatgagccaccacacccaacctagctataattttattatctttattcatagcatagggacgtttttctacctccagaccaataagccaggcctgctgttcctagccatgtgagctctacattcctcatcaactatctgagcatgttaactgtggtccagagagtcttcagtcttcccgtgaaattctgatcagcactggacatagaaaaccatgagcaggacagtccacgcccttgtggtacatacaaacagatgcctgccatatctgctaccacctacaccacaattttacctaaaaattctcctttaaatgattcatattttccaagatatatttgtattactcatggttttccccaagacacagaaccaataaaatgtccctagatagatagtgataaaaagaaagctttaagaaattagctgatgtgattgtggggatggctggtctaaactttgcaaggctggctggcagcatgggaattctgtcagaagttgatgttacagtctttcatctgaaggcggtctacaggtagaattcctttctcttccagggacctcagtctttccttttaaggccttcaactgattggatgaggcccacacacattataatgagtaatctgctttattcaaaatgtattgatttattttattttattttttgagacagtctagctctgtcacccaggctggagtgcagtggtgcgatctcagctcactgcaacctctgcctcccgggttcaagcaattctcctgcctcagcctcccaagtagctgggattacaggcatgcaccaccatgctaatttttgtatttttcaaagagcagctaatttttgtattttatttaacagattaagcagctaatttttgtatttttaacagagaaagggtttcaccatgttatctaactcctggcctcaagtgatccacccacctcagcctcccaaagtgctgggattatagacatgagctaccatgcccagccaaaacctactaatttaaatggtaatcaggtctaaaaaacactttcacagcaacatctatattaatgtttgaccaagcaactgggtatgataacctagccaagctgacccataaaactaaccattgcagtccaccacttgttaatttggcatacataaacatctccttaaactatacttaatgttaaaacaaggtcacacctccacctaatgtgaaacaactgtcctgtgtatgcctgaaatgacacaaactctctccccaaaagtgactgcaaaatccttgaggaatgttccttgacatcctataacttaaatactatgatataaagttagcaatatttaaatattgtgatgtaaagttaatacatcctctgttacatgacaaagggataagagatggaagaaaacaaaaatatttgccacacatgcatacacacacacacacacacacacacacacacatttataacaacataatgaagaaatacccataacaatgacattcctcatttccttacctgtaactggtcacatggtcatagctgctatttataactttcttcttttatgacctattattccatttgctttcagtaaacacctcagccaatggtggttctttacttggtggggtgacctaaaccttcattctggaagggtctgggccatgcattcctgtcccagttgggttgttaaagttttccattggcttcaatcacaggacatggtagtaataagagacaccctaagggatctcttgtattccagacatcctcctccttaccttgattgcagagattgtgattaccaagaagtagccacaatcaccctagccagaatagtgactcctttctttgcctgttttgttgttgttgttgttgtttcttttcttttcttttcttttctttttttttttttgagacggagtttcgcttttgttccctaggctggagtgcaatggcacgatctcagctcaccacaacctccgcctcttgtgttcaagcaattctcctgacttgcctcctgagtagctgggattacaggcatgcaccaccatgcccggctaattttgtatttttagtagagatggggtttctccatgttggtcaggctggtctcaagctcctgacctcaagtgatccacctgcctcggcctcccaaagttctgggattacaggtgtgagccacagtgctggcctctttgcctgttgatccagaagtctaaggactcaatgtggcctggtgggagtcataacttccagtttgatggaatcattgtgtctcccaaggaagcattcctccttttggactaataccttgagaccagtaaagcataaagtcatggggacaggaagcagatattttgattctacagatgagtaagatttttgtaggctgactcctctatttgctcatacaaccaccatgatcaactagccaacaccacaggtctctgtgactcatactattctttttatttgagatagggtctcactctctcatctaggctggaaagcagtgtcaccaacatggctcactgcagcctcaacctccaaggctcaagtgatcctcccacctcagcccccaaagtagctacaactacaggcaggcaccaacacatccaactgatttttgtatttttggaggggtagagacagggtttcgccatgcttgtcaggctggtctcaaactcctgagctcaagtgatccacctgcctcagcctcccaaagtgctaggattataggcgtgatccactgcacctggcctgcaagtcatcctattctgctttgactgtgccatccatgacaataaccaggcccatgctgcctttggcaattaagtgctgtcctttggcccctgccacattggggccaaattattgccattgcatataggattcccaattcagtggcagcagtttccactgaatttctacctgcagaaaagagtgaccacagagctcttccaggatgctagggcgcccctcacaaatttatttctcacagatgtggtgaaagtggtgtcctttggacactcccaggttgaatgggcaggtaacacttgataaatcccctctgatgtctgttttactcaaagactactgatttaaatgttaatcacatcttaaaaaataactttgctgcaatatctaggctggtatttgaccaaggaactgggcactttgcctagtcaagttgacacataaaattaatcatcacatatatttaaatgaacgcaaagtctttaccaatgctaaaatcaagaatcagtcttacttacagacatatcgattactctaatgtgtattttgtgtatatacacatatttaataaatttcccatctccatcacttttcaagctgtccagggtcgagattgatgcttctccctgattaaaaaattt

SEQ ID NO: 63424 - DNA, 3256 bp, Homo sapiens
tggttaaaaagagatcggcacagactcaatgttgtgcattcagccgggaatattgaagagatcagcaatattgaagagaaataaccatttatcttgctttctttttttcctttctttctttttctttttttctctttcttctttttctgtttttttttttttttttttttttttgacgtgcagtggcgcgatcttggctcactgcaagctccacttcccgggttgacgccattctcctgcttcagcctccccagtagctgagactacaggcacccgccaccaagtccagctaattttttgtatttttagtagaggcggggtttcaccatgttagccaggatggtctccatctcctgacctcgtgatccgcccgcctcggcctcccaaagtgctgggataacaggtgtgagccaccgctcccggcctatcttgctttttaattttatttttttagagacgttcactccctatgttgcccaggctggactcgaactcctaggctcaagtgatcctcccaagtagctgggactacagcagtaggcgccacctcgcccaccttgctttttaatttaaagcagggtctgcatatcatctgaagtaatctctctttggggacaccccgcatgtccagaactgccatccggtattgtggtggccctaaggctaggggtagcatggagacttaagtgcaaaggaggacctggacaaatgtgcccacacatcctctcaggcgaggagaatggacaggagagagaggccgatccgtgttccccgtgttgctatgtaaggaggtgcgggaccgaggaacctaggtgtggacagggacaggcaaggcgggggacgaagagaaatgaaagccacatcggtggcggatgttctgaacacaactcgctcgctaccgcacgttccccgctccgcactcagcggatcccgggacggcagcaggtgggctgcacacggactctgggacaagtcgagctgaaaaccgcggagctaggggtggggtggagacgcccgcgacgccaaggctggggtcccggaacacgctgggaggagggtggaaggcaacctcggggaaactgggaaaggcggcctggacttcgggaacaccgcgtacctgcgggggcacagccccacccgagcgaacgggctccaaaggggaggtcccgcggtgcccaccgcgcagagctcagggggtggtgcgcccggcccttctgcggcgcacagcccagcccaggaacgcgggcggtgcggactcagcgggccgggtgcaggcgcggagctgggcctctgcgcccggcccgacctccgtctataaatagagcagccagttgcagggctccattctgctttccaactgcctgactgcttgttcgtctcactggtgtgagctccagcatcccctttgctcgaaatggaccccaactgctcttgcgccactggtaagggaagctctgcgccctggaatccccatttcccagccctattacagagggtctctgggtttcaggaagtcgcattttaagttctgagcgacggggactccagtacttcgttagatgctttcttcctgatcacgcccctgagagcattgccctcatccctgggcctctacgtcagagttaagaatactgaggctcaaggctgaactgctccacatcacccagttggtcatgggcctgctggctgggccccagtgctctgtccaggctctgagcaatcagtgtggttgggggtgctggaaacattgactcttcagagttcaggacagaaggttctggctcgcagtctcaatattcctgggttgtatgtgcacgtgggaccttcctggtgcggtaaaacaggagggtccttgcccttcccagcgttagtggagaggacatggggcttctgttcctctgtcctgagtgggaaaggagctctgagggctggccctgcacagaggagggggcactggagactcactgacccactgctgtaccttctgcatctcactcactgcccactgcgttttcctcttccttgtaggtggctcctgcacgtgcgccggctcctgcaagtgcaaagagtgcaaatgcacctcctgcaagaagagtgagtgcggggccatctccaggaatctggggctgtggctcaggttgggagggaactcaaggctggccctgagtgcatccttctggggaactgggctttctttgccctcattgcccgtgtcattccctctccaggctttctgccctaaattcagatggggcaggacagcatttttctcgtgggacacaaaccccaactgtaccccctatggtttcagaacagagctgtgccagacgaaaaaaagcatcctctgggtctgggttctgagctcgagccaggcttgctattagggcagggaggtgcccggtcaagtctactgccacctctcactctccccttcttccccaggctgctgttcctgctgccccgtgggctgtgccaagtgtgcccagggctgcgtctgcaaaggggcatcggagaagtgcagctgctgtgcctgatgtgggaacagctcttctcccagatgtaaatagaacaacctgcacaacctggatttttttaaaaatacaacactgagccatttgctgcatttctttttatactaaatatgtgactgacaataaaaacaattttgactttaatcttactctgttcttctttgtgtgtcttggaaaaaacggactgggtgggggttgaaccgggattttagagaccaggctctggatggaaatgtgagccactagcaatgtgaacactttcaggccagccaggttacctcactgagtttacacttctgtaagatggcattccactgtgcacaccatattggtgggggggcatatatgatcgcttccagtctcatgtaaaatgtggcacagaaactccttccctcctttttattttctgattttcctgctcaacttcagatccacattggattttaggcttaaaatcggctacaggccgggcgcagctactcaggaggctgagtcaggataatggcatgaacctgggaggcggggcttgcagtgagctgggatcccgccagggcactccagcctgggtgacagagtgagactccctctcaaaaaaaaaacaaacaccgggcatggtggctcatgcccgtaatcccagcactttgggaggctgaggcgggcggatcacccgaggtcaggagttcgagaccaggctgaccaacatagagaaaccctgtctctactaa

SEQ ID NO: 63425 - DNA, 1469 bp, Homo sapiens
gccagacggtagtggggtggccggctaggctgtggggagcatggagatttatctgcaaaggaggacctggacaaatgttcccccacatcctctcaggcgaagagaatggacgggagagagaggccgaccagtgttccccgtgttgctgtgtacggaggagccagtccgagggaccgcggtgtggacagggacaggcaaggcggggaaggaggagaaacgaaagccacattggtggcgggtgctctgcacacgactcgctccctaccacacgccccccgctccgcacacgaccgatccggggactggagcaggagggctgcaccgggactccgggacaggcccagttgaaaacggcggggcgagggggtggggtggagacgcccgcgacgccaaggctggggtcccggaaagcgcggggaggagggtggaaggcaaaggcaacttcggggaaactgggaaaggcggccgggacctcggggacactgcgtaccacccggcgcacagcccctcccgcgcaaacccgagccaaaggggcggtcgagcggcgcactcggagcggagctcaggggatggtgcgcccggcacttatgctgggctcagcccagcccagcccaggaccgctggcggtgcgaacccagccgggcgggtgcaagcgcggggcagggcctctgcgcccggccccctcccctgagtagaaaagcagccgcaggctgtggcgctccaccacgccgtccgggtgggcctagcagtcgctccatttatcgcttgagatctccagccttaccgcggctcgaaatggaccccaactgctcctgcaccactggtaagagaagccgaccctgcgccctaggaatcccatttcccagccccagtactgagggtctctgggtttgaggaggtcgcatttaagttctgagcggaagggaattcctttacttccttaggtgctttcttcctgatctcccctctgagagcactgccctccctcctgggcctctgggtcagagttaaggatactgagggtcaaggcagtcccgctccacatcacccagttggttagggtcctgctggctgggccccagtgttctcctccaggctctgagcaatcagggtggactgggggctggagacatttgagtcttcagggttcagcacagaaggttctggctggcaatctcagtattcctgggttgggtgtgcccctgggaccttcctggtagggtaaaacaggagggtgcttgcccttcccagcgttagtggagaggacaggggctttccctgagtgggaaaggagctctgagggctggccctgcacaaaggagggggcactggagactcattgacccattgctgtaccttcttcatctcactcactgcccactgcgtttttctcttccttgcaggtgtctcctgcgcctgcaccggctcctgcacgtgcaaagagtgcaaatgcacctcctgcaagaaga

SEQ ID NO: 63426 - DNA, 1082 bp, Homo sapiens
ctggaagtcctgggcttaagtgatgctcccgcctcagcctcctaagtagcttggactacagcttcccgccacctcccccatcttgctttttagtttaaagcagggtcagcacatcacatgaagtcatctcctttttggggatatcccacatgtccagaactgccagacggtagtggggtggccggctaggctgtggggagcacggagatttatttgcaaaggaggacctggacaaatgtgcccccacatcctctcaggcgaggagaatggacgagagtgagaggccgacccgtgttcccgtgttactgtgtacggagtagtgggtccgagggacctaggtgtggacagggacaggcaaggcgacagcgaggagaaacgaaaatcacatcggtggcggttgctctgcacacaactcgctcgctaccgcacgctccacgctctgcactacgccgatccggggacaggagcaggaggctgtggctgcactcagacttcgggacaggccgagctgaaaaccgtgagaggggtggggtggaggcgaccgaaacgccaaggctgggttcccggaacgcgcggggactagggtggaaggcaacttcggggaaactgggaaaggcgaccgggacctcggggacgccccgtaccccgggcgtaaactcactcccgcgttagcggccccaaagcggggagggggtggtcccgtggtccgcacccaggggagctcagtggactgtgcgccttgcctttctgctgcgcaaagcccagtccaggtcatcacctcgggcggggcggactcggctgggcggactcagcggggcgggcgcaggcgcagggcgggtcctttgcgtccggccctctttcccctgaccataaaagcagccgctggctgctgggccctaccaagccttccacgtgcgccttatagcctctcaacttcttgcttgggatctccaacctcaccgcggctcgaaatggaccccaactgctcctgcgccactggtaagggatgctaggtttctggtccttaggatacctatttccccgccacaggatagatgtccctaggagtagaggtgtttttt

SEQ ID NO: 63427 - DNA, 1296 bp, Homo sapiens
tctgggggcatcccatattttccaaactgccatcctatagtggggtgcccgtcgaggctgtggggagaccccggagagatttatgcaaaggaggacccagacaaatgtgcccattcagcctctcaagagtgaagaatggaagagaggggggcagagccctgtgtcttccgtgttgctgtgcgcaggagaaacatggccaaaggactgaggtggggtgacagggacaggcaatgctagagatccgaaggtcacatcctcggcctgtcctttgcacactactcccttgctaggctccctgctcccgccaatctagacagtggcgcaagagactggggttgcactgggactccaggaaaggcttagctgttgacgaaggaccggggcggggccggggggcggggcgaaggccaggatctccaggtacccggaaccccaaggggcgggtgtagcaggcaatcttggcgaaactgggaagggcgggcaggagggcagggaagccgctcacccaggcacaaagcgcctcccgcttgagcggactccaaagggacggtccgcggtgtgcagcgagctgcgctcaggggaccttgcgcccggcccttctgctgcacacagcccacccaggacctcccgcagcgctgacaggcggggcgggtgcaaagacggggcggggtctctgcgcccggccccctcccctgactatcaaagcagcggccggctgttggggtccaccacgccttccacctgccccactgcttcttcgcttctctcttggaaagtccagtctctcctcggcttgcaatggaccccaactgctcctgcgccgctggtaaggaacgccgggttccgtgcctggggatgctcgattcccagacaccatagagagtgttcctgggtttgagaaggtcgtattttgagatctcaactgtaggggactccttgacttagtccagtgctttcctcttggccaagatcctgagagcatttccttcctctctgtgcctctgtgtcagcgttgagggtactgaggctcaaggctgtcctgctccacgtcatgcggtttgtcccagggctgttggctgagccccagtgctctgaccaggctttgagcagcaggattagataggaggcaggggacattgcctcttcggggttcaggacagaaagtcgaagtcgccgtcttcccaggctgtgcctggagcctgggactttcctttggagtgcaaacaggaggctgcttggccttcccagcatgaagggagaggacatggggcttctcttcctctgctctgagtggga

SEQ ID NO: 63428 - DNA, 4010 bp, Homo sapiens
agatggccccgcactcactcttcttgcaggaggtgcatttgcactctttgcacttgcaggagctggcgcaggtgcaggagacacctgctagaagagaaaaagccagtgaacggtgagtgagatgcagaaggtacagcagtgggtcaatgagtgtccacttcccccttctctgtgcagagccagccctcagagctcctttcccactcagagcagaggaagagaagccccatgtcctctccattcatgctgggaaaaccaagcaccctcctatttctactccaaaggaaagtcccaggctgcagacatggcccaggaagacttcgactttctgtcctgaacctggaagaggcaatgtcccctcctatccaatgtctcctatccaatccggtagctcagagtcaggttagagaattggggctcagccagcagccctgtgaccaaccaggtgacgtggagcaggacagccttgagcctcaggaccctcaactctgacatagaggaacagggaggaggaaaatgccctcaggagcttggccaacaggaaagcactggaccaataaaggagtcccctttacctctgatagcaaaatacgacctcctcaaacccagggacactctctatggtgtctgggaatttggcatcccaaggcacagaacccgggcgtcccttaccagcggcacaggagcagttggggtccattgcaacccgaggcgagactagagttcccaagcgagaagggaagaggcagtgggtgcacgtggaaggcggagtggagcccaacagccagcggctgtttttatagtcaggagacggggccgggcgcagacgccccgccccgcccttgcacccagcccgctgagtccgcaccgcccgcggtcccggcctgggctgtgcgcaggagatgggccaagtgcaaggtcccttgagcgcagctgggcgcacaccgcaggacggcccctttcgcaccggctcgcgagggaggcgctgtgccccccgtgtgcggcttctctcaccctgccaggccttcccagcttccctgaggttgcctgctacacccgccccttggcgttccgcctaccccagtattctggctttcccctcaccttcaccaacgcccaggtctctagtcaatagctaagcctttcctggagtcgagggcaaccccagtcttgtgctccactttctggatctgccaaagcggggagcatagcaagggagtagtgtgcaaagggcaggccaagggtgcgaacttcgcatctctggcagtatccgccctgtccccgttcccacctcagtcctttggtcacgcttctcctgtgctcagtaacacggaagaaacagtgatctgcctctctcttctattctccactcttgaggagctgaatgggcccatttgtccaggtcctcctttgcataaatctctccagggtctccccacagcctagccgggtaccccactacaggatggcagtttggaaagtgtggcaagtccctagaagagggatcattgaaggtgatatgaagatcctgcattaaattagaaagcaagagcgctggttatttttccttccatattcctattactctatgttacacgggtctgtgtttggccctgtttaatcactttctgtctttgaaccctcacagcaaccctaaagggacatgagtccttttcacgaacccgtattcctaatctggacaatgacgaggagttcaagccactagcccagggtcagggagctgggaagtggcactgcttggtgtgaatcctgtcagcttccctaggtagagaggtcagtgatgaagcttctctatggcctaggtatgtttatctcttcactgcttgaaatctttcaacaaaaccaagcattacagtcagtcctggaagcaaaacagagacatagagggatatgaataagtatactttgatgggagggaggcagggtcctgtgtcttccgtgttgctgtgcacaggagaaacgtggccgaagaactgaggtggggacggggacaggaacaggcaatgccagagatctgaaggtcgcatcctcggcatgtcccttgcacactactccctcgctgtgctctctgctcccaccaatccagacaattgaacaagagactggggttgcactgggactccaggaaagccttagctgttgacagggggtgggcaggccccggggtgtggggcgcaggtcaggatctcggggcacgcggaacgccaaagggcgggagtagcaggtaatctcagggaactgggcaggcccggcagggtgaaacaagcagctcacccgggtgcacagcccctcccgcgggagccgctgcgaaagggccgtccccgcggtgtgcaccgacctgcgctcagggtactttgcgcccgacccgtctgctgcgcacagcccagcccaggaccgcgggcggctcggactcagtgggtcgggtgcaagggtggggcagggtctctgcacccggctccctcccctgactagaaaaggagctgccaactgttgcgctccaccacgccctccacgtgttccactgcctcttctcttctcgcttgggaactccagtctcacctcggcttgcaatggaccccaactgctcctgcgaggctggtaaggaacgcccgggttctgtgccttaggatgccaaattcccagacaccatagagagtgtccctgggtttgaggaggtcatattttgcgatctgagctgaagaggacttctttacttcctccgctgctttcctcttggccaagctcctgagagcatgtccctcttccctgtgcctctatgtcagagttgagggtcctaaggctcaaggctgtcctgctccacatcaccccgttggtcacgaggctgctggctgagccccaattctctaaccaggctctgagcagccggattggatgggaggcattggataggtggggacattgcctcttcagggttcagcacagaaagtcgaagtcgcagtcttcccgggctgtgcctggagcctgggacttacctttggaatacaaacggagggtgcttggttttcccagcatgaatggagaggagatgggtcttctcttcttctgctgagtgggaaaggagctctgacggctggccctgaacagagaagggggaagtggacactcattgacccactgctgtaacttctgcatctcactcacaacacactggctttttctattccttgcaggtggctcctgcgcctgcgccggctcctgcaagtgcaaaaagtgcaaatgcacctcctgcaagaagagtgagtgcggggccatctccaggaatctggggctgtggctaaggttgggagggaacccaaggctggccctgagtgcctgcttcctttgtccccctaggccgtcactgcctttccagtcttctgctctgtccagggctcctgtggggctgggcagtctctcataggaagactcaccccaatatccaccagtcgtctcctgaaaaagctgtgccatcctgaactaaggatcctctggggctggagtctgagcttgagccaggcctgctgttgggagagggagctccctggtcaagtctgctgtgacttctctctccctttttccccaggctgctgctcctgttgccccctgggctgtgccaagtgtgcccagggctgcatctgcaaaggggcgtcagagaagtgcagctgctgtgcctgatgtcgggacagccctgctgtcagatgaaaacagaatgacacgtaaaatccaggattttttttttctacaactccgactcatttgctacattcctttttttctgtgaaatatgtgaataataattaaacacttagacttgattcccgttctggttcctgttgtgttttttggaatgagggactggggtgggagattgaactgggagtttaaagactgggctctggatggaaatgtgagtgctgaacagtctgagcgccttcaggtgagccccattacatcactgacctccatcttctgtaaaaggcacctgcact

SEQ ID NO: 63429 - DNA, 1322 bp, Homo sapiens
ccgcctctgcaggggtgatggcatattctgtactttgaaggtgtgtggtgttcattgagaaggatgaggactgatcattgctaccaacagctggtacctccagctatctgctcagggaattgttattcgaggttcaatcacagggaagatgagacaagtgacccaggagtcaagacctagatgggctgcaggtgctctttgtgatgagggaatttcagaaggtagcctgggccaagtgcaggctttggtgtcaaacaaccgggttcacagcccacttcactcctgactggctgtgtggcctgcacaagtcacttaacctctctgagcctccatttcctcatctgtatacaggagattatatttccatgtagggatcaaatgggacagtggcctggtactagtggcctagggcttactgaacagtgctattataatcatttgtccatgtggactttctagacagacaatcctattagctcccatcaagctccttggaaaaggcccatctgcctgcgggtattatgtggactggaagttggagatggatttggagtcttgctgttctggtctcaagggcatgtggatgacctcctgcacctgctctccaggataagacactgctccagcattcagacagagaacaagcctttcccacctttcaagtcatttgatcttcacacaaaccagacacacagtgaatgtgaagggtttggtgagatggtgctgtcttctagaggagttgtactgtcttctaaaggagttaagcaatcttcccaaggtcacatagtttagaagtaaaggcatgaatgaatctatgctgtgggtgtcctcatgccctcgccatagtgaaatatcacgctgtcaatggatgctaagcccggcctctcacattccagagctggaagggcccatggttagttagcccaattgtgaccctgacttgatagctggtgaactgaagccagagaggacacacagctattcagaggctctgactgccagctcagtgctcttaccactgtgcctctgtgccagagttagtgtcctcatgtgtcacacgacagggtgacacaggcttgtggttgagggcattattctatggtcagcctgtgtgagtgccaatcccggatgtgtcatcatgtatacctgggtgacacaacctctctgtggctcagttcctgcactgtaaaaggggcagaatataataatacatcatgtgctgtataaggacgttttagttatagatgcactgcatatagcatagtggtcctataaggttataaggtaactgtactctacctttctatgtttagctatgttta

SEQ ID NO: 63430 - DNA, 2872 bp, Homo sapiens
gcccacaaaatagggattcactccagaaatataaagccatgagcaagatagtccctgtccccatcacagaaacggaaggatacctgccagttctgctaccacctgcaccaatatgtgacttaacgtttttctttcaaatgattcctatttccttagatatttttatatgaaaagcaaactcattagcaccactgaaaaaagaatcagtttaacttccagacatagaaggttgccatcaaattatgcttattcatatcccctctgcatctctgttttgcttccaggactgaccttgatgcttggttttgtttaaagatttcaagcagtaaagagatgaatatatctaggccaaagggaagcttcatcattgctttgggacgctgaccggattcagacccagcagtgtcacttcgcagccctctgaccctgggctggtggcttgaactccttttattgttgttgttcagattagaatatgggttcatgaatagaagtatgtccctttagggttgctgtgagggttcaacgatgcaaagtgactaaaaagggcctaacacggattaatgttatgtagagtaataggaatatggaaggaaaaataaccctgtttcttgcattttaatttaatccggaatccgcatatcacctaaaatgatcccttttctgggagcattccacattttccaaactgtcatcctgtggtggggtgcccggctaggctatggggagacctggagagttttatgcaaaggaggacctgggcaaatgtgcccattcagcctctcaagagtggagaatgcaaggacgggggcagagccctgtgtctgttctgtccctagacataagagaaacgtggccaacagaccgaggtggggacggggacagggaccggcaatgcaggaaatccgagtgtcacatcctctgcctctcatttgcacactgctccctcgctatgctcaccgctcccgccgatccagggacgtgatccagggactctgggaaatgcaaagctacacacagtggagcgggggctgggggtgtgtagaccgccgggattccgagtttcccggcacgcctaggagagggagaggcaggcaatgtcagggaaattgggcaggcaagacgccagggacgccacgtactgccaggttctcaacgaggtggagccaaaggggcaggccccgcggtgcgcccggcgctgggctcacgggttgctgcacccggcccaggatcgcgggcggtgcagactcagcaggggcgggtgcaaggacgaggcggggcctctgcgcccggccctcttcccggactataaagagagccgccggcttctgggctccaccacgcttttcatctgtcccgctgcgtgttttcctcttgatcgggaactcctgcttctccttgcctcgaaatggaccccaactgctcctgctcgcctggtaagggacacctagctccgcgccttgggatgcccgtttcccagccacagtacagactcttcctgggtttgaagaagtcgcatttaaagttctgagctgaaggggctcctttatttcgttaggtgctttcttcccgatcacgtccctgagaccacttctcgcctccctgtgcctctaagttagagttgagggtactgaggcccaaggctgtcctgctccatgtcacccagttggtcagggggctgctggctgagccccaatgctctgaccaggctctgagcagtcagggtggatgggaagtggggggccattgcctcttcggagttcaggacagaaggttctggcctcctgtcttagccttcctgggctgtgtctggagcctgggaccttgcttgtggggtaaaagcaacagaacacttgcccttcccaaaatgaagggagaggagatggggcttctcttcctctcccctgagtgggaaaggagctctgggggctggtccttcagcacagaggaggggtcactgaagcgttattgaccagctgctgtaccttctgcatctcactccacgctcactgcctttttctcttccttgcagttggctcctgtgcctgtgccggctcctgcaaatgcaaagagtgcaaatgcacctcctgcaagaagagtgagtgcagggccttccctgcgaatctgggggatgggccaagttagagcagggaacccagagctctgcaggcaggggcaggccaatgaccagcttccccaaacccctccttcaacacctgattcagaatcagacctcaaattgccttaaaaatgggtgagtcccagcctcttattaccaaactagaaactgaggcccagagaggttaccagatagtgttgggaacaaagctggaatgtgaacctaggtctcctgcctcctgatgcagccttcttcacccttctgggtcctgaagcacttaaggcccaggatctggaagaccccgggtgatttcaaacctaatgatccagtcctttcctgcaggggtagcccagagcttccctagccttccccagaactgctgtgtcagggatttgccccctgtccggctgtgaagactttcctcatttaagggtaggttttggggaactggcctccttttgttcctgtacccccaatcactacctgtccagtcttctgtcctgtcccagactcaggtggggctgggcagctttttcatataaaaccctcatcccaaagatctaccagttctcttctgacaaagccatgccatcctgaaatgatggtcctctggggctggaggcagggctcgagccaggcctctgttggggcagggaggtgcctgattgagtctgctctgacctctcactctccccttcttctccaggctgctgctcctgctgccctgtgggctgtgccaagtgtgcccagggc

SEQ ID NO: 63431 - DNA, 1434 bp, Homo sapiens
ctgggcacctcatttgtcactgggtatatggcacttggttccagttggattgtaggaaacccagattgtggggcatttcagagaggggaccatggcagtgggggtctgggtgcaaggttcctgcaatcctgcctggccttggctctcctttgtgaactatggcaaactagggggtttattctaccaccctctagcaacggttaactggtagtagctgccctttttgtgtagctgtgacacagcctatactcaccagccacctatggtgcacctactgcatacacaggcatggggtcctcagtggtgaggggaacagggagcttatggactgctggggggagagagaattatagaataaggaatcttataaaggagaaagtactgtgactgaatgcacttggggtgagcccaaatgaagaactctttccactgggatctgagagctgcattcctgcagagggcacagctccagcaaaggtctggaagtggggaagagtctggcactgggggaacagaagaccaatgtgtgattgtgtgaggggagaagcccatgttccgtttggagaggggagggcagaggccacgtgcctcattcatctgaaggatggcctcactggctgcacagttgaatcacttggagaggctggaaaagtgctcgagcctgtattccacttcccccacccctgcagccccctttccaatttgtttagggctaagtgggcccagggaacctaccttttaatttttaataagtacctaggtttgcaacccactgaagcagtcacacggaattatttggtgaaataaaatggcctctgccagttcctctctggtctcaggaccaggagatattttccatcccagttggtatttggagcaactctccagcatgtggctgcctgtcctggtggccgagggaacctggaggtgcccagcttccagctggctgtggagggagagtctggcaatcctcaacatgtagtgtggcaaatgtcttcatggagaccaaaccaagctcagagggtagatttaagcttccttgggggctcatgctagggaaacaccacttcactgaagttgggttggtgtctgaggtgccattctctggggagagaatctgacagagacctcataaggcatgggcaggagcgtgatgtgggcactgccctgtttgtctgagatttgatccagaagccctggtgccaaagtcacaaatgcacccagccattgctggtttcataactctgttttgggaaactgcagctgccaaaactctcaagggataggcacaaaatgtttttgccaggtctgacaaacatgatcattcaacttacggcttcttttccaagtcatgtgtgaagtggcatcctgttcatccctcacccccagtcctgagccccatcttctttggggctgggtgggacatgattattg

SEQ ID NO: 63432 - DNA, 1374 bp, Homo sapiens
ttattcagctcaagatgtcgccatctcagaaaggcctcccttcaacatccaagcattctctctcccatcaccctgttttttcttcatagctcttcttgcaaagtgcagttatttattacatttttgtttcccctgccaacctgggaactcaatgagggcagcgatcttgtctgacgtggtcgccacggtgttgccagttcctagactaaggcctggcccttggatggcgctcaagaaggagtaagaaattcctttaacttagggaattctggaatcgctttctcccggcagagccgactctaaccaagtgggaaaggcgaggtccgtggctgcctgtggcccaggggtgacggtttggcccaaggccccacctccgccccgcccccggccccgcccctgttcttgtcctcccccacgggtctccataaagttcatttggcgtcgcaccgcgcgagggcttctgggagcggccagccttggccaatcaggaagcgggggagagcggcgcgagaagcggcggccgcgtcctcaagccggcacctgagcggcggagacggctgtagcacaaggtaagggtgtgtctggtcgcgtccttgcgaccctgggcttgtccttgaacccaggaccccgtgactgggtggagcgccgtccccacgctcggaaccccgccgctcatacttcccgttctcctcatggcagccgggcacgcctgacgccggcgacacaacgccttgtcgagccgcccccgaggcttggagtcgggctgcatccctgggggtgcctttcattcgtccactttctgaatgcagaacctaggcctcccgactcccccttccccactgtggtgccctcgcgccacgcccctgccctcacctccacctcgtgccccgcgagcccaccctgcctaagcctgcgccacaacgccccgcctgcttaccttcctgaccgtgccctgcctgcttgcctacccctcgtggacacaccctgtagggaggcgttgctctgcgagggaaggggtctttggggcgaggggaacttatcccaacccttggcttaccttttgtacatccaggaggatgctggtgattggaacccaggggtggcccacccttctctgtgcttactccatcccgttccctgcagaggcgatgcccaagttcactgggtttcttttgaaaaaattatggggccgaccccatgggtccttggtgaaagtatgaaagacacgttgacagagcctctggtctggatttgcccttctgccagacgtgggaaggaggttttatttatttaatttttattttgaccgagttgtctttcagcaaaagcgagggtcacctttttgtattctttccagggtatgtgggagggtat

SEQ ID NO: 63433 - DNA, 1202 bp, Homo sapiens
ataaaatccccaaaatttcattaattatattgttggcaatagtacttagtcatagatacagagaaattcacttgattcagatctgaaaatatttttaaaagggttttttttggttcacacattaagtgagttactcaccaacattgattctcctgctgtaaaggaccagtgaaattaaattaggattgttgaatgctaccaagctttattaatccatttaccccgcagaatgtgtttctggaattggcagtctctgaacattgtgccatactgagactaaatgtgcagccagccaaaacatttaggtgacataccacagtgcaaaatgtgtgcatatgtgtttgtgagggaggcattccagtgttgggagccagcctagggggagacctttgacctgtctggacaccaggaaactgccactgagcaagaatcattttcacacaaaaagtgagcaactttctggtatttttgtgactatttcatgtttgaataacttgccagtgtcctgctgaaatgccaggaaaacaagctacaaaaccacaagtgtgtcctgtctttccccatttggtacatccaggcaaaaacagaacaacattatcagaacatatgcagtgtttctaaaagccagcaacagtgcagtaataaacgggtgtgaagtcaaagcatattgccctcttccctttatgaaaatggggttcaaatgctccccacctgctcttaattcagctgtccaattcttcccatgctttttttcttaactgtgttcaaagagaaatattttccacacataacaaaaacttgaaagattcagatttaatttataataatttctccactgttttgtcattttctgtggattgttttgccttccttttaatttttagatctctccacacttccagtttatcctttttcttgtctattgagtttcttcttatcactgcttcccacctcaccttagactctcattgccctcctcttctcttagttattagttgagcagttctgttgattccctctcattagttcctctagttagcattcttctttgcactttagttcaatggttcagatgtggatataaacagaatagattggaatgggacagatgggtggctgatcatccctggttagcccacagattgaatgttccattacctctaatgtaattaagataagctgggggtgatgcaattaaggga

SEQ ID NO: 63434 - DNA, 969 bp, Homo sapiens
agtgtagtcccagcctgtagtcccagctacttgggaggctgagatggaaggatcacttgagcctgggaggtgaggctgtggtgagctgtaatcacgccactgcactccagcctgggtgacagagtgagaccctgtctcagaaaaaagaaaggtcaaagatagtgaagacaatgggttcgagtccttggtttcttggagagcacattggcagagtcatcagggtggaggaacatatgcttgtgtctgttattacaggactgaatttttattagaattactgctccagttcgtgttgatgcagcagggctgagcaccagctaaacctgcatggacagataaagagttgatggggatttatttatttatttatttatttatttatttttaacgagaagaggaagaaaggaagaaagtaaatctcactcgttcatcaggtagtgactactgatcatggttgtgctttctgcctggagctgccacgaagctccaggctaacattggactttgtccttcttaaataattgcttatctttttgctttctgtgtcatctacctcactccaccctggtacaagccagaggaaatcatcctctctctgaacccgtgtagcattttatccagggatttatgtcttcccgcctcagcttgtggctatttgttggctttacctcctctgatgaactgtatgctcctgaggacgatgaccatgccttatccttctgtgtgtccttcaaaatagccagattgtgtttaatgcattattaatatctacaagtgtggaatgaatgttggctaaatagggtttttttttttttttttttttaagtctgtccatgaagaaaaaggaactaggagtactcctttctttctttttttttttttttttttttgagacaagatctcagactggagccaggcaaacacagttcactgcagcctcaacctcctgggctcaagtggtcttcccac

SEQ ID NO: 63435 - DNA, 585 bp, Homo sapiens
aggaggtttatgcacctgccatcctcttcccaccagatcctaataattattggcaatatctatttatgtcatgcttactatgagccaggtgcttgcaaagtgccttacacagccttacaagaaccggctgaggtccaggaaattactaacccagtcccaagaacactgaggcacagagaggttaagtaactggccccaggtcacacagctggcaagtggccgattaagtctggctccagttgactcaggtcatggcccttgaccactgccctctgctacctctcgacgcagaggctgagtcaccttcccgggtaactgatgagtttgtaagtgacaggtttcctcactcccaggctttgttctttcccccaccatgctgggctaggcagggcaggggacatgcatggggggtagcattttgtggcctgagcaggaaggaccagggagactagtgtggaggtcaccaaaagagcaggaagagccccaaaagtcaccctggatttataggtgggaagccgaggccccaagcatgtagggtcatgctggtggccacaccaccattcagggagcctgggaggtgccttt

SEQ ID NO: 63436 - DNA, 2713 bp, Homo sapiens
gtggtaatgcagcgatagggagcagctgtaaatacagatgaagcttcgctggtggctcacctcctgcggtgccgcctggttcctaataggccagggactcatagtggtccgtggcccaggggggttggggaccccgtcttaagccatccagtttgtggcactttgttatggcagctgcagcagatgaatatacccaccaaccagaccaggctcctcctgttaccttcctgaccttgacaagctcctgacaacacctgaaaaaacagatgtcccaagggggttggaacaaggagggagccggggcaatgtcagttttgtttttcaagcctttttttttttttttttttttcctacagaggaggaggagggaacgcctacaataaagaggcctttatggtcccacttcaggaatcggagaaccccgccctcctcgtctcagccccaatttaacgggtgcatgtgtgagtatcttataaagtgacgcgttttgagggggactccagtgtgagcaggactgtggctgacttgtcaatcatcattagggtgatgtcccaaacgttcaagtctgaggcccagggaaattggcaacagctgcctggatgcctccatcctcccagcccaaggaaaatctggccttgctccttcgttgtctttcttaggagcacgtggagttctcctaggtgggcttgcactcggggtcgcccagccgttctttgagggttcgagtgggtaggcttcccctgtaggacgggcttccccgtaggtttccacgtggggccacagaggcaggaaaaggggaagtgggcactgacacctggggtgaaaaagggtgggggtgcggctttgtgaggaaagaatttgcagagactgctaaactggggtctgctaggataccccactccccaccccctgcctcgggcgccctcagccacccgagctgggggcctcgcaggtctcagaccaagctccccgcgcggcctgcagcgcacccaaacatggccaccgaacccgggttcccggggcacagccgcgcctctgggtgacgcagacgcggcgggttgcatcagcccgtgcccacgtgctcggtccgccctctgccacccggatccggacgccgattgggccacgttgggagagtgcctccgcctcagccaatgggcggcagccacagagcgttctgtccgcagagccgggcgcggggcttctataaaaggcgcccgaagcgggggcgcgcgccccagagacgtgaactgtcgttgcagagattgcgggcggctgagacgccgcctgcctggcacctaggagcgcagcggagccccgacaccgccgccgccgccatggagtccgagaccgaacccgagcccgtcacgctcctggtgaagagccccaaccagcgccaccgcgacttggagctgagtggcgaccgcggctggagtgtgggccacctcaaggcccacctgagccgcgtctaccccgagcgtccggtgagagcggccccgacttcccgcccctaggctgtggccccccgccctctgctggggatgccacgtccggctgccctgtcctgtggcctcctcccgctgacggctgcgatcgctcggccggtcacctcccccagggctgtggtctccccttccctgccccgccgacgcgggcgcccctctgttgcccagtagccgtcagtaatcagcagcctgaccttgggcgagtcatttcaccctccaagcctgtttctcccccagcggccaggcaactcggtgttcctaattgggcttgcatccaatggctagaagtaagaaaacatccgtgctgcaaaatgaggtttctgaacgcagcctctctgcagggagaggagcgggcaggtgccacccggggccgtggcttgagaaacctggggaccgcccagacactgtggacggaaggccccacacccagaagcaggacgtggctcttctcctccctggccaccttccgccgtgcccctccctgtcgcactggaccgagcagccattgccgagtcccggggtggagccccgtgcactttctgaccaagagcgactgagaagggaagcaggcaggagtcgccttcagtctggttttaggacggcagcctctccattattagcaagacttccttgctttgttttggttgacacatctgtcaacatcacccttagcaccgcctgccctggccaccacgtgatgaggctgtaagctggcccttcctgtatttactttctgctctgatattatgtaagtgtcagcagtgttcttcactgcccacgagcataattcttcatcacacaggagagggcatccgggcaggaaaagatagtgaagtcgtgagttccagcttgtggtagcgcctgtgtctgtttttgtttcatatggtcaagaatgttttagaagtgagttttccttctgagttgttattttgaaatttgcatatttatttagtaagcttgcattccatgtcctctagaattcaccctggcacatttttcagtttcaccatagctgcttccaagaaactgggtggctgtgttgccatgagaatgactattgggtacacaaattggtgaagcaggtgtagcctatggttgcatcatatggcaaaaggcaggattttggcggaggatttttaaggtcttcctttgatgaggaatgccgctcccatctgttcagtctgaagacctaacattgtaaacaaata

SEQ ID NO: 63437 - DNA, 1028 bp, Homo sapiens
tttttaaggtgcaatttcttgaatcctagttctgtagaagaaacactctacccccccgccccccccaccccccccccccacccctaaaaaatgagcttcatgatcaagtacattttggaaccctcaggctgatccaagttcatagatttcttcactgcaggccttctgggtcctttaatatgcctgaagctggggctttcccttcctgagaatggcccaggactatccatgtgcctcattttgggaaatttagtaatgagttactaaatcaacaccacctttggcattctacatagcaaacatactttgttagatgtgacattttacacactaaccaatggagataaaattttttaaatttatttttggccaggcacggtggctcatgcctgtaataccagcactttgggaggccgaggcaggcggatcacttgaggtcaagagtttgagaccagcctggccaacgtggcgaaatcctttctctactaaaaatacaaaaattagctgggcgtcgtcgtgggcacctgtaatcccagctactcgggaggctgagggaggagaattgcttgaacccgggagggggaggttgcagtgagccaagaccacaccactgcactccagcctgggcgtcagagtgagattctgtctcaaaaaataaataaatgatttcttatttatttttttttaccagtgctctacatgttcagagaaacttctctggtaaccaaccacagaaatgatccctgaaagtatagtcttaggagataaatattctttacatagccaggagggagatgagaagccatacctgtctacagtctgactgacaaaggaggaggctccaggtcccctggagaatcccaggttttatgtaataattacttggtccttttcaaagtacttggatgagtgtaggatagtctctttgtcttatcagctagtcctgcaatctaggtgttctcccattttgtagaggcttgcagagatgagagacctgtccaaggtctcaaacccctaactggcagttc

SEQ ID NO: 63438 - DNA, 744 bp, Homo sapiens
ccaatctcctcctcctccccggccctgctaaacacgctccccaggggtggtctctgctacccgcgcacattgggccttgagtcttggtaaatgtttctgagccaccagggggcgccagcggtgctggatgccacttcgccttttgcaggaaaactcccgccgctagcgggtgctgtggggcgtcccaggtctcgcgcagccacgccctctgtgtgaccttgggcttcagtttaggcttctgtaaaagagaataatgggcaaggtccagtggctcatgcctgtgatcccagcactttgggaggccgaggtaggaggattacctcagccagggttcaagaccacctgtctctataaaaaatttaaaaattagctgggcatggtggtgcgtgcctgcagtcccagctactcaggaggccaggggaggtcaaggctgcggtgagctatgattgcatcactgcattccagcctgggtgacagagcaagactctgttgctaaaaaataaaagaggataatgctatcctagacctatgtgttgcaagaggtcagacatggcaaaagcgttgagaagttaaagaaatagtatccttaataaatcagcaataattcagtaagaccagactgccatagactagatgtcatagtcattaatatataactgttatcccaaacgtatatgagtggggtagaaataaaatatgattggccataactatgattggtcatgattaatgttagatgaagtt

SEQ ID NO: 63439 - DNA, 368 bp, Homo sapiens
ttagagcatttagaataatgtggagtctggtcaacatagtgagacccccccaatctgcacaaaaaagacaaaaattagccaggcagtgttggtgcatgcctgtggtcccagctattccagaggctgaggcaggaagatcgttggaattcgaggctgcagtgaactgtgattacacaactgcactctggcctgggcaacagagagccaccctatctcaaacaagaaagaacaaactaaaaaaaaaaaaagaagaagaagaatttggagcaatctagttgtttcctataccagaagtctttgccaatctatttttttttaattttatttttaatttttgtgagtacatagtaggagtatatatttatggg

SEQ ID NO: 63440 - DNA, 1963 bp, Homo sapiens
cacccacacccaccccaggcctgggaggcaggggagcaccagcggtctgggagtgaaagttgcttccctgtgggatgtctgggaggtgggtagaaggccttcctagcaggcacagctgcccaccggatgagtatgtccagggggagaggagccccctgtcccaggatgtgggcaaaaacctggagaagctgaagctggactttgaggatggcccctgactccatcctgggacagccacctccccttccttctgccccctccagtccctcctctccttccctgctctccctcctacctctttccatctccccctttctgcctgtgattcctcctgtgactggggcaagatccttcacctctgtcctccctgagcctcagtggctcacctggaacatagggtgatgcctgcagaagtattttagggttactttatgagataaattggtagactgtttttcccgggtcagccagccaggggttcggtgaataggagcgaacgctgctgccattcccttctcccctagttcatcctggaggctctccgctctccccctggttctaagtcccctcctcctgcaccgtatcccccctcccatccaacccagtccccactgaggcactgagacagggtcttggcccagggtccccacccacctgagctccgcatgtgagccgaccttcacccgcctgcctcagtttcccgtccacgaaaggggtgagcgcccccacgtctcctgggactgtccttgggtccgatgcggggctgtggggaggtgccagggtgtgggcgcagcagggagcgggtgtgttaggcccccgcccatcccgcgcccgagccccatctggctcgggctggcacctcgaatccacgtgatttctcggcagcagccgccagttccatgcactggcggagcagctctaggcggcggcttctactttcagtttcgtgcagagcgcggaggagccgcgagcgctgagggtgagtgccgggagctctgagggtgagtgccgggcgtgccgcggggctgcgggacccgggctggggcgagcggaagggagaggatcggggttcgaattctgcacggagaggggtggaggggatgtcagaggccctggagcgggaggtgcgggtggccgggtggctggccgatggatagctgggtaagcggacagggcgccagtggcccggcagcgcgcacagcatgcgccccggcagtttggaggaagagttgccggcccgcagaggatggcagatgagggtcgcctggatggggggacacagtaagcggctgtgctcccctccctgcgcagctcctgtcacctaccggatccacccactctctctgtcttttactttgcaacttttcattgattttaaaacaattacggaagttacactgttcattgtacgcaatttagactttttggcctaaacaactttttattgtggaaaattccaaacatatacaatagtagaaggaatagaattaggttgagccttctgcacctgcgggttttcatataatgaagccccacctatccacgttcagcttggacagtcacgaccccaaggccacctactcacgaccccaaggccacctaggtagcccaatctccaccgctggttattttgaaacaaatggcagacagcatagcatctcaactgaggtatttcagaatgtactaaaagataaggcatcttttaaaaacaaaaccacagtaccaccagcatactacaaacattttaatagttattccttaatgtcaaatctccagattatttctaaggaacatttaacctcataagtgataggtgaatacgtgggtgttgttttgttacttgctttctgcattcccatgtggttttcggtcactattctcacccagaaagccaggacctgaaactggctggggtgatcattcgaggaggtcggaagaggctcctaccttcagtgccgtttgc

SEQ ID NO: 63441 - DNA, 2336 bp, Homo sapiens
cctgacctaattacctcccccagaccccagctcctaataccctcctattaggggttagagtttcaacatgtgaatttcaggggagcacaaatattcagtcgatcacattgtgtattctgggccccaaggctgtccattttgctttctgctgagaagtttagtggtaaggtcaaagggtagaagcgcagtaagatctagaagtcactgctgatttgccctacaagatgggcaaaccacttcccagcctgcagctctgagccctggatccaggccttctctcctttatgtctcgagcttactctgtcccctgccttacttaccaaaccaaagcaagactcctctgggacattcctgccaggccccatggcaaggttggagctgaggaggggacttccaaaccttggttttattttcactttggcttgggtgtgccaagccctggcagagccacagagttggggcacgaggtgccaagaaacagctcccagtctgaggaaggtgctctgccctgggaaggggataaagctgagtgttggttatggggagacatcctcaaggtctccatctaaatatggtcaacttggtggccttcctgtccccagggcctttggggctctcagaggacaagaatcactcagctctgatttgctggagaagcagagccccaggtgggaggtagcgaggagcctgtctctccccactgggagtggagagctgggtgccacagcctcaaacagttgttcccagacatcggcacatggggaaccccccgggagcttccaaaagtgccagtgcctgcgttctacctcctgggatggtgctgtgatgggtctggagtgtggcccattgggattttttaaagaccctcttcccaggtgatgccgtcgtgcagacaagcatgggaaccactggcctggaagccccagggagaggcctctggggcccgggacacgcaagcgggagccttctcctagcagccttgctagccacccaccccttcctgtgggtgctagacccaaactgccagggctgagcaggagaagcaaggccaccagctggccacctgctgtcccagccaggctcaggctggcagtagggcaccccagtcctggaggagggtgcatctggaaagcttgggggctcttggtggaaagttcaagcctttagcataggaaggtggctggggtgaaggaggcagtttaaagactagtgatgtgggctgggacccagattgctgggtttccaatgaccagaagaagatggccttgttggactggggacagggaccacccaggctcaggcctgaggctgggagtgcaggcatgaatttgagtgcaggctcaggaacatccccagggccgccaggcagggagacacctcttcaactcctggctcctcgactctagctggtgacctaggcaggtccctttcccactgtgagcctcaatttcctcatgtgtaaagcatcatgactgtgtgttttaagtcctttagggccctatctttgtgagggacaacagagacgatggttttcacaggcaacagtcacccctgcatcatcactgactcacagaaatggatatgccctataaggacatctcttgcttgccctgccagcatttgtgggcgggggaggaaatggccactaaccattcctgaaggcacctcccaagggacccctgaaaggagggtgacgcctcccagaaagagaccagtggcccagcccagccctgctcttagttttgtttcctctgctttgaatgccagcaaggcctttccctcccagggcctcagtttccccatctttacaatgggcacagcatagaccccatcactggggctctttctgctctgccaccctgtgcatccaggctcaggtgttatccgaagccctgacatcatcagccattcccggggggaaggcagaggcgctgggttctctgtgtccccctggtagggcttggtgtaggattcagggaggattggagggcctctgtggcctcaggtcctcccccagggtccccaggccctgacctgtccacctggacctaaagaaccaacaacagcagcactttctgtttctttgaggtatttctgtccaaatgtctgtagtcatgactggggtgcctggctatcaccccacaaactgcatcctttctgatctgcacagatgagaaaactgaggtcttgtttcccctccatcccaagacctaatgggacctcctccttaatctaatcctcaagaggcagaaacaggatggaaagcaaaggaatggcagccagaagtctgtggctccactcctgtcctctctgcatccctcacttccttccttaca

SEQ ID NO: 63442 - DNA, 1330 bp, Homo sapiens
gtctgctggccacccagggctgagatgcctggacagcagagccccacggagaatcccaggcacacctccctccccagggagctcagccagtgctggtccgggagagtaaggcagtggttaagagcttggggtctgcagtcagactgacctggatggaaaccagattctgcccttctttcttatctgctgtgtgtccttgggttagtcagtttccccacctctaattggtgctatgagaattaaaggagaccctgcgggtaaggcaggaagtcccatgcacccagaggctggcacagtgcctgacctagagtcagcctccctaaataacttactcctaatactttcttacagggggtgtgggaggttcctccccaaagagacaggaagctcccagagcaggagctgcatatttggcctctcaggccctgctccaggcctttgccctcagaggtgggatgctcccccaataggccctcagggaggctgagatgaagctgagcagcagtgcccacaggcctcacccaggctctgccctggctttctgccctcaggctaagtgagtgcagcttccggccagagcacgtgtccaggctggccaccggcttgagcaagtccctgcagctgacggagctcacgtgagtgacccacccagcccgtgaggacagcagaggggtgggggcaccctgccagagccacctcagtgactgacctctgtctccaggctgacccagtgctgcctgggccagaagcagctggccatcctcctgagcttggtggggcgacccgcagggctgttcagcctcaggtacctcctcccccgctgcctccgggaggggccatggcatgaatgggagcaggggtgggcactggagtaagaggcccccaggatcatggccccagtcatttcctgtacccacaaccctgccatctggaccctgagcaaaccctgtccatctgtcccagagactccacaaggcacacagagaaactgtccttccccacactggaggcctgtgctttgggatttaagaaaaaaagaaagaaagaaagaaagaaggtttcagaggatactgaactgaggacaaaaataaactgaaacgaagttcttgtctgtctgttcactatgatcattttaaaacactcagaaaaagaagataccgaagtagaaagaataattttttaaaactcctattcccagaacctaggtttgacagttgttcatactttttttatatttgcttctatttttatttttatttcagctgaagcggtttcaagtaagttatagacctcataatccatcactcctaaatatttcaccgtgaagctc

SEQ ID NO: 63443 - DNA, 807 bp, Homo sapiens
ctttgctacctgtctttgaggtatgtgggttagcagccacccccacaacacacagacacacattaagactgttggagaggtcaggaaagcaagacgagcaaagttaccggcaaaaaaaacaaaaaacaaaaacgagttatcctagctctcctctctttttatagccgaatatcatatgacgtgaagagatgcccaaaatgacagatcagcatcctgtctccctcgtgtagttaaaacaagttgatcttagggggagcctcccaccccattgtgaaaaaccaagtcgggagggtggtgcagttacagctgagcaccactggagggcaggctagcccactggcgattcatgagataacttcctccactgtgggacccagaaggaagttaggaggcgatgctggggcctgttcccacccggcctagtagcttgggatgtcccagcctaccagtgacatcacctgggtggcttggccttgacctttgcagccctccaggttgttcctggccccctgccaagcatgaggagaaagtcctccagccaagtgccaagcacccatacttcacacagggccacccttaccgggccagggtcagggcacacctagcaccaaatgggcccgtcagcctgctcatgggggaaaaagtaggcaggaagaggatccaagaagtttaccaggcaaccctgggtccgaaattctgtctccctttcctgggacatgatgccgagttgaccttggccttcagtgtgcccaagatcaccttcacactagaggggttgcattgcctcctctccttgcccaagaatga

SEQ ID NO: 63444 - DNA, 1605 bp, Homo sapiens
aatgccgagctcttttgctattgaaaaaaaaaagggaagaaaacactgcggccctaatcctgcccaatacaacccagaacccagccttgggtgttgccccgagggcgcagcgccgctcccatcggcgctgggggtccaagcggccctggggccccgcaggcccgggctgaggccacccctctgttcccgcgtcggtggccctgagcgcacggcgctcggaactcggaggtgccagaggctcgggcaaagcaggcctggggagggcgcgaagccgcgttgttccgatcctcagccacctgagtcccagcctggaaccttcggaccctcgcgttcggcccgaacgttcgggccccctcggtgccaggcgccccgagtgccgcggcgcgccgggcgcgggctgggagcggcggactgcgggcgggacagcgcccccgctcctcccgtgggagagcgcgcgcccctccaggaagctcccgcctcgcctcccacttccctccccactcccctcctcggccggagggaggagcccgagccgccgccgccgccgccgcccgcccgcccggcccgggaggaggaccggaccccgagcggctgggagcgcacgcgagcgggccgtggccgcgcgggcagcgccctgagcctgtcccgcgcccgcgggcccggccgagcaggagcagctcccggggatgcccgggcggctcggagcgcgggcagcggcagccgtgcggtgagggcggtggcgcccgcgggacctgcggtgagtggggcccgggcaggcggggcagcttggcgtgagtgcccaacttcggccttggggctgggctctttgatccagctgcgggtccgaaggaacccgggttccgcctcggggggctgcggcgctctagcccccgccgccagcgcgaacccggactccggcgcttcggtgactcagctccgacccggccacgcgggggcgccccgccggctcccggactgcggggaagggcgggcggggtccctggggaggggggcgccctcgggggtccgagcccagctgctttggggacccttccacccgccccgaggggcttggagggcgtacgggaggtggagacccgccgctgccgcagctgctgaaggcgtgaggtcgccctggctctcggcgggcgctggctcctctccgctcccctctgccctcctcccacccctcaacacccaccccctgccccaggcaactgccggagggccggctcccagccccggtactgggagcgcagagggggagtggagctgggcagcttcccagaagtcggagtgtgtttgcaaactagtttttgcgaaaaagctgtctggcacctgtgtgtttaaagggggtgtgggggtgggcatggagagagcgggcgaacaaggccctctcttattccccgtttctcacagcgatgctcctctgaaaatagaggggtcttacaccctcttccctgctcttcccaccccatcccccagcctcgctccacgtccccccgagttcaagaagctctcctatggggaaggggctgcttcaaagggggctgtgatttgcccaaggtcacagatgctgctggctctggtagctaatagggtgtt

SEQ ID NO: 63445 - DNA, 1128 bp, Homo sapiens
agtacttgatggagacagcgtttttgtttgaagagtccaatggctgtttattctgcaagaaagaggtgataagtacctgtaacttactgacctgctggaagtagacaaagaagctagaaaattagattgtgttgacttctaattcctattgtctaggtaaattttcacaagtctcttctttttcccttttgtttgctagggtaattaaaaacaaatcaaaagacaaacagcccagggatatcagggatacgggctctaactgtgaagagccctgtaggaatgcagaggacttacattaggaatgcttactttgtccttactgtgttccactttagaaagagtaaacaaatgctgtcagctttcctttactcacgttttccaaagtgactcaagtttaattatcaaactaaacattacattattttttaaaggatttattcaatttcttcaaatagggaattcatggaaaactaaaaccatttcaaaattcactttgtccaccaaacttagagtccaaattggcacaaataaagaacgtggttttcaaatctgcctgaccgtcaagaaaacaaagttcttatatttcaagccaaagtaactggtaacactgaactactgggtttacattggagaccgtcccatttaatttccagggtggtgggacaaaatgggctcagttcttacatagcacactacacatgttttaaaatacaaaacttacattgttgctccccaaataattgctattcctaacttgaaaaatgactccatttagctagtgccatgacacaaagtaatgagatctggtttcctatggaattgaattatgtgatggcaaactacttgagtgtttacatcactggccaccatatccttctaattctaaaattaattagattgtacatgttaaaacacaccagaatcaggtttctgtgttctgttgttttaaggcttcactttcagtagcaaaagcaataggtcaatccatttccttttgtgagtaaatatagattattgctttccaacattttttactctgatgttcaagtcacactgtacttcaaaatgcaggacagcaactaagaggaatttgccatctggctaactcatctatatttcaaataaaga

SEQ ID NO: 63446 - DNA, 3544 bp, Homo sapiens
tgaagactgataatcaactaaatggttttgacacaattattcctttcttatatcatgaagcacttccccacagggtaaggacatgaagacttcagttgagaaagataatcgggcagcctctactttcagatccttacaaattgttcgcaggtcatctaactaaaagactgtaaaagctgctgtcggctcaatactttgtatcaaaaaggagtctacccactgattcccttcaaatatttcagaagggtgccttccattttatggtgtccctgtggacacatgaatacaccaaataactgatgaatcgacaaatcttatgtcacaggtggtaggcaagaggtcatcgggaattccgatcaccaggctcgcatctggcttcttgggtcccactcctgaactaaccagtcgggctacccgagcgtgcgggagtctgagaaactgcattttaaaagggccccaggagatcttgttttccactaacattaaagaaccacgactacgaacaaacaggtctccccctttcctctgtgtggactgacagtcacaaggaccaccaactctcaagcatgacgcttcaactctctttgtttcttaagttttctgcaaaacgggccagctggcttgttttccgtaatagaaaattcgcttggcacagcaactggtacatggcacacaataaatgtgcttcccatcctgcactgccattctgggattcaaccatttccaaccagacgccgcacatccgagtgagtaacctggacctgttccaagacctctggaacggagcctgctactcacttgaaacctgggtggccctacctagcagaaaattggggaaaccccattaaacgcccggcagtgttgggcccgcctgaaagggtcctcgccgcgacccagatgccttcccgcgggcaccctcagctcccctcaggctgggcccgcaagccccaggcttcggctactccggacaaggagcgggtgcgcggactgagaacaggcctggccctaaccctaacagcagccgcagctcatctcttccgtaaggaagctggaacccaggtgtcgccgccaggccaggaccgaggccgcactcacctaccggcgcgcgggaggcgagacgacctcacctcggcggcgcccaccccaaaccgccaccgcagagccgctcgctcttaaaaaagaaaaaaaaatgaaaggaagaaagaaagaaacagaggaaggaatgaatgaaagaaagaaaaaaaaaaagaaaatagcctttgcttttgtatttcttttgacccttcagggcttcctgttcctcaccgccacaatagagtcccgccccacttccggcgacgtaacccaatccgcggagctcttcctccccgggagcccgatggaaatccggtaccctgaaaacgagccggagagacttgattgggccattcacgcctcaggatgaggactggccagtctgcgcctggagggcgggccggtcccgctgatcacgtgacacgatttttgaaaggtgattggctgtcaaggagagggcttgccaccgaggaaggggcgtttcctaggggactgagggagggctggggcggtacgaagcgggggtgggctctgcgcgtaatggcagcgccgtggcctcgcgtccatctttgccgttctctcggacctgtcacaaaggagtcgcgccgccgccgccgccccctccctccggtgggcccgggaggtagagaaagtcagtgccacagcccgaccgcgctgctctgagccctgggcacgcggaacgggagggagtctgagggttggggacgtctgtgagggaggggaacagccgctcgagcctggggcgggcggaccggactggggccggggtaggctctggaaagggcccgggagagaggtggcgttggtcagaacctgagaaacagccgagaggttttccaccgaggcccgcgcttgagggatctgaagaggttcctagaagagggtgttccctctttcgggggtcctcaccagaagaggttcttgggggtcgcccttctgaggaggctgcggctaacagggcccaggtgagaggcagctatctatctcctggggtggctcctggtaccgatggggtcctgacctactcaggggtgcccgggatagaaagggtagatgaagggacgctttaggagggttctttttgtggagtttacggtctaggtggcacggatgaggcatacctccccggggagatttagaaacgccttgggatagagagagaatggggctaggaagcaggagctagaactagcggaatgtcctactacggaagccggagctgaaaattgggtaaggaccttggggagaggggatttctgggcggtgatgggaagaagacacctccatccacaggaaagccagagtggggagtagtgaaagggaaacgggaattattccctctctctgtagatcgaccaggtgtcccagacacaggatccaactgcttccgggcttattgcccgagtggggtggggagagtctatcccaccaacaccccttgcgtgagtccaaattaggcatttgtctctcctgctgcctcactttccccgtctttggggagggaaaccgactgagaccgaggcggtcggctgagactccgaggtcctgtcttgtatagttctctgagagaggttgctccccctggagtgttgtactttgaactttgaagggttagaagtgtctgttatcgactgagtagaatcccgcagttttccaggccctttacctaccatctgttcttgcttagtggagtgacttaacctccttaagtctctactgtaaaataaccagcgcagtatgtgaaagtacaaattacaagctgcgtgaacgtaagttagtgtgattctaccaccaaacgggttgctgttgaggaataaaagtgaaggcactttctaaaatgtaaagtagtatgtagaggtaaggggtgggattaatacagtcgttgtctgtcacctgcggagtgctgggagccatattgtactgaaagcttcaaggttcacagcttcttaggtcatattaagatctaaacccatggtttcaaaccctgcttagatggggatggtgggatttccagcttttgctctcagagttttcatttactttgaacttcttatggtgctggcaggagttaccactgtaatatcttttccttcaggaattattttcccctaacagctgaaattttcctctaagtaatttgatctcaacattgtaaacctcctcccccttttgcatatatatatgcatggcttttggatgtctacaggcagtgaatatcatactttctccctcagttgtgatttgtaaagactgccttttttcctccacgaatactatgcgttgttgtggtagccctagactatagattatgaggcatgttggaagttgcttttaaatttctcttgcacagtggttctctttatttttccccttatgtggactttgcatttcctgggatggtatcttgctttgtagatccctctatgagattgtaagagacttgtgtccc

SEQ ID NO: 63447 - DNA, 3017 bp, Homo sapiens
tactgcagcctcgacctccccagctcaggcgatcctcccacccctcactcccactgcccttcccagtagctggactatagggtccaagccgccactctggctaatttgtgtattttttgtagaaacagggtttcgccatgttgcccaggctggtctcaaattcttgggctcaagctgtctgcctgccttggcctcccagagtgttgggattacaggtgtgagccaccatgccctgctcagatagtctttcaaccagaaaaaaatacctactttcaaaggtgtgctttcttaaagatcctcagtgcataagggaaatgtcagaatcatccagtgcttttcccagacttcttgacagttacagttcaggagttaatggtactctgtgtgacctaaacctacggttagatagctttggacatctgggaggcaagtaaaaacgcctcatcaagacaacctttctttttgtgggaaaagtaaaattccaaccaaatatttcacaatctacccccttcttaccttccccaatgaaataccagaggctttagagtctaaagacagaaacactcttgttgaaacatctttaggtagtttctgtttcagctggcaagtgtaatcttcatgcattaccaaatcagtattgttgacttgagattttccctatttaaacacaatcttcagtaagaagattgtggtctttggggtgttctgcaggcttttttttttttttctttggagacagagtcttgctctgtcacccaggcttgagggtagtgggatgatctcggctcactgcaacctccaccttctggattcaagtgatcttcccacctcagcctcccaagtagctggaattacaggcacacgccactgtgcctggctaatttttgtatttttttaagcaaatatgtttctagataatgttctctatcttgatagggtttgagtcacaggtatatgcatttgataaaactcagcacgttactgtgcttaagatttgcacatttcagccgggtgcggtggctcacgcctgtaatcccagcactttgggaggccgaggtggacagatcatttgaggtcaggagtttgagaccagcctagcccacatggtgaaaccccatctctactgaaaacacaaacattagctgggtgtggtggcatgtgccaataatcccagctactcaggaggctgaggcaggagaattacttgaacccgggagacagagtttgtggtaaactgggatcacaccagtgcactccatcctgggcaacagaatgagattccgtttaaaaaaaaaaaagatttgcacatttcagtgtatgtaaattcgactcctaaaaacttgaagtttattgaagtctaattagtgatatgcatgctgaattatttaagagaaagtatactgatgcctatagtttactttgaaatatgtaaaaaaaactgaatggattaatgatggataagagatggatagcgataaagcaagtttagtaaaatgttagtagtagagtctaggtggtggggataaagcaagtttagtaaaatgttagtagtagaatctaggtggtgggtatatagttcacagtttacagtgaactctaattcaattttctgtatgtttggaaaatttcataataaaatattgggagtggggagtaaatgtgatgatagaagctatctctttaacacacttagggaaaaatccgaaaacattttctaatgagagaacatcattaaaattttcaggatgttacacattttgctattcatgctatttgacttagcctttgtgggggagggttggaaaaaaagtcacatcctctaacactattttggaatgataaggtgaagattataacaatagtaatttagtgcccaaagtctggtttttcttctttatggtcactcttgtaatcagcttttccttcctaggcagtgtaattctgcagtcctattttcaaagaaaagaaagtgttctttctcactgatctgtactatggctgaatgcaagcaaatatttgaagagatgaatcattgattcctggaccatttgtcagagagggttagactagttggccagatgtctccatggtgagctgtttatgatggtagaggtctgtgttttataaagacagtgagtaccagaaccttactgctttaacaccaagcttaccaagaccctaagtttgattatttttttttgtctcagagcagctttaaaaaaatataaagcgttaggtgcttcatttacccccaagaaaaatgaaaaaacatgtaaaatgtaaaaatctaataaataatatagaaatggagagaatagtctttagtttcttttttaaaaaggcaagaatcaaaattaataataccacacttcagagaaatagatttgcaaaggaaatattcgatcataattatgctcttgcagcaaaattgttatcgagagtataatattaggctgggcatggtggctcacacctgtaatcccagcactttgggaggccgaggtgggcagatcacctgagatcaggagttcaagaccagcctggtgaacatggtgaaaccccatctctactaaatgtacaaaaatgagccaggcgtggtggcaggcacctgtaatcccagctattcgggtggccgaggcaggagaatcgcctgaaccggggagatggaggttgcagtgagccaagatcacaccattacactccagtctgggcaatgagagtggaactccgtctgaaaaaataaaaataaaaaagtataatcatattaaaagtattgccacttaggtggtaagaagagtccttctactaagcactggcatccagtgataaaaattattaaatcagttgatgtttgtcacagatgtgtatttaaattgtgtgactagctttttttttttttgtctcaaagttgacttcaccagctaatgttgtctttgaagttaaggtaaagaatataggtattggccaggcacggtggctcacacctgtaatcccagcactttgggaggctgaagtgg

SEQ ID NO: 63448 - DNA, 1060 bp, Homo sapiens
agatggactgtttggtaaatgattctgggataaatggctagctttctggggagaaatattatatccctacctataagtgcacatctgtaagtatatgctgtgcacatatagagtgtctgaaagaatgcatatgaactttttacttgttccacagactaagacaattgaggatcagaaatgtaagatttactttttatttacatattcattttttttaaaccatgtataattagtaaccctttcaatgaacaaacttgttaacatttttgatttagttggcaggcagttggagtttgaccttttgaagcattaacttgactgacttttctgtgtttctccccagtgacctgtgcatggattgtgccttgcagctggagacctgcccattgtgtcgtaaagaaatagtatctagaatcagacagatttctcatatttcatgacacatgtgaagaggcatcgtggacttttttctactcaattccagccaatgttgaaaagaaaaagaaaaaaaaaactctctaatcagttgtacacacattgaaacttatagccatggccagattttatgctaaaaatggtagtttgtcaaagacaaaattctcttagaatctaatccaacttgccagccctgagaaaatcccttttaaggccaaggaaagctgaatgctagcagccaggcctgtggtacttccatgagaaaccatagcagacaatgccctcccaagtactgaaatcacactggaatcccccttgttgggttcatttgattgtttaacacaggatgtgttgtgtcattctgaagtttttatttggggcagaagtctttatggagatgtaaatgacagcgtttctgggttatgcataacttctcactggtcagagacaccggtgtgtcaagcatggatattgcattgcaagacttgaatctataaaaattagaatcacacagtcagtactacaagcaaaacagagaacctgaaagaaggtgcacagactgtaagaaaaaacccaagtttgtgatatttcagtgattccaaagaacattctaggttttttgttt

SEQ ID NO: 63449 - DNA, 1603 bp, Homo sapiens
ttcttcaattctcatcttgtataattagtcaagaaaccaattactgccgagtaatctttatgatgcgaagattataacgtaaattacaggacatcgacttcttgcgatggggctttccttccacgaggggtaggaactgtcttgaaatcagacgtcagcatcacctggttcaagggataagggactggctctccagcgacttggcaacttacaagcgctctttaaacacgccttaaactacttatttaatcctccacactcagggaggcgcaatttattctcgagttgcgagtgaggaaattctggctcgtggcttcgattccttcatccgtacaatgggggcgacttgagacggagttcccacacaacgggtgctcgccgaagcgccgcatccctccgcactcccttccgggacttcctctccctgtcttgccccgccccggcatcggtaacgctcgcctgtgattggatgccggccggccgtgaggcggtggaaggggttgcggtggccatggtgacaggaggcggggcgccgcgcccctccggcagtcaccgaggcccggacctgcggcgtcggcggcgcgcgcagagggccaggcgggcgtagaggccggaccgacgcgtggcggcagagggtatccaaggccggacctggcgcgcaggcgctgacccgacctggcagtgagctggccgcggccttggctgagaggccttaaccccgccgggcggccgcgccctgcatgcgagttgggccgcgggcggggttggagcctactcggggcgactgcgatggacgccttagaaggagagagctttgcgctgtctttgtgagtagctcctccagggcgcaggcgacttggggccggaggcagcgggcgttcgccccggggcctgaccctataaaacaggtgtccttaggggccgggccgggccgggccgggcagggtgggggccgccaaggcgccgtcccagctccaggccttccttttgtagagtactaaggctgcaggtttcaggccccgcaggacaggagtgcgaggcgggtgtcaccgttgatcagcgcctccatcacaatccccagccgccaaccctcagctgtcagcaaagcctggaggggttgagcgcccgaggcccctccacccctccctggcccccgcctcccggactcctgaccaaatgaccccccccggcaggtgtttcgcccgtgccgggttcatgctcacaagcagacaggtatggggtgatagctaagagcctggagaacaagtttttattaaagtggagtcatgacattgaacgttcatgtcacaaacgtgccgagtgtgttttcttctgtttggacttactagatcagtcagtcattcttaatcgttgaagatgggtgatgggaagttcgttttgctactcttttttctcttgtgcatgtttgaaaacgtccatactaaaaacatttttttaatgcattatttgaaatagcacctaatccaggcatgtttttcagctcctccgcctctgatgcagaatttgatgctgtggttggatatttagaggacattatcatgggtaagcttttaagatactgtttttaaggacttgcttgttt

SEQ ID NO: 63450 - DNA, 2426 bp, Homo sapiens
gttgggtgtggttgtgcatgcctgtagtcccagctacttcgaaggctgaggcaggagaatcacttgagcctaggagtttggggctgtattacacagcagtggtgcctgtgaatagccactgcactccagcctgggcaacatagcaagacccctatctcaaaaaaaaaaaaaaagaaagaaagaaaaatgttttccagtgaagggaggtacattttaagagtgcattttaagaatgaccagggccaggctggacacagtggctcatacttacaattccagcgctttgggaggccaaggcaggagaatcacttgagcccaggagttcaagaccagcctaagtgacatatcaagaccctgtctctacaaaaataaaaataaaaaagttagtcagctgtagtggtgcacacctgtagtcctagctactcaggaggctgaggcaggaggaccacttgagcccaggaattccaggcagcagttagctgtgatcaagccactatactccagcctgggtgacagagcaagaccctacctctttaaaaataatattaaaaaaaattaagactagggcaggccagtattgagcagaaatgcagaataaccaataacctgtgttcccttcctatgtactctggaggtccacgttcccaccttcagctctgccttccccatgtcagaggcaagattccaagccagggctctttctagtccttcctttggttgttttctcatataggaaaaagaaggccgaggactggacttaagcagtggcttagtggtgacttcattgtgcaaatcatcttctctgccagcttcccagaacaatctgcggcactaggtcctacctccagccaatgaatgggatcattctggatgtcaccagcccaataggctcagctcatgatgacagaacacatcttggaaagactgactctgttatgtaactcttcatttatgttaagtattaataggtcaaaaccaaaatgacctaaccctcctggacctatttatcctgaaacaccttcttgtattcattaaccatagtactcctccccacctcaagtagacacctctctcaggagcttctgagtcagacgcctctggagcgagccctatgtcaggcactccacctggggggcccttccccagcatacctgctggtgtgtaagtgtggactaacccgccgccaccaccctctgttccagcaggctctgcatgaatctttgtgcacttgcacctctttttcacatgggccacagtttcagtacttcagcctcagtggggttcctgatgtttatctagggtgttactcaagcccagtttgagattttggagtctcctgtgatcacatcttgtctcggctgtaggaatcaacagaaggagacgtcctctacataaaagctccatgtgaaaagctactcctagtcttaacatttgcagtccttgtgtcactgtcttctggtcctgatgtagtcccactgtttctagaagtctcttttaagcattatttttgaaaaaaaaaatatttttatagatgaatactcaggctaacctagtggatgtgatcttggaacttccatgattatccacttaaagatcaaagtattatatgctgtgtgctttttaggtgtttgttagtactgtgaaggcaaaaatgctttctacattgacattcattcctattttactgggcacctatgaatgtatgctgtgtgctagaaatagactaaaacatattcctatagcatgttagtgtgtttgcatgtttgctgaaaatcctttgtgtataaaccagtttgtaaggttctctgggttaggtagggactctgcagtttcttcctgtcaaaatctctcctaccaagatggtgttccactgtccagcccagcatgagtagcaggtagagcacagctttactggctgtttgtatgctttggtttagtgcaatgtgtggtagattacttatcagaaaacatatatgtcatctctagaacgaagaaaaagcatagtagttcaattcccagtgtgtccctttgattttttttttttaatagtaaaaataagaatctgtactgacttttcacttggccattctggttttaaaggacaagctacaagctctgtgtttctgtactgatgtgtcacttattaaatacttttgtaccatgagtaaaacttcaggtgtttcgcaagaaccaccattctcaatgagttgtattctttctttaatgtagccactgccataaggttattaattattgctttggtcttttttttttttttttaaatgccacctctcctgggcttgctttcccttgctttgtctataaatgggaggtccaccacagcccaggcatgctgggagcacttgctaagacctgtggaccagcctgcctacttgagaaaaggccagtggacaagtccagagatt

SEQ ID NO: 63451 - DNA, 861 bp, Homo sapiens
ggagtccctcacccatcctggccggaccgggagcccccggccaaccccgtgggcccgcgcgtgctctcaccagctgcagcagcatgagcgccccgaggcgggagcgcacgaagcccaggtccgggcgcagcgccgacaccgaggcttcggcgccctgcgcaggactgctggtccgcgtgctaactttcgacgggaactcggccatggcggctccgcttgcctcccgaggtcgctacggccgccgtcgccgcccctccagcggtgggtgccggctcccgcgccgcttttcccccaggctccggatccctgtgtggctccaggcgctgcaggaggcgtcggggctgggagcctggggcgccaggtgcggccgagatcccggctccgcccccgccgccggggccgcccccttaaccctttgctcgccgccgccgccccagccgcgaccggttcgtgggcagccgcgtccactccccggaccagtaaacaaccccgggtccgtgaatcggctccgccagcaccagcctagaccgcttcgccggcctcccccggggcaagccgcccgctgggaatttcccggctctcgcccaggccgtggtagcttccgcgcctagggataaacttgtggtagctcgcgggggacaccgctctcccaggcgctttctacgcgctgtgcaccctcggcctaggccccggcgcagcgactcttgaagagtcccgggagaaggctggatgcggtggctcctgcctctgatcgcagcactttgggaggctaaggtgaaaggataatttcaggccaagagttcgagaccagcctgggtaacacagtgagacgccccccctccccccgtctgtattttatag

SEQ ID NO: 63452 - DNA, 2389 bp, Homo sapiens
gattctcccttctggcctccagacggaatgtaaccctgtgacccattttagacttatgacctccagaactgtaagataaataaatgggatggttttaagccaccaaatttgtagttatgtgttacagcagcaatagaaactcttgaatctccttggcagcatttccaccaagtgaccatcgatcctcgtcttgaatgcctccagcgacagggatatcactaccaatacagtcaccctgtttcctttccagcaaactctttcttctcccaaacccatcctctgtaactattcacccactgcacccccacctcgggccccagttcttggagcaaaaaggacaggcagacacaatcccaaccccttgtatatcaggcttttgtagacagataataattctcttccccaagcttaacaatctccaactttttcccttgatcagcttattagaaaggtctaaaagccaactctttctgaatgaggccctaggtaatcatttgcagagtgggatctcccaacccaaggcctcccgtcctgaggagcggatgacaaaaaccttatagagcgtcctccttccaacaataattctccaaaccccgccccctactccgccagtgccccattcacagcccgaaacatccgaccggtattagtaatagttcataataccaccacttgaggctcagagcctgggcaggcagctagaatttagcaacgttatttcgttttcattgtgtttatttctgttgatggtaagggaaactgattttccatttaaattatctgtgtattcagttgaaagcgccagtttgaccacagcagtgagtctcgctgcaccggatgggtttggttgtggataacctaagctgcaggccggactcggaactgcccgggacaccgcctctgggttctgagtcccgagcgtcgttgaagcatgagaggaactacatcagaccccaaaatagtctctcctaggaagtcaggatggccgagcggtctaaggcgctgcgttcaggtcgcagtctcccctggaggcgtgggttcgaatcccacttctgacaagcgctcttttccggtatttcagaagagaaatcttcgacgaccgcacaccaagagaggccctcaaacacagaggaccgtacgttttacacacaatccaaagtctaaatgaatgtctgtggggaagaaaaagtctgacaggacgtggtcgtgtgattctgaactcccaacttcggaggaggttgaggcgggaggatgtcgccaccacactccagcttaggcgacagagcgagattcttttttaaaaaagaaaatgctcgttaataagaaaatactcgttttgtaaaacaattaagattatgcgaacatatacgcacaagacatcataacctcattgatctgtaaaagaataaaaaaagattataagaacatatacacagaacacatacacacaagacatcataacctcactgatctgcggtgttgatgaggaaaagtaattgagctctgtcagaagtgggattcgaacccacgcctccaggggagactgcgacctgaacgcagcgccttagaccgctcggccatcctgactgcttgcagtgtgtggcgcataaagcctcttcacaagttctgcaatatgcgcatgcgtagtgggcagcgaagacccactcctagttgtccgcccggcgttgggtggagcgagatacactcacttgctccaatgggcgtggagagatgggacaaggaaggtcagcgcgatgcacctaggcgacgccagagggtgcgcaaggcctactagagaaggccgagaccgaagactgttacttcaatacacatgcattcgtgcctccagcctgtattcattctgcattcatacatgtactatcatgtcagctttgattcctgaaatctgcaagcaaccttgcatttcccttgtgcacaatgcaatcaagtccgtatacctgcactgattcgcagacatttccgtgggctggcgcccaatctaggtaaagcccaggtattgcaaggccgcctggcactcttaccgcgctctccttccgaatactcgccccagctgcagcttcacatttgtatatgtgttataattcatttactcaggctccgggatagaacgaggcctgcagctgcacagccagacccgccctattcctatgtccccagtgcccaaaccgtacccggcacacagtaggtacgcagggaagatcccatggattcattcttccctcgcttcctccttcctgcatcccctcatttcgtgactcatctctcttttcctggcccccgcggcatcttcctctcttcccttccaccccctctaggcttacgcacgccgcgcacaggctgtttccagggaccagaagacctcggtacc

SEQ ID NO: 63453 - DNA, 3652 bp, Homo sapiens
ccttttaacagtgatcaagagtgattggggctctcctaggcagggtggttagggagggcctctgtgaggagctgacactgagttcaaaaggagaaacacaagcaagatcaaagctgcaggtggcagcatttcagataaaagacatagccagtgcaaaggctctgaggcagagagaaatatagtctgttggagggacagcaaggccagtgtggcaggggtaaggtgatgggaaggttcaggccatatcacacagggctggagtgccagggaaaggagtttggattttcttctgtgatggagtaactgctgtgtttttgtttgttgttgttgttgttttgacacagggtccagccctgtggcccaggttggagtccagtggcacaatcttggcttactgcagacaatctcctggtctcaagcaatccctgcctcagcctcccaagtatttgggactacaggtgtgcaccaccacacttggctaatttttatactttttgtagagacaggatcttgacactttgcccaggctgttctcgaactcctgagctcaagagatcctccggccttggtctcccaaaatgctgagatgataggtgtgagccactgtgcccagcctggagtgttttaagcaggggagtggcatggtcctgagggcccttcaaaaactatccctttggctgctgtgtggaggatggacggcaggccaagggaagaattggaagtccagggggaaggccagggcagggagggtaagagatgatgatggctggaccagggaagtggagattgcaaaaggtggtagaattcaagattcaggatgtgttttggggtaaaacacacaagccctgctggctggctggtgtgtgtgtggggtgtcagggtggagagagaggatgtagggatgcaataggaggtcacgaaggccataggggagccaggttactagatgcttggtttcccttgaaggcaagggctttgaagcaggggctgctagcttcccactttcaccccattttgcagaccagggaggtaaggctcaggtgggctgagtgacttgcccaaggtcctctttggggcagaagccctgcactctccacctctgggaccctcccttcatttcttgcatcaccaacctttctgagtgcacatcattttagagagaagggaacagaggtagcgccagagctggagcccacaccagccccgccctgcctgctgccctcctggccggcctgggagaaagtgctcccttgatggggctcagcaccaggttcccacacagctctgtctcttgggtttgggtggatgatcaggtgtcccccctcgacacctttcatgtgacaccctcctggcctggaggaagccttgtacccctaggtccctgagaccaaaattgggaagggagaaggccaccatttctgtttatgtcctgtttccaccttatcagcagcctagacgccaacaatgagccctgtgggacaggcctcacccattccctgctccggacatttgtccagcttggggaaaaaaaagtcccctgggtggagcttgaaaagcccacaagcagctggggaagccccgacgtggctcttcctgtactttgccctactttgcacagatgaagtcagatggccaaatgaggacctagtgtttgtccagccaaggtgcctgaaaggggtaattcctagcattcctgggacttcagcacacatcaccagccctcccagggacaagtgtggcaagaagctgagtattagtgaatgtttcctttccatccattacctcacttaatgttcagcacagcaccacaacacaggtcatcattacccccattttacaggaaagtgaggctcagagagaccacatgaattacccagagtcacacagctgataaatggaacttgatttgtctggctcaaaactccttgaggccaggtgtggtggctcacacctgtaatcctaacactttgagaggccggggtgggaggatcgcttgagcccaggaggtcgaggctgcagtgagccgtgatcatgccacctcactccagcccgggcaacagagtgagatgctgtctcaaaaacaaaacaaaacaaaacaaaacaaaacaaaaccccttcttgaatgctgtgtgcctagcattgtgccaagcactttctttacattgtctccttaataaaggccatgaggccgggcgcggtggctcacacctgtaatcctggcactttgggaggccgaggcgggcggatcacctgaggtcaggagttcgagaccaaccttaccaacatggtgaaaccccatctctactaaaaatacaaaaaattagccagtcatggtggcaggcgcctgtgatcccagctactcggaaggctgaggcaggaaagttgcttgaacccaggaggcagaggttgcagtgagccgagatcgtgccactgcactccagcctgggcgcgacagagcgagactccatctcaaaaagaaaaaaaaaaaaaaagccacgagggcttgccaattcacatggcaggatggactttgagatgctgtttttagtcctgtttgttttcattattaaaggagatttaaaagaaagggtaggattttcccagtaaggcagtccaagtagcatggccaagcttttgttatttaggctctggttttcttggctgagggtggagggcagaagccacagggtgccaggagcaaatgcctgttaaagtccttgtttggacatcttgaccactgaggggagaagccaggccagccccaggggaatgggggaatctggaggtgaagtggatgaggcaggcaaagatgtctaacaggatggggtagggaaaatttggtccctcaggagctggagccaaagaccccaaggtccacccttggcatagagggagtcaggcggctcaatttcttggctatgagtggatcacgtggacagtgagcatttcagtgacgaccagaatagaccaaaggccaggagctcacttccaagttctctggactgcttctgcccatgccccctaagcctttggccaccctagaaggagaaccccaggaatggctgagacgacagcttaccaccctgataggcagggagtagagggccaattttttttgaaatggagtttcgctcttgttgcccaggctgaagtgcaatggtgtgatctcggctcactgcaacctccatttcccagttcaagtgattctcctgcctcagcctcctgagtagatgggattacaggcgcccaccactacccccagctaattttttttttttttgtatttttagtagagatggggtttcaccatgttggccaggctggtcttgaactcctgacctcaggcgatccacctgcctcggcctcccaaagtgctgggattacaggtgtgagccaccatgcctggctggccaattttaatttgagccctcgtggctgagtgcatggactctgggaccacctgagttcaaatcctgcttctgccatttgctagctctgtgaccttgggggagttacttagcctctcagttccccagtttcgccatctgtaaaatgggcttagtactaatatctatcttagaggatttttgagaagatcaaataagttaatacatgctgagcacttagagtgcctggagcagagtaaatgctt

SEQ ID NO: 63454 - DNA, 1860 bp, Homo sapiens
caaagaagcactatgaacttgggattgagctgatcagagctgtactgctggtagacttgtggaaagttctagacttgggggcagaagagccatattcaaatcccacctttgccacttttcagcacatggcctcaatggtttctccccctctccgtgcctcagtttcctcatctataaaatgggcatcattacccttatgatctcctggggctgaccaggacaccaagaaccctggtggctcagttcaccctgaggaaagggaatgagaagggggctcctgttcttctgtgctcttggaatttcttaccaagagcatgtgttatttttataataaaaaagaagctggaaaaaggtgtcggtgaactggaacccctggacacatttctcagcccagctggggagatgcttgtggttctggagagagaggaccacagtcagggcttgaggttgtttgccaggggatagggtgtgaggctgggtaggctctggatggcctctccctccccaggagccagctctgaatgtcattgcctaactttgagaagatagggatgctgcttccaggaggcctgccagcttgtatacctgaccaaggagaatggaaccccacccagtgcctggacaaacaggacaaaatcacctgcagaaacagctcctaccagacatgagattaagtcaaatggaaacttagctttcacaatgtcagtttctttttctttccttttacttattgacttttaattctcccatgtcccagatgaatcacaaaaagctgttatcagagatttcctctgattaccttgcctctggggagggaggtaaaggctttcactttccttttttgtacctttcataataaggtttgaattttctaaccttgtgtatctcttttccctgtttctgcccccacttcctcctcctgcaggcattaggtctctgaccagagatcctgccttttggggggttttcttcttggaatctcagtgtatgtgtattaaaaggaaacaaaaactgcagtcaatgttatataattttttaaaaataccaaagtgctggatttcaatacttttctattttttacagtgcatacatatatatgtatatatatgtgtgtgtatatatatcccccccacagggattacatttgcataatttaactttcaaaaggtgcaaagtaagaataaacagatgaaaactttccttccatccctgactcctgcttccttccccagaggcaagccctgcggtactggttcctcatgtagccctccaggaaattttctgcatatacaagttgatgtatacaggcattcccaccttcccccacctttctccttaaactgtcatcttctatgcatactggccttgttctttttcctcctccacttaacaatgtatcttggtggttgtttgcaagagcacagaaatgcctataaaatctggtcattttacagaaggggaaactgaggcccagagaggtctagaacccagtcttgaatcacggttcagggctccttcttcaagttgaaggtgaaatgggtagggataaacttttcctgctcagacacatccttttacaaggctccttcactgagtgaaatggaacttaggccaagatttatttgtttgtttgtcttaggtgcctcggattctcagaaggaaaacaggaaaccagtgcctcgctccctcagagatggctgccttccagcccaaacaggggtctggtctgtggaactccctccagctctgccacgataactgtgtggcctccggtgggtcgcctcccctctctacatctccccagctggaatttgttgctttctcttctgggttcccacaacatggtttataaccatttca

SEQ ID NO: 63455 - DNA, 1800 bp, Homo sapiens
cacacacacacacacacacacacacacacacaatcctgaggcttaaagaggtaaaataacttcccttcttcccttacatcacacagttagtgttgaaggcagaaatcataccagggcagctctgccaactcagagttcctaatgtaatccactgctcccttgcacctagatattaaagtgtgagcttaggcatcccaaaaaggctgggcccagagaaggaaggcagatagcccaaagacacacagctactgggggtgagtgggaagtggaacgtttcttaggctttttggatatttatcatgtgctggatgctggtgacatggagatgaatagaacaccttctgtttgctcccaagttgctcaggggatcttctcatctgtataatggtcggagttaggtgttggccagcacctacctggcttagaccattggtgcctccagagtgatgagcaatagctaggcaccaggcactgtgcagtttgcaagtgtattcttcatagcaacctaagaaaacaggtgcccttgtcccattttatagatgaggaaactgaggcatggagaggcgaaggagcagcagccctggcaccagagctctggtctgacccagcctagtcctagctatcccacagctctatctccttggcttgggaactgcagggcactgtgaatgagtatgggggaaggtagtgtataaatcatacttccgattattattatcagtggggtattggcactggaggggcatcatcaagtctgggtgggaagagtggatgtttggacagaggccctttcctggcctttcatcatccaaaacagagcagccaaactccttcctcagacaggaaggtgactcagatgttcctctaggaaagtccaagtccagctgggagcccagaaagtcccactggccctcccagaagctccttggtttctctccacagcgtggtctgagaggaaagttcccaggtgatttctctggcagggagacatagagctctcagcagctgaagaacaatcagaaaaaattttttaaaaatctcaatcctgggatccctagatatggggaaactgaggtcacagagaggcagtggtttacccaaagtcccacagaaagttagaggcagaggccagtcctatctggaacgcggaacggcactggccaaggctgctgtgtgctggaggctgaggacactgtgatgggccaggcccagggcctgccgggaagtgcttctggctcagcagggggcaaggccctggctgggcaaaggctgcatggcatgtccactctgtgctggagggaagtggctgcccaatggcccagaggaggacaccatgaaattctgtctggtgtgtgtgcacgtgctggggacatatcagggctctcagatgggggtctggaaagatgcattttgccaggtggagaagggaggaaggactttcctgtaggagggaacagcatgagctgaggctcagaggtgggcactttgcccagggactgtgaggtgcagtggaatgtatgagttgagaacatggatgttggaatcagactagttaagtttgaatcctggctctatcacctacacctgtgcaccttggcaagcattctaacctcttggtgcctcagtttccttctctgttttttgtttgtttgtttgtttttgagatggagtctcactctcgcccaggttggagtgcaatggcgtggtctcggctcactgcaacctccacctcccaggctcaagcaattctcgtgcctcagcctctcgagtagctgaggctacaggcacgcgccaacatgt

SEQ ID NO: 63456 - DNA, 2964 bp, Homo sapiens
ggctaacaggggccagagcagaggtgggagtgggtgcaaagcagggagcgggagaccgggaggtggaggcagggaggccagggctctctcctgggtcctgagctgtccacattctgctcatcatggtggtgggaggggagttctccactctgatgctgtggataacctggggtggctccgggcctcagtttccccatctatccatatgaagttggactcaatccttctttcagcagaccctgcaccaagcccctgctgacttcaggctccctgctgggctctggagatgcatagatcaacaaggtcccccaggagcttgggattctaagaggggaaatttaggggtccatcctgatgtgggcgaggcattctctggatcaaagaagagcttgtcagacccaggatggaggggccctgagtctctcccggccccttggcgccccgctctctattccacggcctgctggccttttgtgtgttgcccacttaggatcaagggccccaggccagatcctagggcatgttcccagcttgtggcaggagaggaggcctttgtacccaggcaggcccagtccagcctcccggggaaggtcccagtatgacaagcctaggatggtgagaagcccagggacacaaagccggcttggttccttggcaacatcctgaggaatccagcggctgcacactggctcccttcctctcccctcccaccctcctgcctgcgggggctggaggcggaggcagccaaccccattataaaaagccacagatctctggcggcggcaaggggacagcactgagctctgccgcctggctctagccgcctgcctggcccccgccgggactcttgcccaccctcagccatggctccgatatctctgtcgtggctgctccgcttggccaccttctgccatctgactgtcctgctggctggtaagtggggcttgacttgggcacaaacagggtagggagcccccagccccttgtctatccctcaagcctgacatcaggggccccagaccctgcctgggtaaagctcaaggccggtggcagccgcttccccagggatgtgcgagagggggctgggcacctcgcttcccccagatgcagcgctggacagatttccagttgccagcgaccgccctgcctggcccagcgagcaaagtggctgtgcctggaagcacagagaggtggtgtgggtggcataagggagccaggtgtgggtgtgccaggagggcgggggtggagagagcctgcagaagctcctgctgggcactggggtgggaggccctggctgacagtggctggctctttccatcaagcgttaatgtgtaacccgcagccctggccctgggccaggccacagttgggactttctcctgtcctgttttcaaagcccccaggattagggggcccaggaccagtgaaggtcaaggtcactgcagctcatggttggggcttgccactgctgtgctagtctatagccccagttgctctgcctgtgtctacccgtcatgctgtcttcctcctccaagcacagtgtagaaaatgcttttgcctctagtcacttgcttactgaagcccaggacctggtaggggtacataattaaccatcctacctgatatggataagatggaggcccagagaggtttagaaactggcctgacaatgcacagccagcaagtagggcaggagaaggtaagacacatgggactgaatgcaggagagagcacagatgcacactcaccacctctgtgggccacatcacctccatgaaccgctagccagccccctcctcagggagtgcccccaccatctggcagggtgaccttcagagaaggtgggcacacagcaagtctgggagaatgagaagtagtccccactgtccagatatttccatggagcaaactcaccctggggcagggagcaggtgtgtgggtgggtgggcacgtgagagtggtggaggcaaattcctgctggcttcctgctgtctgggctggggccctgaagcctgaggtgtctgcggacagtgagatctggaaagcagggagtcagatggcggctgctttgccacagtcctgttatgtgaccgtgagcagggtcttgcctcctctggtcccagttgctgcatctttaaatatagctattacctctccggtggattgggggagggtgacgaggttccaatgcctatggaggtgttttgaagagggcggaggaggaggattacttttactaagctgagagagggaagggtcctaggctaggatggaaaggggacactgggggaccctgggtgctcagactagcagcctgaggctttagaaccaggcttctgccctcatcttggtcattggctttactggaagatcctgggcattattggaacctttctcagcctcactttctcctcctgtaaaactaggcatttgaccaggctcaccttggaagtcctctcccacgctgacatgtatggctctgagaggccctcgggagcccctgtaggacaagggggtggtttggaagccagagagaccccgagaggaggctggggggttcgtagctgctgccctgactagtgtggggcagctgcgtcagtccccaaatgtgggtttgtggggctgtgtcaggcaggaggcttctgtactttatataacaaacctgcagctacgagtcagtgcagagcattgcccccccactccaagagctgacgcattcactcccactcaagtcctggcaagaaagagaaaaaaaaacgaatctgttttaagctcctatagcctacccgcctcattagcagtgggggtggatggggagggcatgggaggataaattcaagagtgtcagatccaggcccctgtctaatttaaataaaaattcctccatttttctgttggttaaggtattatgccacaaagcgcttccttaggcattttgtccattcattcaacaaatagttattg

SEQ ID NO: 63457 - DNA, 959 bp, Homo sapiens
ttaatatgtgccaggcaaaaagaactctataaataagaattcacgtttcttattcttacaacaagactatgaggtagatgctatttttgttcctattttacaggtggggaaactgaggcatagagaagtttggcaggggagggaggctgagtcaaaggccttgaaggccagggtgtacaggggatcagttttggcttgggtggtgtggccgggacaatctggcacggggttgggaagccagatgcccacagacatccctgctgaccaggaacctctttgaactcaggacagcaccacggtgtgacgaaatgcaacatcacgtgcagcaagatgacatcaaagatacctgtagctttgctcatccactatcaacagaaccaggcatcatgcggcaaacgcgcaatcatgtaggtactgccctcgaggcctctgaaatcccctttgggcccttggaatattcccagacctctgagaatctacgtccacacctccgctcccagacctgggctcccagccaaaggcctcagcacacgcttctcttgcccctggcctgcaggccacctcactgaccttaatttctgtgccacatggctaaggtggagagtggcttcctgaatggcccagtgtggctgggtggcagccaccctggcttgtggcctggagcagccatgaagggtggtaattcctcctgggctgaagcacatgttaccccacactcgaacccactatatttcatggggcggtgtgggtaggtgtaaagcatgagggtcttacttaaaatgcaggttccagactctaacagacctgatgcaaatcctgccttccctcttactggctgggtggccctgcttccattgcttactttttgcaacttggtttccttgtctgtaaaatgggtagctaggacaggatgtaactaaagtgcttggcaagggcgcggtggctaatgcctgtaatac

SEQ ID NO: 63458 - DNA, 1785 bp, Homo sapiens
ccagggcgagggggctctgtgggtcctgggccctctgcctgcggctgacttcctagcccactccaggctcaggcaggcgggcgccacgcggccctgtggttcctcctgactgaagtgtgatccccacccggccctggctgcgcccagcctgccggaagccggcccagcacaaccgcccaccgactcgctcccccagctcttagggactgccctgaagccgacccctgctccgcgtggttctctcattgtgtgtgtgtgtgtgtgtgtgtgtgtgtgtgtgtgcgtgcgcgtgtgtggcagtcccagctcctccattaggttgagagctccgtgagccactccggggaccccacacccctgtgctaaaaaagatggggactagaggctcaggacaccccacccccagacccctctgcccatgcccagctaagggctgagcacagaggagtcggggcctaagccttctagttctctctcactctcccaaccagcgatggggccgtggcttctctctgaacacagtttggcggcaggggcgcgggtccttctcttccgaggaccttgtggcgggcattgtttggtggggctgcggttagaagggcaatttccaggcccggctgttgcctcctgctgctcccttgtggccagtcagctcattgcagggcagatgatagaacccaagtttactttccagtacgggcacagcgataacgaggttgataaaaccagtgaactggcttgcctgtgactctagggtctcttcagccgcaagtgggctcatctcctgtcctgatgccgaggaggatcacttgaacaactgcctaagacccagagtcctggggatggcccagtctgagttcttcatggaaaattgtcctctgaatccaccgggaggaggaaggatgatctaaaaagggagggaggcaaggagaagctcctaagacagcaaaggccagagacagccggggtctggacccctgcaccctgcaggcgagagctggaaggactctcagagtgcaatggctccatctcagctcactgcaacctccgcctcccaggttcaagcgattctcctgcttcagcctcctaagtagctgggattacaggcgcccgccaccacacccggctaatttttttgtatttttagtagagacggggtttcaccatgtcggtcaggctggtcttgaactcttggccttatgtgatccactcgccttggcctcccaaagtgctgagattacaggcatgagccaccgcgcctggcctccagcaaacttcgtttaaaaaagcaagaccttttttgttttttccctactgaaatcctactcagaagcccatattgtaagcttaggtaagtagagctgccgtggaggcctgtgaggaggtggggagttgccagagggtccctgaaagtgagatagggtggggcattgcataaaggcagggaagaggtggatccaggactggcaacaaaacgcaggattcagaatccaagtattcacgagcagcatccggtgcaagctgggggatggtgagatgcaagagataggacaactgccatgtgaccttagggcattttaaggaggtgtgacctggagactgctgtgattggaaagactgctgggagggaaaaagaggaatgggcaggttcggggtgaaaagtgaggagaagcgccagacttatgttgtttctttcacctggtaggtgcctcccctcctcccccaccccacccctgctttttttttttttttttttttttttttttttcagatggagtctggctc

SEQ ID NO: 63459 - DNA, 1885 bp, Homo sapiens
ctagatttgacaaggggtgtgcaaagcacaactttaacagacacaatgatggggtctgactgcaaacacaaaatcgacagaatcacatgctcttgtcgtcagttactcttagcccaaaaaccgtttacttcttcctactaagccttctctgatgacacccccgtgaagtgctctgttagtggctagaccgtgacctccttgagccatccagagcttggcactcagtaatgtcagaatgaagggcaccagcctttcccgaacttgcagatcctacaaatcacccgagggagtggttaaaatgagattcctggaccacacccagacccactcaatcaatccttctggacaaaggcctagctgtctgttctagtaacaagcatccttccgatctggatacttaattatatcaactcaacacgctgggggttcggacaagttgcaggttcgaaattacaatcgtgagctcaggtaccccccgactccaaggctttcgtgctttgctgccaggaacccccagggaccaaaacgtcacggggactgaggcccaaggtcacaacgattggctactggtaggaccgggtctcagaaccaggtctccccgatcccaagctcggagccgtttctcctcagcgtggtgtccccggggcctcagagtagggccggctgcgcaagggacgaggcagccggggaacggcagaaattcccagtcaggaccccagggaggttagggccggccctggcccctcacaccgacttctcaggaataaaccagccggggctttcagcggggcggccgtggctgcgttcccatcgaggaacggggtgggaagagaaaatgagaggatgtgggaacgagggtgggccgggaggggacagttgagggagctctggcgctcagctggcccccaccactctcacctgccgcctgggctcgctcccggcttctctccagccgtcgactccacgccttgcgcctctcgcgagaggaggaggctccacggagcgacgacttccgccctccttagggccgtggtcccgtagctaccggtcgcgtcgccgtgggcgacgtgcccgcttccaaaatggcggcggcggcggtatctggtgcgcttggccgggcgggctggaggctcctgcagctgcgatgcctgcccggtgagggggctgccaagccggggagaggcggggagcgcggagggggcgcgaggccggcttcagctgggttcgacggtggggggaagaggccgttggggcggcccacgagcaaggtgaggtgaagggcatcggcgcgggctcgggcgagccgcctggctagcttcggccctgctccgctgtctgtgaggggcagatgcagcggggcagggcctgtcacccccatttcatggagttggcagagcctcagagagggctcggggtacgaaagtcacgcagcctgagcctgttggttacagaactggcagtcgcagacccattctcaagtccattgccaagtccactggaaggacaggtggacacggccacagagagcctagtccattgtttcccgaaagccagccgtttcctcaccacttcacgaattctgtgatactctcttaccacctttgccactatgtactcagtatttttatttttaaataggagttcttaaagaggaaactttatatcattgtcataaatggaaaactaatatcgccttccttaattagaacgtatgcattaacactttagcatacatacataactgatgaaacgttcacctgtatttcacctaaaatcttctcatgaccctcagtggtactacagtcatactttgcatctgctccttccttttcaaagttttgcggatatttgtgccgtatctttcagtacatgtattaaaatattg

SEQ ID NO: 63460 - DNA, 1356 bp, Homo sapiens
aatatacattcatattaaaatatacttttgtttttctatagatgtacaagttctttttaagtgcttcatagtattccatgtgtgtatactccaccaggtctcttatcaatggacagtacaaacagtactaccacgaacgtccctgcactcgtatctttgtttacaactgcaagtgtttctgcagtatgaattcttagaagtgttactgttaagtgaaggacgtatgcgtgttttgccaaactaccctccgagatagctgaatctggtacattttaaagcaggaggccgcagaagacgctcggcagttctggcctccgagcagcaggcggcgctgtgagtcgtctttgcggaagccgcggaggcctcgctgactgacttccggtgttggcggtggcgccgcgcagtcaccgcggagcagacgcggaggctggtggcccctgggcgagatgccgtacgccaaccagcctaccgtgcggatcacggagctcactgacgagaatgtcaagttcatcatcgagaacaccgacctggcgtaaggctaccgagggaagaggctggcggctctggggcgccgggaggcccaagccggggccccggggcagggggcgggggtgtagtggggtggggtgggggcgatgtccttccagagctgcccccctgcaccagggctttagctttgggagcctgcggcgcgggcccagcctgtcgaggctgcagcgccttcacgccccttggcttttgatctttcagggtggccaattcgattcggagggtcttcatcgctgaggttcccataataggtaagcgactccccttcctcgttcccgcgcccacgggttcctgccccgctctccacccacacactctttggggctccttccagtccttggttcgggctgagggtggtagtgctgagaaaagtgcattgctggagacttgaccataccctgtgcccttggctcagtggccgcctccctggcgcccacgggccacttaggtccacccttgtcctgggtatgcattgctgagaagcatgggtttagcagtgtgcagacttgggttcaaatactgttttcactactattgttacaaaagtttttaaaatgttttcaacttttattttggagtcaaggggtacattggtgcaggtttgttgcctgggtatagtgcgtgatgctgagatttggggtataaatgatcctttcacccaggtagtgagcatagtacgcaataggtagtttttcacccctagccccactgcctcccttccagctctagtagtcaccagtgtgtttattgtcatctttatgtccgtgcgtacccagttttagctcccatgcggtgtttggttttctg

SEQ ID NO: 63461 - DNA, 3337 bp, Homo sapiens
aggagctgagacttcgagcctatgccaaaaagggctttggcaaggagcatgccaagtggaaccctactgcaggggtggcttttgaatacgatccagacaatgccctgaggcacacagtgtaccccaagcccgaggaatggtatgttccccttaggagtgatggcaggcatttggggtgggtgtggcatagaaatggctgttgttgactgagatgtggcaggctctctaggaacttgggtgccccaaaaggagcagtggcaaccttgtgctgacctgtgtttgacctcaggccaaagagtgagtactcggagctggatgaggatgagtcgcaggctccctatgaccccaacggcaagccagaaaggtaagagcctggttggacatgggaaggtgaagtgtggaagaagggatggttttggttcaggccgtgagttaggcattccctctcccccacctcgcagttctcataagctgaggaggggctgctgactgctaaactagacctgtggtatgtgcacatcccaggggcaggtcgtcagccccttttggtcactgacaaagaggaccctccatttatccaggtggttcctgttctgattttcagcccccaaagaagagattcttcaggtcaacgctaggggcagagatttggacccaagttccacagggtgactgtgaaaggtctatcactggtcactgctcacttggttttccactctctcctcagggggcatgcatacatacagaactttaggattttcacaggtaccttatgaggtagttgtagcctccttgaggttgtgcaaagtgtgttgaaactaccctatgtaagaggttttacatgaaaggaagttagccctggcccaaggtcaagttccatgtgggaacagagccaagacccggaaggaggaagggttgtccatggccagagctcgggtcggccagcctgcctcgcagtgcactcactggactcttgcctcctaggttttactacaatgtggagtcctgtggctctctgcgtcctgaaaccattgtcctgtcagccctctcaggattgaagaagaaactgagtgatttacaaactcaattaagccacgagatccagagtgatgtgctaaccataaattaactgcagcttgcctgcttcagcaaaaacggagattcaggccagcagctggatatgggggtctctcttcagactcttctcgtttctgagaatctagtctactgttggttgagcttcttggcaggacatcagtaccaactagaagtgggtcatagatagattaccagggatgcagtggtgtttaggcaggataggtctttactggccctgactgctgttaataattggcagcagtgctccccagatcccagaaggtccctgctggagtgtttccagtgcacctgtagggaaccaactagacttctctcctggttagtccagctctttactctaaaccctttctgtccaaaatgagtcattttcagttgtaccttagatgtctggtgttgaggatcaagtgccatagcctttattcagggggcctataaacccttccagttcttgccccagggctggcctgctagcgcttcaaattcccaggtgtccctaatttgagaagtaaccttttggaatagcattagaccctggctgtcccctccccaccaaataaacatgatatttcattctctgtccagcagtcatgaaccccttcacctccaatgacctgatcatttagtttggtgggggtgggggtgggggtgggggtggaagcagccgcaggagcaagggcccctcccacatacacaggaggagtatttcatttctccttaatgaaggctctggccctaacccctcagcactgtctccagataggaacatgcacaaagcagttaattaggcagcctggagaaaaccagagatccagtacagaaaggaaaggatatttattgattaacagaagttgtctttttaaaagtgtttatttttggcaataaagagcacaacataatctccttcatgcgtcatcgtgccacttagctgagccagccagctctgcctccctccccaaagacctttggaccccagttcccctctacaggctagctcatccctctgggtggtcattccccgggtcacgttgagagcgaggctgactgcaccacctccctagctcaagggctcctttgggaggggccgcgtgctttatcatcctcctgccacaactcaaatagtggttatttacaagaaggtctgttcccacaaatcaggaccctaaagtattaaaaaacaaaacccaaaaaacaacaaaaaaccccacacaaccaaaagtttgacgtgaatagaaagatagcccttctgcatggtagtcaacaaataccagcactagaaaatcaattgctttaattgcattgcagcagggagcctcagcaccatgtggggaggaggaaatgggaaggtcttggtttcagagtgcttttggctggccagagggtggccaaacagggcaagggggctccctctgcttgggcattgtccacccctggtcagtgagaggggggcagcaggggtgctccccacggcagtcctgctgcggccttccctcctggcctattcctggggcaggaacaagctccagccttcctccacatggctgaggtaatcagcacccctaccccaggggcatcttcccagcctacaaagcaggaaggagcctgtgcagaagttacattttaaaaccagattttcacctgaggcgtcaaccagatgtcacctctgcttaaaactccaactgcaaggctggcaagcagcacagaggaagtgcagatccttcctgtgtcactccaggcccagaggaactgagaagccacctgctgttccggcccttgggctgtctgggaaaagccagcagtcagagtgccagcctcaagctctgattatccccctcctgtggccctggtagttcaagcaggtcctggcagcaggagggctgtgccatggaggatggacacgactgcactcatactcaaaaacagccttgaccgtggcctggtcatgggattaaaaaatttgtgtgtattggtggggaaggatggggtgagggtgaggggatctcattgatacagagtatgtcataagccatatatattaaaatcattaacagtatatagtcccacggtagctccaacccctcacacatgctcaggtggtgtggccagccctttgcctcagtccagcctcatccttgggggcaaggagggggcagcttgctccctttctccaggctcttggccgacagccccctgaggctgtccacggtacactgcagccagc

SEQ ID NO: 63462 - DNA, 1685 bp, Homo sapiens
caccccgagcttcctgctcttcatcttcacgtagccttgcttgacgatgtcactgaaattggtcgccatggttttcccaccttttaggggcgcggggcctggcagaggcgaggggaaggatgcccaggtgcctgggtctccggctcctccaatcacctgttccagacactctgtcggggctgccgcgaggggctgctcctcacctcacccgcctcagcattgttctagcagctccttcgccccgcgcctgctggaaataaaaatgacagggagattagagacagtgacatctttctcttcctctcgctgtctcgctctcttttttccttcctcttcccacactcctcctctctccctcttccctccctccttcctcccgcccttcttccttcccttccctccccaccccaggacgacagaaccattcaggaaaaccgaggtggaggcggcagtgaggaaaatggtccagcccagtcccctccctcacggctggggctggcagttaaccccttcctgggaggactggctctggctcctactgtggaggtggggacccaggaagggaagtggcagggagctgctgtccctcagcactttgggatcgtggccccatcaactgtgataactctggtgcaaatttaggtcaacttgccaagagcaaaagccccttcctgggtacaagagctcccaggggtagcagggaagcgcttcccagagatggaggaggagggtcgcaggagatgacccctgcgtgtctgagtgaaccccatgctctgcaatgttaaagacaatttgcctggtcagctcagcagcccccacaaacccctctaccctcctgccccacccggtcctctacctgtttctctccagccccaggctaagaatcactacctcgagctcacgcagggcctgttcccaggccctgcaactcttccgcacgcagctctgggtgctgcttcctgggtgggagggcagagtccagtggggcgggcctccagataagcctgaggaatgtgctgggccggctggaggtagccactgtgggagcagacgccttgccctggccctggggttgggaacgctggccagtccgtgagggtggggcccgggccccaacaggccactgggtctggccaagccaagcaggccctccatgtcctgagcatgggcaggagttaattataggagtaccagtcagggccctggggcaacaagacatgcaggagacaatgtgggataccaaggggaggtagatatggagcaggaagtgggagtaccagcagagccaccccaaatcaggcagatctacagacaacaaagactcagactcagggggaggctcagtgttgacccagtctaaccccttcattttatagatggagaaagaaaagttgcccagagagggtaagctacatgactaaggtcacacagcaggcctggggcagagccagggatgaaggagaaggtccagggtggtgatggagaccagtctgtggggggaacatcctgctgccgtctctggctgcctgccaccacctaagccttccctgccatccatcctcgggggcagggttatgccagcaatgtggcccctgtgtcttcaggatcagcgggtgggaacggagcagcatttctggggtcagctgggtatctgtgctgccagaacggggccctgggacaggcat

SEQ ID NO: 63463 - DNA, 1885 bp, Homo sapiens
caactggggagaggaggcacagctcctgggatcagagttgggggtgggggcaggaagagcctgtaccagcgccacatccctctgaaagggtccaggaaagaacctgccctaagcaagcccacctcacactgcccaagtggagtctcctagagatactgccaggcccctcgctgccctggccatcagacccctccaacccacaccctccatccaagcggaagcgccccagcaactgacgtgtccccatggcttggggcaggcaggctgcacagagcccctgctctgccacatcacccaggtgcccagcctcggctcatgccccttttcagtaatagaaagcatgtaactggatctagggccttgcgggccctgggggagaaggtggacaggaccttgggggccaatggagaaaggttcaaggacaggaggcagctggccatgagtttgggctgtggggagaaaccccataggcaggagggggtcggcagtgggggccagctggggtacagaaaatcatctcttggaatttggaggaggtgagcgaacaggaggccccggggaggagcaggaaggcagagagaaggttgggagctgccaggggctgggttatgccccttccgggggggcaggcccgggagcgcagggcctgggttgctcggatgaggtttgtgtgggtgcgggtgaggtcagctcgcgacctgggctcccccggagaggaaagctgcgggtggagagagcgcagggagtttcagggcccaggcactggcttttggggggcgggtctctaagctccccacccgagagtaggaaggtcccatgggacggagcgtcctcaggttcaggaagtgactgagggtcctcaggggtgggagtcgccgagactcttgcaggctctgggcggcctatgtccccctccctgcctcacgccccccaatttacctgggcgccgaggcccgggccaggagcgcctgctcagcggcgccgcggagcaggctcatgcccgcgtcacggcgcggctggcgggggcggcagggcggcggcggcgccgggctccaggcggggacggcgagggaggcgcggccgcagggctagggatcgggctccggctggggctccggctgggactccgctccgctcccccctccgccaggtctcgccgctgcgccccgccccctgccccgccctggcggccggcccccgccgtattcctccgagccgcgggacgcgcgattctgccctggcgccctggcacccccgcacccgcttcaggtcgcccccggtacccccagctcattcccaccgcccctccctgggccccaaagcccacatggcctctcagcccctgaaagctgaactccacatcagctcccagcccccacatctcaaccccttcacttcttcaggaatcacatacacacccatacgccacatcagctcccagcccccatatctcaattccttcacttcttcaggaatcacatacacacccattgctcccctaaccccatcatgactctctgggccctcacagcccagctctcccagccccacagtgacctcctctgctacccctcctcaagtagccgcaccagcacctctgtcttccctggtctcctctccaccctcaaaacatccagttctcccattctaggtccccctgagactttgccctcaagctcaaacttcattccccttcattgctgcccccacccagcccccaaccccctcacctctgcccttcgggcctgtgcagtggttgactcactgatctgtcggaatccccagtcacaggcctcagctgtgccaggcagggacaagagaagttgcccagtgcctcctctggggaggagctgtcccccctctggttttcacgtctgtacctttt

SEQ ID NO: 63464 - DNA, 738 bp, Homo sapiens
tgaggcctcttcctgtctccctccccgactcgacagtgacacaaaccagcctccccaggaaccttcacatcaaagtggactgaccaggaggggcgtggagaggaaggagacaggggccccctagctcctttagcttcctcctgaggaggctgggcgaggggcgatttctgatgggctcagagagcagctcacaggaaggaggcttgggacatcattccagccccacctccccgcacagggttctccctggactgccttcctgagcacatgcgtgagatgctaatagcaggtctgacaagctgctccctggacaggcagcagcgaagggaggccaagtgcttgggccagcctcctctccctccctgattcattgatccactcagcaaacatctgagcacctactctgtgccaggcactgggcactggggacacagtgttccacaggaagagtccatggccttgaggagttcacggtgtagtgcaagtgaccagcaagtgcaactgtgagaagggcagagggagtggaaacagctatagggtgctagaagagatacgggggccaggcacagtggctcatgccaacactttgggaggtcaaggtgggaagatcacttgaggctgtgagttcgagaccagcctgggcaacataatgagacccagtctgtacaaggaaatataaaaaaactaaccaggcatggtggcatgtgcttgtagccccagctacttggtaggctgagg

SEQ ID NO: 63465 - DNA, 1389 bp, Homo sapiens
catcactgatatgctgtgtgatatctgcaagtccctgccctctctgggcctcagtttccttacctacaggatggggagaggcactaaaaagattcctgaacgctctaacaggtgggcagacctcccgaacccaaaccaatccaacccccacaagagccctgggagagcgggggtgggaaggtggacaccacccccacctaaggtactgaaactgaagccccagccctgcgtcgccttagtcctcacttagtcgacccctcccaagccgctggccctgcgaaccgccccgctccacctagcgacgggcggagggtggagggggttcccggcccgcgccgcgcggtcccgcccaccccaccgcatggcccccattggcagtcgccgcggctctgggcagggcgccgtgctctgattggccagcgccgcccgtccatcccgcattcgccatggcgaccacgttgggtcccccgggagagtcccaaattccgtccccgcccgccgccccctcccgtccggcccgggccgcggcattccggaggcgcctcccctcccccatcaccccgcggcccctccccaccggagacctggggttccgggggctgagggaggccggggaggcgtctagaaagttctgctctgagttcgggggttgccgcgggcgccccgactgtgtctgctcctccagcacgccccacaacttaaccccttccttcccgcggaaggcgcgcggcctggagcaagttcccgggccgccttggcctgccgccccccggcctgccgcccccgctcacctcgggccgggacttgcgggctccgtacgtcccagccgctgcggcggggtagagcgggcaccgtgcagctgcgaccgccgccggaggggccgagggagggccgcggagtctcctcctccctcccggggggaggggaagcagggggagcggcggggcccccgaagcggtcgcaggctgcggccccgctgtgaccccggcccaccgagctgctggggtgggggctccagcctaacttcggggcgaggggtgcgggccggggcggtgggctctgctgcagagcgggccgtaccccaacggaggccccacccccgtgaggggccgagagttgcgggggggctcggctttcttggttcaggtttcctcagcgccaactacgtactaggcgcccccagcagaaacggccaccgcgggtcccagctcggcacgtggagcgagcttaccaagtcttcactgttgttacctgcatttttccctgggccagctctgccaccgagtggaagtgggccaacaagtctgtgcccatcgggcctcagtttctctttctgtacaacagaagggttgacgaaagcaaccttgcgcttgttaagaggtggggggc

SEQ ID NO: 63466 - DNA, 1187 bp, Homo sapiens
gggcactgtttctaagaagagtgatgataccaccgtatttttgaaaaatgatgaaacagcgtgggggaaactgctatgtcttccatattcaggctttttcttctccaagcccatttcctccctagcaatgataagaggaaacactcccggtgagtcagatgctctctaaatatttttgctcattgaatgttgacaccagccctgtgtttagtatcatactgggaacacgcatgaggagctgaagcacagacaggttaagtggctcgcccagggtcatacagctactcagtgctggagccgagatcacaccaggctctgcttccccaccagaaccatgagaggttgggagtgaccctactggacagggatatctgaggtgggaggggctgtgtgtgtgttcatgctgaggccggcatgcttagaacatcaacctcaattttcctccccacagggtctggcggggaggcagggagcaaggtcgttaagggtgggcagggtgagggggagattccctgacagcctgggttctgcccctcacttgctacagccccatgcaagcctcttggcctctctgaggctctgtattctcacctgtcaaatgggggttgtcctgggtgttacttcaaaggctgatgagaaaggagtgagtgggctggctcgcagcctggcgtgacaagcaatgcataaatgtatgccgtatgagtcacctgtccacagtggccccagcagctctctctagcagggcttggccaagactaggccctcagagtgtaagaaaactcctggtttggtgcctagcacactatagatgtggcaaactgtgtccaagaacgttttgatgggagcctgcctggatgacagaagatcagagtgtgctggaatgtcccaccctttccagcttcccgcagccaagccaggctctggggtgatcattcccatagcaaccaccaggggtcagggctggccacttctgccttcttccctcatcctagcgcctgtgggtggcgatgacatccctgccatctatgaggtggagcatttccaacaagagcaggtctgaggccctggcttgactttcccagtcctgttaaagaagaacattggtaagtgtgtccatccatctgttgggctgtctgttgttctaacattcacccatccatttatacttttgtccattcatccattta

SEQ ID NO: 63467 - DNA, 1321 bp, Homo sapiens
gtaaaacaattgcatatatgagttacagggatatataataatcatgtctcacaattactgaatgtttactgtgtaaaccaggagcattgaattattattactcccattctacatatgagaaaacaggaacagagtggttaagtaatttgcccaaggcggcacagctggtaagttacagagcaaggatttgaactctggcagcccaactccacagtctgagcacttaaccctatacatggccttataggccaaaaatacttctgttaacagggatgacctggaaaatcaagagtggaggggcagagtcactttttaataaatacttctaaatagacattaaaaaacacgaactggtaaaaaggacttatagtgaaaagcccatttcctgcaagccccctccccagaggcaaccacttctaatagttcgagctcatgtggcagttacctccagagccataaataacatgcttctactgccatttcctgatttattaaccttggacattatctgttgacttctgcaaacactcagaaaaggaaaaatcagcttaccttttttctcctttcttcttgttatgttgcttcttgataacagggctgtttgctgccactggctctggtctagaccctgggctggacactcgactgcacagttgccaagactaggcccactgaggttcaagacaaaaaaaggacttgcccaaagtcactgtgagttggtgttggaggtggcacccggctcctggtctgcatggctccagggccgggctgtctctgtgataccctttggcccaccctgagagtgactcttgtgccacccctggcccacgcgggcctctctcactctggcagaggcttagcatggctggggtgggtggccctggctgggttcctgctgagggctggctgaggcctcctgctcaggcaggggcaggcatatttgcagagcagcaggtgcagcctcccagtgtttggccagccaagggttttattctccaacactgccagacctagactttgaccctcagggacttctacacagctggccttccagatcactgcccccatagcctctatatctccaggggaaaggctgagccagtggctgagactggcaaagtgccgagcaccagatacccaggacccttagggcgaaaccaccagactcacatgccccaaccctgcagtcgcctggggccatcgggcgggtgtgggggtgggggtgtataggggtagaaggagctttaaaaaattaccagtgctggccaggcatggtggctcatgcctgttatcccagcactttgggaggaataggcgggcg

SEQ ID NO: 63468 - DNA, 1764 bp, Homo sapiens
ccatcccaactcgggcacctccctgctgtgtgatcttgggcaggttaattctcatctctgagctacatgtatctgccttaagctccctcttcttcatcaccacattcacagggagtatttattgagggcttggcaagtaccaggcactggtctgagtagcaggtttgacttctctccactgccaggggcgctctggagctggaatgcagacggtggtcagcgagtgtaattactgttattgtcaccactcacccttctggcattgtaaaagcctcccagcacatctgactgaggaatcatctatcctcattgctcggaggaggagggcagacaggagcctctgcagggagtgtgagttatccaaagcctcctgactcgagaagggcactgaaccccagcagcgggaggtgctgctgacagaggaatgaccagaagggggatggggcatggtccatttccacacttctctgtctgagcttttggggccactgggaatggctcttcacccaggcctcggtttcccctttggctcagcagatggattaaaggaggccgtttccagaagcccctggggtctcagaatccaaaatgacttgggatgttgaaactgtgggtgcttgaggagcactgagaggggagacgggtcaccccccggggggacgcaggtcagccggtcagtcgtgcgtggcctggctggcctcctgcccggctgcctgtcacccgctccctcccgactgccttccgctctgccggtcagcactggctcccgtcggctgccaaggaggctggactctccttcaggaaagggcagttgtcgccctgacctggggggtgggcggacagcatccaagggccctgttgccgtggcaaccccggcctctctgtgggaactttggggagactggccctgggaggcgacagatggaggctgaggaagcagagtgatccccggccccttcctgtccctgaacactgtctgcctggatgaggggtgaggctgaggtgcccccttgcccggcgctgagtcatgggcatcccccaggatcactgcctcagcgctctcagccctgccccctcctggtctccctctgagaaatccatgactcacatatatcgtccgtcatccccagtcaagctcagggaggagggaggagcccagctggggcaggagaggggtgtctccccaccaaacaaacccggtccctccctctccgcactagctgtctgccctgccctgccgtaggagatgggctgggagcctcccacgctctccagctcactcggcaggcagcggggaccagggctggcaggttaagcctctgggggtggatcctgaaaggtggtccagccgcctggccctgcgtgggaccctccacctggcagcaggtacccaaacaagggctggacagcaggtgggaaggggaatagtgtgagtgtgagagtgtgagtgtgtgagcgtgagtgtgtgagagtgtgagtgtgtgagtgtgagtgtgtgagagtgagtgtgagtgtgagtgtgagcgtgagagtgtgagagtgtgtgagtgtgagtgtgtgagagtgagtgagaatgtgagtgtgagtgtgagagtgtgactgagcgtttgagtgtgagagtgtgagtgagtgtgtgtgagtatgagtgtgagtgtgagtgtgggagtgtatgtgagtgtaagtgtggatgtgtgcatccgtgcacgggtggctgttggacagtgggtagggatggtggtgaaatggggaaatgggggggtcttg

SEQ ID NO: 63469 - DNA, 2113 bp, Homo sapiens
aaacatccctttagcttgggaaatggattggagcagctgagggctgaatgctggctgggtctcgctggaggacttgaggccctgcccactggagccattgggagaagctggggcaggaggcggcaggaagggacactactgttttgttggccctggggttggggggggtctcagggttctgtgagtggctccaggctagtccctggtccccagggggcgtttcagggaaggggccttaggaaaaggtggccctccttccagccctgcctgaccttcccctgcacctgccctctgcccacttcccaggtgggctggctgctcggaatctcagtctgctcacccccaggcgcttcttcacacactggtacctgcgagcctctctgagggcccaggtgccaggatggggcttcagcgatgggcccagcacatccaagtccactgccccacctcaccctcacctgcagctgggagggaggtctgcagatcttccaggagaaggctggccaggtgtggagcagtggcaggcccagccattcatctgccttcgcagccctccctgcagaggaagtttctggggctcaggaagccctgggctctgacctgctgctccatgctgaattcccacctgctcccacaccatgagtgaccctgacatcccctccctaccccttcccagacccagagggctcagcaggagacactgagtgggaggaggaggaaatggaggccagcaggggctgagcggctccccagttcaatcccaaggctgagtagggctagtgccagccccgtgggccagagggggatgccagcaaccacacaccttggtgggatgcccttcaccttccaattgccaagtggccatggcctcatgcacagtgcatccgtggggcctccagagttggcccgagtggctggcgccctaattcctttaggctgaagcccaggagtgtttgccacccccacctcccacctgatcagtgaccatttggggtgtaaagacaacaatttcacagctctgatgatcagaaatgatgtaatggccacaggcggctccgcctgcgtcatccatgatttcatcacacacctcgggaggctcagggtgacagacagtgcatgcaaggtcacccggccaggaagtggccaggatggatgttagctcaggcctgaccagcccccggggccgcactgctgtcttcccgctaccctgcctctgggtccgtcctgttatccaggctggtgggggaagctcaggctgcagggccagctcctgctctcctcccacaccctccagcctggttcaagccataggcaccatctgggtcttcgtcctcatgcccagagccaggctctgtgcccagcttgttgcaggtctcatcaaaccctgacacagccttaggaggcagccccattgccatcttcactttacagaggaggaaactgaggctcagagaggctcccagcttgtgagaggaggggtctgagtaggtgcgcctgactccaaagcctgtgctcaccacagttcccagggatccgctctgagccaggcccctgtggccacccagcccctagccccgtagatcccaccccagtggggccccgggggcacatacctgggtgggctcagcagctccctctgcaggtggacccagggtgcggtgagactgggagcactgcccagttccccacactcacctttcacaacccaaccaatggcgccatcgagcaggaagggtgagaaagaggacacaggaagccagagtggtggggctgcagggtgggggcaggccagctcagcagagcctggggccagagggccagacagccacagagctcctggcgtgggcaaggctggccaaggatggcgacgcccaggggcctgggggccctgctcctgctcctcctgctcccgacctcaggtgagtggctggcacctcatcccctcctgccacgctgggccgaccctgccctgccgagggagggatccagggacagacgcagggactggagaaggtgaggagttggggtgtctgggatgtgtcctccgataccccccgtggccgcctcagcaccttctctagccctgtccctttgggtcagtcctgtccttcca

SEQ ID NO: 63470 - DNA, 755 bp, Homo sapiens
gcggacggatcatctgaggtcaggagttcgaaaccagcctggccaacatggtgaaaccttgtctctactaaaaatacaaaattagctgggcatggtggtgcatgcctgtaatcccagctacttgggaggctgaggcaggagaatcgcttgaacctgggaggcggaggttgcactgagctgagatagcgccattgcactccagcctgggcaacaagaatgagactccatctcaaaaaaaacaaatgctttgcaatgaccactgaaatgtatttcaatattctgacgattctttgttttttgaaaatgtgttgttgttgttgggcggggaggatttgacattcagagtaaacgtgtgtgtcctccctctctgcccttgttctctcgcttcctgaacttccttcctgacggttttattctttccatttattcctgagtcagaagccagacactgtcacaatcaagccctgtgtaaacactgggactgttagggccctggccaaaagcacatgccctccagccgtcctcatacttgcacattcagcttgcccaggcatcaggtgcccagacaggcacaagcttagctctactctctgtattgggaaaaccgaggctccacaagggctataacttgtctagggatgcacagcctgtgaggagcagagcttgcactgtgccccaggtgtcctgcctctcagagctgacagtccccaggtgctgccccctacccagtgtgcctgcttcccctcccagctggg

SEQ ID NO: 63471 - DNA, 2985 bp, Homo sapiens
aatctacgtggtatcattatattgtcttttaaagttttctctgtttagttttctttttataatacaaaattaaggggaactgcaggctagacagttttgatccgatgttattctgctaatcttttaaaggtgtcttgcggtgactcacgcctgtaatcccagcacttcgggaggctggggcgggtggatcacctaaggtcaggagttcaagaccagcctggccaaaatggagaaaccccgtctctactaaaaatataaaaactagccttagcccgtcgtggtggcgggcgcctgtggttccagctacccaggaggctgaagcaggagaatctgaagcagaaggctgaagcagaaggcagagtggggactcccccacgctttggctttcagaacaagggttcgaattctggggctattactttctgaccgtgtggttttctgcaagcatcttaacccgggcctcagtttcctcatctgtaaatgggaacaggaattcctacctcttatggttgtactgggcgttatgtgagcccaaggagccctgacctgcggtgagaggctggaggccgaagggcaaggttcgaggggctctgggtgcctgggacaacctctgggcaacagggagaggcggctgcggggccaagtccctcctaagcggccacgcgagaggccctgagtcgagaagggttacggcgcttcccagagcccaccccgcccaacgtgtcacaaataaagctggcctttctccgattccctgattgcagccattcagggagcagccccttgcccacgcatccattagtcgaggcggtggctgcgtgtgcagtgctacagggttcagcgcctgcctcggctccggaatcaggctgtttccttctagacctcccatgggggattcaagccggcgtccgggtcaaagaacagggacaaagtcctcctgccacgggggaccatctgcaggcaaagtgaagaatgaggagcttcggcaaaatgccgactaaggcctccttaggttttgccccactccaagatggaaggcctgaggcttcacactgcccccgaagttcctttcccattggctatctgggaattgagttttccaataatgcggacgctgattggtcaatccaggacggttgctcaagccattggcgcagccgccattggagggcggctctcaaaagttttcagacacaaattaggttcgagggaggaaacggagaggaaagggaaaacttgagacggaggcgggactaaggaaacggcagcttgcattggtttattagaggccaaggggcggctcttgaacgttccttcctcttgattagtcctatttaggaaaagagggcgggtactgaggaaaagcggcagaagcgcctgcttccattggtcagtcctggcaggaggcggagcacccgcggcagctgattggtgcgggaggcaaggtgggcggggctctgagccggaggttttgttgtgagggtcggttgtcaagcagcggccaatcaaggcaggggatggaggcaagtgggggtcgcgcctggagcggagcctcggcctccggagccgcagctgcaggtggagtgggcaaggggacgaggtggcgaggggacggtgggccctgggctgggccgagccaggcggggctggctgggcttgcgggcagagagctctgagcgtggggaggctagagcccgtactccgcaagcagagggttgggaggatcagccgtggccgagggacctgcccccgcccccggacgagaggggtcggggtggaggccggagggggcaaaaccagggaggccggaagcagagctgggggtctgcagaaggacaggtaatgaatagggagaagagaagtaggagaatgaatgaatgggagaccccgcgagcatatgggaaagggcagtaacgggagtctggcgaggcaggggccacgtgagggatatcgggagacaggatgtgcataagtgggagactcagggggcagggagaaaagggggtgtgaacggaggactagagaggcagacccggggacccaggagaaaggggacggaggggagcgggctcatgggaaagaggtgaagtggctgtgggaaggaggtgggaggctccatgaggaggccttttagagttgaagagtcatagccacttacgcccagactggaggcctagttcctagctctgtccttgggaatcgcagggagcaggagcggttcccttgccaggagctggggaattggaccatcagggtcgtcttcgagattctttccaaggaggacttcagtggccgtctctgggatgcctttcctaggcccctaagcttagcttctgactccgctctcccacatcccacacgtcagacaaaaacaacgactcgcaggaaatctatgtgaattgcagacacgtggtcttctccgccccactgcggctgctgcactttaggcagccagcatcccggaacagagctgcagctcattatcctggcctctgggaggagtttctttttccttacgttccaaatcaccctacctgaggtgccccctctgcagattcccaaacctaatttgcagtgcagcttctgactctggtggctttggtgggtgtcagtctttatcaagtggtcttggtgatccagggagcaacagctcttaccaagcattttctaacatgacgtcacctcttgtttgtattgcagccctgtattgagctgagatggctcgagcctaacattccatgatccaggatcgtgacagatgtgcacaggctgctgctgttgctgctgtgggtaatttggaaccacgaggcaccccagggccagaagacgaggcattctgtctgcctggatgtgtgggaactctctgccaacttgattggtggatctggggggggatccacccccaccccacgaggaaagcacagtttattttgtgggtggggcttcaggtgccagccagctgaaggatggccacccctgtggtca

SEQ ID NO: 63472 - DNA, 1986 bp, Homo sapiens
ggtgacagagtgagaccctgcctcaaaataaaaaaggagtgtagtgaggtctgggcagcatgtcacattattgggaacttcaggaaccttgaggccatggctctagggacattcacaagaggacaggggaactcaaggccagcaggacatggcctgggactgttgttaacaacactggggagggtcatcccaacagccacagcctcctgtggtcaccagaccaagatgagcagcctctgtggcctgggtcagctgggtgctcaaggactatgggccattggcccaactgctctcagtaaatacaaacacctcctccacctggcacagcaatgaggaggtctgagaagactcctgagctcccacaagcccaggtcccaacagtgataatggagccccgttaactgagttggctttgccagtagggcagggggatttcataagaccatttttcatcccctattcccctgaggtaggtactattattatccccattttacaggaagaaaaactgagctcctaagaggttaagccttggttaggcaacttacttgaggtcacctgaccagtaagtggtggacctaggaccggaactcgcatctggctgacccttgcagaaccctcacccttaaccatggggccacacagccttgcaggaacagcagtgtgagaaagcagccgatcagaagccagtggtggatagggctggaaacacggcaccatggaaaacaaggcagagtgtaccccctggcgggctttgcttagagaggcaaagttcagaattccaggaaagtccaagtctgagtcaaaccacagtgaggccagcaggagaccagggcacacgggagtgacagctcacgatgcaccacacattacagttgaccatcttttttctgtccattcttacaacagatccacccccaaactgcaatgcgacatttgtgagccccagtttagagactgggaagtgaaggctcagagaggaagtgacttcctacagctgcccagctggcacatggcacagccagaatagaatcctgctcacgggattccaaatccaaaactctcccagtaacaacaatggtggtggccacagcaacaccaatgactcactagggatcatctcatcacaccctattattacatccatctcacagatgaggaaactgacctgcagagtggtaattaactgtcccaaggtcacacagctaataagtagtgccaaagtcagggtttgaacccagctccaggcccatgtggttggccacatctccacaaggtcgggccctccagagtatctcagagacctggagcttcagatacatcccctgagaaatttccagaaaagagctgcagtcagaaggttcaaggacaggctgggcgcggtggctcacgcctgtaatcccagcaccttgggaggctgaggcgggtggatcacctgaggtcaggaggtcgagaccagcctgaacaacatggtgaaaccccgtctctactgaaaaatacaaacaattagccaggcatggtagtgaatgcctgtaatcctagctcctcaggaggctgaagtaggagaatcgattgaacctgggaggtggagattgcagtgagccgagattgcgccattgcattccagcctgggcaacaagagcgaaactccatctcaaaaaagaaaaagaaaaacaacattcaaggacaaaatgagaacaaagaccaggaaccattctgaattcctaagtcacttgtgggagtggggtaagctcgggggttctcctaagagaggctagagagctggggctcaaataactaaaaaggctgggatgtttcctcctcactttcccttcttaaaaagtaagttgattttgttaattaaaggaaaaagtgttttcaaaaacctctttaaagtcacaaaaggttagatactacgatttcacttctatgaaatgttcagaaaagacaaatccataaaaacagaaagcagattaaaggttgcca

SEQ ID NO: 63473 - DNA, 2221 bp, Homo sapiens
tttttaagtggataaaagtctgtatggtcatataatcttcataatacccaattttttccttcaggttagaaagctgagataacacaatatttcaaagacctatatgcatgcacacacacacacagacacacacgactagaaggcactacataaaatgttcagtgactaacttgtgatttttatttcctttttgatatttttctatgtgttttaagttttctaagggaaaatgcttttgttttaccggaaaagcaatactcattcatattacatttgtaatacttaggacaaccttatggggtagaggccatcctctgcccctttcagacaactgggctacctggcccaaaagcccaggcttttccccaggcccctgggtcatccccagcctggctgtgctgcttgggagcagccagccccagacaaccatagaagcagagagacctcggaaggcatcagtccagctgccactgacagcacaaatgtggtgggagagaggggtgaacaggagtttgctgtgtgccctctctgggcctcagtttccccttctgtgcaccaaggggcttggacctgatggcccagagggactctgctagctctcacaggctggcagtctagaccctgttcctgtaggtcacgagggacagggagcagacccctgaaggcaccttgcctggagagccctctctcccccacactaccagggcgacctgcccacgcctcgggagagggtcatggacagctccgcggccccgccaatccagtcccggccctgaatcagagaagccgctcacttcttgactttcgcagcaccgggggacatgacccagaaaggcgagctggcactgacagctccccggggggtacagtgggggccaagactctgggacctctgcccacctgctgtcagggtctctacagaagcacctgaaatgagcacatggaccccaagccccgccaggccacgttcccgagcagcctcggtccactcccaacgccgtccaggggccagcccaggcaggatcaagtgtcagcggcgcttggtgcccaggcagccacttcacctaccttgtttaccagcctgggcagagaccggagctagcccacacgctcttggccaaggacggcagcccgcagagctctgaccagcttggccagagggaatgcagctgattccccctgctctgtgcccgacccgtgttaaagtttaacccggcttccaggtctcctcttttccagacaggggcgcagggaaggagcgcccggcgagactgacgctccggctccacgcccgcctggctctgggctgtcggttaccctgtaattacctgacagctctgactgggcttaggaaccggtgagaaacctcagtctcatctctggtatctggaggaaggaagggaaataaagaggcattttaaaaatgcggactcaccagttctcaacctccccgggccggtgtgtgggaaagggcgggcggccgggctggctggggctggggcggggcgagccatccccggctcgggctccggggcccggcccactctccacaggccccgcagcgagggcgtggctcccaggttccacgtcctgcgagaggggaccatggcctggggctcagcagcctcctcggggcaccaggcagcctgcggagagaacaaggggagataagcttgaagaccgtggaccagcacaactgcacctcgggcagagccagccatctggaagggtctacgccccaccggtcgctggttacccagcgcagcagctccaactgcactgtcccccaaagaccctagggctcgcaggatgaaatggggcctgctgccttttgggggtatttgtttccgaatacggaggctccgaagtgcgaaagttgcatatcagctgtgcctgagaccccacacctgagcccttcccagctgagcctggagcctgaggacaagccaggtcctagccccacacagaggaggcaccgcgagtcagcagcatctccgtaagtctaatccttttcctccaagacatctaattttctaattgcacttaaccacatgcttaacccttaggcttcaggctgctctgcctaaggcctgtcagcagagcagtgaatgctctgaatattaacatttcactgaggagggactcaaaagggccctgactgtggccaatgacaagtgaagtctatatacagtaagttctcattcatgtattcgactagcct

SEQ ID NO: 63474 - DNA, 2027 bp, Homo sapiens
tagcagcctcaggggtgtgaaggtcaaaagtatcaaggaatcttaagcccagggttctgggccaagaaagcaggactctctctcatttacatgggcatctgagatgaaacctggtgtccggggacttctaccaacctaggattcgtgggggagggcagtgggactggttcagaacctggctcccctgtttactagatgtctgaccttgggagaattactttgcctctccgtacttcattatctccatctataaaatggggagaacaccaccttatagggttgctctaaagattagacaaggccaagtgttcagaacaatactggcatatacaaagagctccaaaattttatttttcagttactttgctccagtggtgggtgaatgcagagggcctggctggggaagagggtctctgcctctctgggtttagaccaggacagcagagctgcaatactccccctgccctagatcagggacattgcaaagactggggggacaggctggacagctgctcagagactgcagcaagcagggcttggtcgccctgggagagcaggcagaaggtcaaggaagttgtacagggaatgccacctccctgcacaccatcatctatcctgggctttccagggcaacctagatttcaaaccctctgctccctggtgcccctgtgaacagcagaactcaccaccctgtgcccctaaagtccactcactgcaaatgcagggccccattctgagactgcattcctagcaaatgactctccctggtcaaggagacggctactctaacaagggcatggggaatacacgtctgggaaagaatgggtgctcaccctgttcaggcagaggaaaagccggggaaggtgaaagaccaggggtggccacaacccgcaatcttgagacagtgttggggtatggaggtgggggctgggtggcagtaaatggtactccagaatttaattaaacacagcttcctctttaatatctcccaggaccaggcccttcactgcaccagccagagttctgctctaactagcaatgctgggcttaaaggggtggtcctgggatcgccctccctgctgagaccctcacaactgctgcggctgtcaatggcccgattcctcactgcccggagggcaccggccaaggcccttcttcctaacctctgggcgggcgcaccccgccccaggccctgccagggaaaaagcgaactccccaagggacgtggtgggagggacccaaaggcagccttccagggagccctgggggtggggaagacgccaggaaggggagagggcggcgccgattgacaagcccatcccgggtagggtctgcgctcttctcgttcaataaaatccaaacggggtcccgaggctgctcggatcccgtgggacacgccgcccctgtgcccagctcccagcaaggtcctcgactcgggctgaacggcgctggaggggacctcgcagggctgggtctcccgggcctttccctccccgcgcccatagcgggtccgggcagaggggtcccgagggcagggccggcccggacgcggcgccccaaacggcgggccgggcagagcccagcgccccgctcgcacccagcccgcccgggccccccactcaccggcctggcggaggcaggatccaggcgtcgccgcagcgcccggggctcggcccggcccggcccgccggcaggaggcagctccacgccgccgcctcctcctcggccagcccgctcgcgcccctcccgcacactttccacaggaaatgattaactcgggccgcggcgcgttcccatggcaaccggctccgaccccggcggggggcggcggcgcgcgcccgcactcacgcgcactggcgcgcacgcgtcagcccgggcgcgcccccgcaggtctcccgccggcactcccactcccactcccactccttcgcggggcctcccactcggtctctcccgcctccccgcgtcccgcactcgcactggcacacgtgctcatgcgttccctgaaggctctcacaaaacaggcc

SEQ ID NO: 63475 - DNA, 1433 bp, Homo sapiens
gcctggccaacatggctaaaccccatctctattaaaaatacaaaaattacccgatgtgctggtgggcgcctgtaatcccagctacttaggaggctgaggcaggagaattgcttgaacccaggaggtggaggttgcagtgagcaaagatcatgccactgcactccagcctgggcaacagagcaagactttgtctaaaaaaagaaaaaaaaaaaccccgtggaagagctcttggaggtgaagagcctggcactgcacccagccccataagcatgaatttggtttccagctttgcatgtcaccaactgcaggtcttgggcacatgactcaccctgagcacctcagggggtctggcacaaggctcacagctgcaagctctcaggaagccaggctcctcagtgggcatggagaggtggtggtcttggatgtcccttgactggactgtaaattcctgtcatccttgtctgctctagacccagctcagcaagcattaggtgttcaagtgatatttaaactaatggtacttttctcactcttttctctccctctcaccttcctgctccctgtgtcccttcctttctagaagctgtattaacaggggaaaacagttctcccattttcagagaaccaaggcaatctttcccccaagaaaatcaccttgccggccaggcacagtggctcatgagacaggaggatcgcttgaggccaggagttctagaccagcctgaacaacatattgagaccctgtctctacaaaacaacaagccaggcgcggtggcacaggcctgtggtcccagctactcaggaggctgaggcgggaggatggcgtgggcccaggagtttgaggctgcagtaagctatgatcgtgtcactgtactccagcctgggcaacagagcaagatcctgtcttaaaaaaaaaaaaaaaaaaaaaaaaaaaaaaccttctaagaggactagaaaataaaaaggaaaccaccttgctttaaaatccaaatggtggctgcctttctgcattggccaaaaagactgaactcgacagttctcccctaactctcagtttaggggaacctaaagccttatgactcaaggaggaatttggcggagattccctccctcctagcactccaaggctaaaagcaaacggaggctttgtgaggttttttttccccttttatcatttcctgtagtcttaaaaaaatgagaggaatgcaaacattgaggagataatggacgtaagcaccaggtaataaaaagatttagcaataaccgccctgagagtagcacgggccaaataagccccgcccccggcccgcctctcagcccgaggatcctcccaccatcctccagaagccgccgggctcctccttgctaagtgttctgccgcttctctccttgctcctaaattgttatagctccgggttctaaaccagcacatg

SEQ ID NO: 63476 - DNA, 2263 bp, Homo sapiens
tgctaatgcctacatttttctgaagtgcagacatcataggataaagccaaggtcacattcagaatggaggttccagtgtctggggcgcacctagcactcaataaaaatggctgaaaagtatttcatttattcacttatttagagttggggtctcgctctctcacccaggctggagtgaggtggcatgatcagagctcactgcagccttaaactcctgagttgaagcagtcctcccacctcagcctcccgtgtactggaactacagctgtgagccactgcacccagcaaaaaactattttaaatggctgcataatattccactgagagcctgtgccctgactgagctggccattccgtagggtctgatatttgagtagctcccatttttgtcacttttataaacagcattgctgtcaccattgccacccacacagcccgttcattccctggtgtggggagggaagggagaagagaggttgtcaatttcataaaaaatctttctgaataaagagtctgagcatttttttttcactttctaaacatgttgccagattgcccctcagaaggcctgtaccaaatttacactgtcgttggcagcattttttgacgagaactacttttcacgctaatttacagtttttctcttggatctggaattctcgccctggctggttctcctgggaggcatgaggcatatataaagatatctgagcgatggctgtcaccagaggggcgtatctggttcttctgccaggtgctcaggccgggagtgtttctgtctgctgggccaggccaggtggggctgagagcactgactcagtgctcccaatccctgcctgctgttaagccctcagagatcttctgaggtcagtcctggaacgcctcagtaccccgcggtccaacactctggcccatcctagacggatgagtctcatctggtgccaccaccatgattcctgctctcacaccctggcacttcactggggctccttgcagtaagtcaatcagctactactgggggaaaaaaaaattcctcctgggtggggagatggggacaggggccataagggaagccacgtgctcctggaaagccatagccacagcccctgaccacctgctgaactcttagcaccactgctgctgctgcctttaaactgtagcttcgctttgctgaggttctgtggtgcgcagcctctcccctagctctggtcctcctcctctgggggtggcccttgtttgcaaacagcaacaggaagttttgacgctgctgattaactagactcccacagctctcagtgctgagtcatcgccaccagtgtcaacctcccgcccgccccgctgacaccaccagcttccaggtgaccgagaggaagcagcaaggatcctgcggttccagtggcttccatctgccaccttccaagggaggggagggacaaacttccatccaccccagacaaccagaatgtgcagggccctgaatgccaggacgggaatttaatctaattcaacttcagcaatgggctgagggacagcttcatgccaggcaaagggaaaaactctttacacacaggattgcctttgctttcattcaatccccgcaacaacatgtgtggtaggtgttattattcccattgtacagatggagagactgaggccagtggaaggcctatggatgtgtaggggctgctgtgggaagatagcttggagtgccagagatggtgggtaccgccagcaggagctgtgtccccaacccacgatgtgaccttggtcagacttcctccctgttctgggtctcatgcccctccctgggtaaaggaggagggtggactggtgaccttctcagggctacagccacaaggaagtgagtgggccagctggaagggatggtcctcattctgggactctgcttgctgaaagcctgatccaagggcaggagcatcccacctcagtacctggggttggcttcactgttcacagttgcttctccaaggaactccactgaaagaaagtagttgagtggttgccagggcctgggagggagaatgatgagtgactatgaatggggcttctttggggcgtgataaaatgtcctaaagttagtttatggtgacagtgtacaactctgtaaatatactaaaaactattggattgtacactttaaacagggaatgttatggtatgataattatatctcagtaaagccgtttaagagagaaaggaagaaggaaggagggaggacaggagagagagagacctacacaga

SEQ ID NO: 63477 - DNA, 799 bp, Homo sapiens
tgaccaatgtgagccagcaccattggcacctctcaaccaggccctctctcatcaaatagttaacctgcctcccaagcctactcagatatcactgcggccagaaccaatgagatggatggatggatgtcaacagggcacttcacaacaaaggaatgtggcctacagcacaactcaccccagcccagccctcctagcaggtagattgcccagcccttgggcaatcccaggctgctctgcaacacagatgacctcttgagggacttgcctcctgttacctgctgagcagcgagtcccacacctaagtgaggtggaggagaggcaccaccatcagtcctcatgaatcactggccaggctccttctctttgtccctccccaacaaatgccaagcatctgcactaaagcaagactctggcttgaccccagcctcaaagggaaaatggggtttgcacatggactttcggctccattcatgaaagcatagatacgtgtgattataacaaggatatgagcttggatgcagcaggctgttaaacaccatgccaggaggacgccactccatttaacccctgaggccactgtggggccagctgtgagtcaggctttgaccttggccaccttcctaatttagagtggcagctgcccacccaaattagctgccccacgttcagcctcagctctgctgttcaaatgcctctatctacttaggttctttggaaaacaattctgaggttgttttcttttcttttttgttttttgtttgtttgtttttgttttgttttgaggcaaggtctcactctg

SEQ ID NO: 63478 - DNA, 2561 bp, Homo sapiens
gcagtgacatgatctcagctcactgcagccttgacctcccagtctcaaacaatctttccacctctcagcctcctgagtagctgggggagtacaggtgtgcaccaccatgactggctaattttttccatttttgtagagaaaagttttgccatgttgctcaggctggtctcgaactcctggactcaagctatcaatccacccaccttggtctcccaaagtgctgggattacaggcatgagccattgcacctggcttgttttcttgtttaactgtttttaagccatatatgttcaaacagtgcaaactatggtgaaaagtaagtctccctctcacccttaacctccgtcctctgcctccctcctctgagggaatcattgccaccagtggctggagggtccttccccagaatagtccccacatacaagcccacaccccaaaatgcccgcttcccccaccatgggagtccagagcacagttcacatgctatcctgtgctttgcttttcacacttcaccctgttggaaagctctccacgtcatgcatacacacttgtccttctatggttgtacttttttcaaagagtggacccaactgattgaaccagttccctattaacaggtaatcgagttatttctagtcttttgtgaccaccatacttccaagaatgcccttatacctagatcttttatctcattaaaggtggtagtgactattcctaaaagtggaactgccagtgtttttaaatgtttaaatttaaatttaaacattaaaaaatattgggttaggaaccaccactcttttgaaaatttcacgtaaaataccagttctttctcgagaaacaaacaaaacaaaacaaaataaactatgtgatgattttgcattcagttactagagggaggctcatagatggcacattaagaagtcttggtagagaggaagagaacaggtgcaggaaaattgtatccgaccctcacttccctgtgtgcataagtgttttgatttggtcatcacagaggaagctgacagtttgttctgctgagacacacagtggagttcagttctgattccaaaagtcagattcctgatcatattctgccactagagtacatacctctcaccgtggtcatactctggacctcggactcccagaatgtggctgctgagcagaagtgcgtctggggctgctccacacggtgctgcgctgggacactggggcctgctgcagaccctccctgcagctgctgccttgggactgtgaaaccagagtctgctaggaaggctctgcaactcacacgctcagttaggctttaatattttatgccagctgccaataaggactcaggtgacaagagtcacttcaggaaaggagcgtgcagaaagcatggaccccgtcatctctcattcagggtccgcatcagactaaagcgatcccacaagagaaaagctaaaaggaagcagagccgtgaacagcctgtggctggtgggagcctggcgtcagcgagctcagggtctcacttcagtgacttggcagccagtagcttcccttgggccatggccacaggccacatctcagtgtctggttggctctacgtccaaggccactgccggctgcagagacgtggtgagggctgaggccagacagctgagggccctggctgacctgctggcccattcacctgaacaaggttcacccagggcagtttccacaaatccggagcagagccagagagccagcccatgcctggcacagaggagacgctcaacacctgtcatcccttcccttctcctgcctgtccctcagagttcctggagcttccgttctgctgagcctcatgctgcccatgcgacacatcacgaccattttcaggaccacaacctccctgtcccatggccgttttctgaggtctagaagtcacccccttgggcttaagcaaccacgaggccatggatggtcacaaatttccctgggctgcactccacaaaccctccagtgggcacagcacgtgtctctcacattttggagagaaaggaactgagaactcccatttctggaaccccatgccagttctagaaggttccatcctgaagatgaaagctgatttgtcatctgtggtgtgtcccaagaaaagaaaaatacctcattttgtactgagcactaactacacaccaggtgcctattgaagcctctgaggtatgttcacttacttatttctcccaacaaccccttgagggaagttctattgttgtaccctcttttcaggtgaagaaactgaggcacagaaaggtgaagtgcttccccaaagtcatgccaccagtaaggagcaggctgggatttgtaacccaggcagcctgccacgtggcccctggccctcttggaggctcttccctgagcagcctccagaggagagaatggaagaagccactctgcgctcctcctcctcctctccttcctcatcatgagggagcccctgcctgtacaagtgctttacctgcatcatctaatgtcacctttgcaaatgccctgtgaggtaggaagcgtgcttaggtccctttctcaggtga

SEQ ID NO: 63479 - DNA, 736 bp, Homo sapiens
ctgcctcagcctcccaaagtgctgggattacaggcgtgagccaccatgcctggccaaaaatctattttttaaatgttctttttagcggcaaaacaaactcaccaaggcaaaagtacctagggctcaggaaagtcaccatgcagccctgaataggtagaccttgaactcagatctgtttccctcccagggtcatgtccatcaaagaatcctccagcctcttccccagtatcaaagcaaccactcagggtaatctcacggagctgcagagttgacgtctgtccttggaagggtcatggccagacggccactcagccacaggcatttgcccagctggccacaatccctgtgggcaagtgtcccaggctcaatttttggccttccaagaagccattggagcagaggagctacatttctggggccaagtcattcataagagaagaggaacaaggcaagccgggaaacatgcttgcccctcaactgggagaggcaagagaagatgaccaagatcatccaaaagaacattccagcttttcttctttgcctgaaagaaaacaattgacagcctctaccagggaattatgtcctcgaaaggccaggtatagcccaggaggacagagagcactggctttggtgacaggcagatctgggtttgggtccccactcagccatttaatttgctgtgtgaccttgaaaaagtgaccttacctctctgactgttttcctttcttttttcttt

SEQ ID NO: 63480 - DNA, 531 bp, Homo sapiens
ttattcattggtttgagaaacaaaatcattgatgccaacattcccggggccttgagtaattatgccatgggcttgcctgaaacactgataaatttagagaagccaccaaagccacagtaactgaggccacactatgaggtcagcctctttttccccccaggtctttgaggtgacagtttagacaggaggtaggaatcttgctaatgaaaggagagcctcaccttcaattaaggcgtcaccagagtgggaaattcatcagccctggtgatggtgacttacgccacacttgagccttgcaagtccaggatgacacaacccaaggcagaaaccatgaaattagaacaaaggtctaagtaataagcagacctgggagttccattcaggtgagcagggctgttgctcagcaggtgagcctgccccgccatggagactcagcgctagagtgagaaccacatctgctcacaccaggggcctgaaccctgctaaccccacggggggttctcacagccaaaagctcttgtgactcttcca

SEQ ID NO: 63481 - DNA, 2295 bp, Homo sapiens
gctactccctgggagctttttgacgtccttattattattattatttaattttctgtcctgagtagctggggctacaggtgcttaccactacatctggcttttttttttttttttttagtacagacagggtctttcccaggctggtctcaaactcttgagctcaagtgatcctcccgcctcagcctctcaaagtgctgggattataggtgtgagccaccttgcctggctgagatttcatcaagctacttagaacatcgtgcaacttagaattcatgaattgtttatttctggaattttccatttaatatttttggaccttggttgaccgagggttactgaaacctcagaaagcaaaactgtggataagggaggattactatactgccattaagttgtattttaaaaataatttcaaaaattgtattcaagtaatatgtgtattcaattaaaatttcatcccttcaatgttttataagtaattcaaataccagagtggtaaccatcttctaagaatattagctacaatcccaatcactgtttttcaaaaagatgttgtcagtcctgcttctgaaatttctctccaacaggcctcctcctcccattcccactgccccaacccagccaggcccttaccttgcactgctccgggacaccagcctccaatctgagggtttcctggtgtctgggcttccatgcagctgtcagagtgttcttcctgaaaagaaactccatctgtgccattttccgagcaatacgttttactgggttgtcctgtagccttcaggataaagtacaaattcctgaacatgacacctcggatgaagtccgtcccctccttcccagattaccacctgcccctttgaccctgccctttggtcatcagccacaatcagctgctgtctccaccaagcctcaccagctctccaagccttcacccatgatgctgtctgcctggactgccctccctcccattcctctgcctacaagatccgatatgcgcttcagcctccaatgttagctcaccaaaatcttccctttgaattatgaatgcagctggctgcaaactcctccaagtgaccagagtgtcctataatcacgtctattatagcatctttgatttagggggtgatttttgttttttttgtttgtttgtttgtttttctttttctttctttcttttttttttttttttttttttttgcatttctgtatttcctaagagaatgtgaattcctagaatcctaggaattctcatctgatttttattcccaacgtctagcactatgcaaagcaaaaagtaggtacccaataactgcttttggaatgaataaatgaatcaatgaatggtaccatgcagctgccaaagtgctttctgcaaagcaactctgaccttgttgctctctgagctgtgctccttcctgggtgatgaggtaacactggaagctattaacagataagaaagagaaaaaaaaaaggaggggagagatctctgggtctctgacaaattacttattttcactgagtttctgtttcctcatttgtaaaacaaaagtgctgtccggatgagctctgaaggcatcttccagttctcaaattccagcctgcttggctcctgaacaactttcccagagtctctggcagctataacccaagtcttagcaccatctagtgataaacaggcacacagcggggagggaaagccggggagtggggagggcggataagagaaggaaatgccaactttaattatattatgagccggcaaggaattaggtcaaacctgcaaatacaaagttaaaccaagagacctaactttatcctggggatggaataaataattagcttcagaacatggatgaagtagacaattatagaatgcctgagacatggaaaaggcaataaaacaattcctgtgtaccctggccctcttgttcttttatcaatttactgcttgttactgtaattaaatatttttcttgggaggacatgtacttttgaagggcctatggcatgggactccaataactcaataaaaccacaaattaagtatttattaagaatatatatgtattttcaagtttcttccttactatttatttatttatttatttatttatttatctgagacagggtcttgctctgtggcccaggctggagtgcagtggcatgatcacggctcaccgcaacctcgaatccctgggctcaggcgattctcccacctcagcctcctgagtagcaaggactacggggatgtaccaccatgcccagctaattttaaatttttcagctaggcac

SEQ ID NO: 63482 - DNA, 2247 bp, Homo sapiens
atgctactgcactccagcctgggcaacgagagcgaaactccatctcaaaacaaaacaaaacaatgactaagataaattattagagggagttaaaaaaaaacatataaggtgttgacgatatcattcacaaacattgcaatggcaatgagaacaacagcatgcagtaagcataagtaataagacactcaattgaatgtagtatgagaaagccggttgaagacaccgcagacatgcagcttcctaatgcatggaatataggatttaagccagccagtcttgttggctcatgcctgtagtcccagcactttgggaggcagagacaggcagatcacttgagcctaggagtttgagaccagcctgggcaacatagtgagaccccatcactacaaaaaaatacaaaaattagccaggcattaaatagctgggcgtggcggcacgtgcttatagttccagctatttgggaagtgggtggtggaaggatcacttgagcccgggagtcagaggttgtagtgagctgagatcaccccactgtactctagcttggacaacagagtgagaccctgtcccaaaaaaagaaaaaaaaaaaagatttaggcaagctttcagaagaaaccaaagtttataatacaacaaaacattaaagaaatgcagtctctatagctgaccacttcctcattttgttgtattgtcctaaaagagtaattgtctctaatcattctacagtgaatcttctgctaggtattaaacaaacattataaagaaattgctaatgaaatctgttgatagaattaagaaaaaaaaagaaagacattgttaagtagaacaattctaaatcctcaagcatgcataactctgagcgctgttagttgtctcattcaatgtcatatcaatttgctgagaaattaataagatagcctcattttttcatattaacaatctcatgcagatatttttagggtcctgctcattagaactgggtagatgccctttgacttccctttaagcaaatctgagaaattctatgattcaacaagcatttttctttgtttctgtgtttacaggcattactcatatctggaagaatcatcccagactgcaatgaataattcaaatctgaatcataccaaggttctaatccccttttctcatcttcaaatagtgctttttcttttttcttaatcttcttcttcttcttttttttttttttttttttttgagacagagtcttactctgtctcttaggctggagtgcagtggcgtgatcttggctcactacaatctccacctcctgggttcaagtgattctgctgccttagcttccaaagtagctgggactacaggcgcatgccaccattcccggctaagtttcgtatttttagtagagacggggtttcaccatgttggccaggctggtctcgagctcctgacctcatgtgatccacccgcctcagcctcccaaagtgctgggattacaggtgtgagccaccaagcctggcccaaaaagtgattttccatggtcattgtgcaatgctcttgcggagtaattagaaataaaagacctacaaacactctcagttctatcctttcaagtaaatttagattcaggtggaatgcaaagtattatctctggtgcaaattttgtggctcatacttcctcctggcagcttgttttttgttgttgttgttgtttgtttgttttgttttgtgggtgctgttcatgactaatttgccaaaagtcatccaatatattatcatattatccttcactgaattgaggccaatctaattttttttttgagatagggtctctctctgtcccccaaactggaatgcagtggtaccatcacagttcactgcagcctcgacttcctgggctcaagcaatcctcacacctcagccttctgactagctgggactataggcatgtgccaccacccctggctaatttttattatatatatatatttggtggagtcgggttttcgccatgttacctagactggtattgaactcctgggctcaagtgatcctgctgcctcagcctctcaaagtgctgtggttacaggtgtgagccagcgcacctggccctgattttaaaacttattacttacatttgacttatatgtggaagttttccatggtatctgaattattcttttgaacctgcctggaaacacttcacgtgaccctctcctctacccacttttcattaaggaacacttgatttcagaaatttggaaatgcggc

SEQ ID NO: 63483 - DNA, 2525 bp, Homo sapiens
taaacaatcgaatacaacaagggctatcactggtagaatatgtcacacaggattgtgatctctgtcttgcaaggggactctcccttgctgactttatttattttttatttgatttttattttaagtaatagagacggggtctccctatgttgctcaggctggtcttgaactcctgggctcgagcaatcctcctgccatggcctcgcaaagtgctgggattacaggcacgagccacagtgcctggcctcccttgatgactttgatgtagggagcagccagctgtgttggagaaggcccacatggcaaggacctgaggccagccactggccaattgctagtgggagctggggccccagtcctacaaccccaaggaactgaattacaccaacaaccatgtgatcctggaagtgggtccttcccccatccagacttgagatgagagcctgctctggaagacatcttgatgacaatcttgcagaggacctagctaagccatgtccggacttctaacccacagaaactgagatcgcaaatgtgtgactttaaacagctaaatttgtggtaatactgttatgctaatacatactctctcatttaagtctcacaacaatccccataagtaggtcttattattcatcctcatttccaaatgagggtatagaagttcagagggggtgagtaactttcccaaggccacacagctaagaagcggcaaagctagaattcaaacccacacttctgaccccagtgccccagatattaatgattacaaaacgacattgcatcattatcttcctgggcactgacaaatacccctgtgacatggaaagggctgagattattgtgcctctgacagttggggaaattgaggctcagagcagggggagtgacgtgcccaaggttaccaggaagtggcagaagcagaattgccacccacatctaatggcatgtaccaccctgtttctctagataagggtagattttccatcaaagagagccctagctttttaccggcaatttttcacactacaaacatgcggtgagcagtttgtctcaagaacaaatgaattctgcctgcaaccagcgggcctagacaatgaattggcaaattcattcatcaaggctccagcaaaacttgtttgtttaaaaatgaggccattactggctgcttatctaatcagaggcaatgggtttaaattgtgcatgttgatattaattgcccaagatttgcatttctagctggagatcccccaggagaacacaaacatgataattcaccagacgcctctgacacgcgccagctcggcactgtcccccatgttatttgagtccataattcatgatgtgacagcccacaggaaggctgagggtgctgtgaaaatgaactatctttttctttctaacaaaataactatgtataggacctttgctgattgctactagctgtctctgtttggaaacattgagctagcttctggggcatttccagattagggaaatttgtcctcattttctgatgatgtatgcttccctgtaactgagattgagcaatcagcctggagcaagtgacccacataagacctcttcatcctcttttttggagtggtcaagccggagatctcagcacttcacttctttggggacccaggtcccccatctgcaaagcagggagcttggacagaatcccacacgtggccctcaccaactcagatgtccccgggactatggttctcagacagtgtatctcccctgatgagcagagctcatacacaatcccctgcctctctggtcaagctggcctggccagcaaacaaccactctgatgactcatggctgagacccccattcccacgcccccccatgttgctgtgaggcctgttagccccattccttcgcctggctgcctcccacccacacctcagccttctcagtgtggacacaggtgcacaggcactgtcaggaatgggggcctctgcacagctcttgggaggtgcctttggggtcccatctgatttgccaaactcttgcctaacccacccagcaggatgggtaacagctaaaagcatggctttcctgagctttgctcctcctggtgggggtgggggcaagaagagagggtggggagacctggtaccagttttcagtcataagcagttgaatctcatgatttgtagtaattatgtcctataagatctctgcggacactgaattagcaaaaatggaaacattgttcctaggggaaatacaaggctagattcctacaaatctcccatcacaacattcatcaaccataatacatgaacttggccaggcgtggtggttcacacacagtcccagaacactgggaggccaaggcgggagatttcttgagcccaggagttcgaggctgcagtgagctatgatcgtgtcactgcactccagcctgggtgaaagagcacgaccctgtctctaaaattaataataataaacttgtcttatgtgtgtttctttttaaagacattattattattattattttgagacag

SEQ ID NO: 63484 - DNA, 4526 bp, Homo sapiens
catgagccactgtgccggctaaagacatcttattaaatatagattattgttttattaacattgaacgcacagccaacagcactgtaattcatgcctgaatgaagcttatctaacacatattttctgtgtaaggcacattgcagacttcttgtgcttaggaacatgagacggcacttcagcactatgctggggggccattttaaacagtgcaatcgccaacaaaaagcacaaaaatgcaaaaaaaaaaaaaaaaaagagtagcattaaatggaccataaaaagacacctcttcgcagtacaagagctaaaaccacaagacagaacagggacttcagcggggagcgtgcacttggggtgactcaagtattttgctgctctgggcatgtccttgaatgaccacaaaagcctgttagtattgatcttggcgttgcaagtccatttcagtgaggaggcgaatttgcaaatatggagtccatgaatcacaagggtccactctacctccctgtccctggggagaggaggcactggcacgcaccactgatgtggtggggaacgtggggagattttctgggagaaattcagatagactgggttttggaagggtccagtgggtcccttgagagcaaccaggtaaggtgagtttgggggcagcttccttccccaggggacctcagtgtcttgtgtgcatgatgcttggacatcaacactacatccttttacctcgaagctgccaaagggctcctgtgaaaacctaaggcacttcaagtcactcctctgtgtaaaactctccatggctcccatcttcctctgaggtctgacccaatctcttcccctagactcctctgatcccataccaagctatgctaattttcttgctgttgtgccacccacacactaagcctgctcctccccagggcctctgcacatgctgttccctcttcccagaatgctgtacccagccatcagtcccccagctcactcctttgctttgtgcaggtctcgttgaaatgccacctgctcagagcagcttccccaaccagcttatctcagacagctctccgtcacttcccgctcctcccgtggctttgtgtttcctcgtagccagacgcatcacatcatcgctcatctttccattgccggttccctgactagaatgtgagttttgtttggtccctcctgtgtccccagaactcagcactgtgtactcgatacatcactgtgctgtaggaatggatgctggtgagtttcttccctctattatgacagctctctgtgcagtttatttatggtgtcattgtatagaatgaaggggaaaataagaatgtgtgatacaagacaaggaggaaaacccagatatgtggattaaaaaggttttacccaactgaaaaattatagggtgaatttgatggctacagaggaacaattgcttatttatctgagagacagggtcttgctctgtcacccaggctggagtgcagtggcacgatcataactcactgtaaccttaaatatttgggctgaaatgatcctcccgcctcagcctcctaaagtgctgggattacaatcatgcagcattgcgcccggcctgaagtgatccttattaacatgcactgagctctcttgtatgacaggcaccccaccggagacattcctgcacactatttaattttcacagcagcaggccaggcacagtggctcacacctgtaatcccagcactttgggaggccaaggcgggcagatcgcctgaggtcagaagtcccagaccagcctggtcaacatggtgaaaccccgtctctacttaaaatacaaaaattagccgggtgtggtggcatgtgcctgcagtagtcccagctattggggtggctgaggcaggagaatcgaattgtttgaacccaggaggcagaggttacagtgagccaggattgcgccactgcactccagccttggcgacaaagcaagactccatctcaaaaaaacaaaaaaaatttacagcagcaaagtaggggttatgacctttattttacataggagacaactgagaccagaaaagttaaacaacttcctcaaagtcacacagccagcacctcacatggaagggatctgagccccgccagcctcccagacctattgtggggttcctgacacactacgttgcctgtcgctcaatttgaaacctgatcttaagggtttgaaaacaaaaaccggcttttctaaaaagaatgacctgttccccaacaatgcaaaatacggatgcacacggttattcgttgcaccactgtttgtaattgcaaaattgtggaaataccctaaatgtccatttacaggaatgttctgccactgtggaaaggaatgaggaagctgactctgcactgatagacaatgatttccgggttttgtcgtcatgtggaaacaaagcaaagtacaagaatctacagcatgccatattttgtgtaagaaagaagaagaaataagaaaatgtttgggctgggtgtggtggctcacacctgtaatcccagaattttgggaggcagaagcgggcagatcacctgaggtgagaagttcgagacaagcctggccaacgtggcaaagccccatctctactaaaaatacaaaaattagctgggaatggtggcagatgcctgtaatcccagctactcaggaggctgaggcaggagaatcacctgaacccgggaggtggaggttgcagtgagccaagacctaaccactgcactccagcccaggctacagaatgagacttcatctcaaaaaagaaaaaaagaaaatgtctgtggacttgtccattttcgcaaaagtaagcagaggaaagaaaaggcagaaattgatgcaacgagccacgtaataatgggagttgcagtcagggggcaatggggacagggagagttgggacgcttttctgagtgccccattttgcagagtgttgaccttcaggaacatgttaatgttctacatactgaaaacaagaaaaagtcaacaaagatcagggtggcaggagccctaaatggaatgtaaactgaaacaagtgaacctacctgtatttcaaatgaataaagtaaccacattaaagggtagtggaggaagagaacgactccagataactttgaacgtaacacttccatcatatatactcgggctaaacacaaaagaactgcatccagtactgaactctacctagaagccttactttttgtttttacagtgacatgggctggaaattctgaaatgaacttccctgtattgctcagtgttggagaagagatttacaagtatgaaaagggagaatattagaatgaattctaatatgtggtggcagggcacggtggctcacacctgtaatcccagcaactctgggaagccaaggcaggcagatcacctgaggtcaggagtttgagaccagtctagccaacatggtgaaaccccatctctgctgaaaatacaaaaattagccaggtgtggtggcacatgcctgtaattccagcagaggttgcagtgagctgagatggcgccactgcactccagcctgggtgacaagagtgaaactccgtctcaaaaaaaaaaagaatgaattctgtggtgctggattgaaattgttttatagataatcagtagaatagacagaaaaatttaagttggcatatacatgtatatgtgtgtgtatgtattttatatatacataatatattatatatgtattttttatatatatatatatatttgtacttatacatcttggtgtgtatgtgggtgtgtttcttggttctgtctgctgcagaggcctagtagcactccagtagcaatgactgctcctaggactcagatcgtggtttctaaaaaccatcccccagtaaaaggaatcaaggctccttggagaaatggccatttccaggatactgcaagggaagtacaagatgaaccagggcatctggttgtggcttactgctccttgagtaagcaaggaagtgctaaaatatgacagggatatcacgaaggtcacaaatgagccaccttgaaaaagtgcccactggccaaactggactaatttgagcatcaaaataatgattgttaacagagtattcatggaatcaagtaaatccatgcctatatacattgagaaatgaataaacaaatgggagagaagagaaagctcttccacacagctgactgccagctaataatcaaggagggagtggagttacaaaatttccattttacaactatcatagcaatctctttgtaactatcatagggaggaaccatcaaaggatgctaaaagcagtgggtaaaagtttgacagggaacaggatatcctcatagtctgaaggtgactacccactaattacttaggaattaggtttaagggaaaataggtttacaatacagaaaccttaaccaagtaatcaaagtaaaaatcatcgatattgggagtaaatggcatcgtgcgcctctcgatacatttgctgcagaagcgactcacttctgagttcttcctgccaaaaatgcacactct

SEQ ID NO: 63485 - DNA, 2521 bp, Homo sapiens
ccagctcatctgcctcttacatttaaaagtttgtaagttttctcctgagcagaggaagaaggaaggagaagccttcacaggacagtctggcctctaactgctctgccaaagaaatgtaagagtcaggctaaaagctgtcatcctcagcatcttccggaagggagggaggagaggagcggctgctctgggtggaggcagcaggttgcttgagcaagcaggtaccactctaagccttctcgggacagagagggggaaggtgggcttctctgagcgcctgtaggtccgctgtgccaacccactgttttgtttgctttttctggcatgaatggctgtcagacagtgtcccctggcttggtctgcagcaccccctgcccaccctggccctcctgcagcaaggtgcagccaggaagcctctgtgatcactccgcaaaggggagagaggaggcaaggagaggcaggggaggccccccacctgcgccccaccccgtctcttcttcctccctgagaaaccgaatgaaagccgatcacctcccgccggccctgcctgcaggcccagctgggctgcgtcctgtcagccctcgtccgggatggcccggccgctgcgacccgagggcgagccccgagggcggccgggctggagaaaggccccagggctacaggccgggcccaggaagcggctgcgcctcgaggcccggcctgggccgcccagaagctcaagaggccgctaggtcgcggcggaggggcgcgggggggcggccgggccggcagaggaaggggtgcggcgggcgcgggggtggcccccagatgcggccccgggcgccccgccgctcacctgctccaggccgcctgcagggcaggcgcggggcgagcggcgaccagctgctctctcggccgcccctttattccggctccatccgcggcggcgcggcctacgcgcgctgccaatccccggcctcgcgtagcggctgcggccggaccgggggcgggggacgggctagcggcggccggaacggaggaagcgacgcgcgctgccggagtagcggggccggggcgaggagcgccgggagggcgggcggacggaccgatggccttgcggagacgggcggacgggcgggcggcgcgggggccagggaggcggggccgggggaggagcggcatcccgggcggcggcggccaatgcgggaggagcgggcggcgcggagcgaggccgccccctgccggggaccccgtggccgggccaggtcggacaagccgggtgctccgggcggttttcgagtcgccaggcctgggcgcctcgactaaccgaggaagggcgctctgcttccggccaccccgctcgggcttaggggagggggctccgggtgaccgccctcggcccggctctgcgcaggagaggaggggcctcctagaggctctggtctgccacaattgatccgcccctaactgctcagcttggcttttaggggcttggactttgggctggtttgaggagggggctccaggacctctgatcctggccgggctcggggcaggcaggggtctccgctgggtctagtgcgctgacccgggactgtcgtgtctggtatgtctggtcccgggtggctgcagacagcagcgggcagaaaggtgagggccctgagcgatatatgaaatgggtacacgaaggctggggaggtcccagcggggtgccgggaggctgcaggtgaccagatccgcgtgcgcagccggcagacagcttggagtcggtgggctgaatcttcaccactgtcctgccgggttccgcccctcccggctccgccccgaggcggtgccagcccaggccccgcccctgggagggcgcttccggcacagcggaactccgggtgccggttgaggttgctggtggacctgctctggtggtcttggatgaggccccatgagcgcggcgcccctggtgggctacagcagcagcggctccgaggatgagtccgaggacgggatgcggaccaggccgggggatgggagccaccgtcggtgaggagtgaggaagtctctccggagggcgcgcgcattcaccctagagccagacgggacccgaatgtctgggggtggagtggggagggaggatgcggggcggctctgggaaggaaaaggggacgcaggaagaaaggaggatccagaagatatacccctcccccccaccccagacaaagctccagagtggccccacctggctagggccaagttgggaggccagacctgggttcgggtccagcctcgcgctggcccactctatcgcctggcacacatccctgtaccatcctaggtccgtttcctgatttgaatacaattgcgatagtaatacttgctaaagcgtagggagagccttttcattcatccagtaaatattcactgagcacccactccctgccaggctggggtctggtaattcagtggtgaacaaaaccgtcggccttacttcctggggcttagattcttaaatgctaggccttatctttgctgagtgctttacaagcagtag

SEQ ID NO: 63486 - DNA, 1195 bp, Homo sapiens
gagaggggcctgttgcccaggctcccatggtggcccctgcaaccccacctttcctgaaaggggcagcctcccagccactgcactgaaagacacaggcacattctgtgccttgttcctgctccccaccgcattgatctgctgactccgactcatcattagtctggttcttctggagaggaggaggatgccgggcatactttctggcttgcaagcaacatggcaactccggctgtgcagcctgcacttaactgacacctgccctgtgccaggccctgaactgggcacttggtgaaccagactaggtctaccctctgggtgctcacagcagggctgagcaggcagggagcacagagaagaatccccatcctcaacatggtacttccccagacttgggtactggctcctattgggaggggggcaggtgtgaggtagggcctccatcaacaagcccaggaagagggactgggccattcccctgggggaggatgtggctggggagtctgtctgtgctgaggatggaatttgagtgcagcaactttgagaaatgggccaagatcaataactggctcctcaatggagaatggaaggtggcaatggaggaaggaagcaggagtctcgctgagggggaggggtgggcaggctgggcctgaggaggaggctggcggcaggagcttggcgggcacccagacactgagtgtgcctctggagcagagtaagcccgttgagcgagcgctcccgctgacagtgcagaagcagccggggctcttccataacaggagattctccataagaggagaaacatgggagacaattctggagacagagggaagaccagagaaggctgcggtcccccccagggaggctggcccaaagaaatgctcttgatgaggattttatcgcaccagggagagtacaaaatcaacacatctggcctcggtgtcctcagatgttccccgcagggcagggaaatcatctcacgcctgtttggctgatttccacctggcactctccagcgcctctccagaccaccccagctttgtttccaagggagagggaaattaccttggcttgtttgtttattccttgtcttggcacgaagagtcccaaggcctgcttcacctttgatggtgggtcgggtgggtgcatcgcccgaggggcccctggaggggagagctgggggagggggtgtcctggg

SEQ ID NO: 63487 - DNA, 3731 bp, Homo sapiens
ccaactcagcctcccaagtagctgggcctacagacgtacaccaccacacctggctaatttttgtattctttgtacagatggggtcttgtcatgttgcccaggctggtcttgaactcctgggctaaagcaatcctcccacttcggtctcccaaagtgctgggattacaggcttgagccactttacctagccccaaactttttaaaattggctaatcgggactaaatatcatgaaagagtgcgacgtggtcggttaaacaaggacaaccccgttgtccgtgtctgaagaccactgcacatttcccaaaagcaaatttcgaagtggagaatttagaaaccaacttcccagatgaaggatcccacagagaagtgagtccgtggaaatgatagaatcgcccggttcctttctctaaactccgacttcctttccccaaggacatcccaggagggttcaaacgcgccctctctaaggcactctgccaggtctcctgatttccagtttccgggaggtgaggccggctagggtgccccgagggcctgctctagagaaaaccgccctcaggtgaggacggcttccatttccgggtctgaagataaggaacagcttatcttcggtctccgccctcctgcctgcaaccctcacccactgaccacgccggccagtccgccgcgccagggctgcccttggcctggtccccgggtctcggtggaccttcgacccgggcctcccagctctggcctcctgcatccaccccgccccgacctcaagctgcttccggaatagaatgaaatccagctcgttaagcttcgcggggaggtgtgtccacccgccccgcgccgactccggccgcactgtcgcacttcactcgcaccagccagtggccaaagtgcttgggcacctattgcgccaggccaggagccggaagtcttacctcgccctcaccccaactctttgccccacgttcccgataagaacatggaggctcggagagattaatttgcccacgtgcaagcggcagctaaggggcggacgcggaacttgaaccgtgtccctcctaaacctgccccttgtccgccgcaacgcgccctcgacgcgcacaaaaccctcactttgctactgaggaaagttattcaatggccagagacaccctgcggcttttgaaaagaggtttcaggctgacaaatatccatatatacatatatatttatatttaagcctaaaacgactctttgatccctcccctaagacctccttcccgtccgcctaggcctcggtatcccccaccaggtatgagaaggaggagtcttcattcttcccaggcggggagaccacgccttccctgcctcctccctccgcggggggtcgcgttggaggtcacccccgccccctaggcgctgggttgggagtgacgcggggtgggctggagaggtttcctgccgtctgggaagcgtaaacggaccgcccacctgtcgggcctcggccgcccgcacctgcttgtgagaagcctgcggctggggcaccgcccccggtccccgcccgggtccgcgcattgggagcacactggccctttaagagcgcggcggccgcggcgcgcggggaggagggctgggagcgcccggagccgcgctgaactcgccggggacgtcgggcgcccgctccttggctggctcgcttgctctctcgctcgctctctcgggtcggctccctgcgcctcctcccgggactgcttggggacccgggcccggtcgggcgcggcggcgagcagaatccccgtgcaggaggcgcgcgctccgggcagcgcccggccccgggcatggacagagggagctgggcgcgcagggagcgccgcgggaccgggcggccggagcgctgagccagacaaaggctccggagttgcgcttgctctcgggagccgggccccaggcgctgggcgccgaggctgcggaacctcgccgggggcagctccggtcggccccctttcccgccggctggttccgagctcccggacctgccctgcccgcttctcctcgggcttgggaatttgccgaggcgacctaggcggctccggcggggaccgggagcccgaggtccgcggcgcgcctgccgggccaggagccagggagcgtcgcaagtttccaaggcgcgtgcgaggatccggcgtgcagtgttccgagctgggctgggcgccgagagcatgggcagcgacccgagcgcgcccggacggccgggctggacgggcagcctcctcggcgaccgggaggaggcggcgcggccgcgactgctgccgctgctcctggtgcttctgggctgcctgggccttggcgtagcggccgaagacgcggaggtccatgccgaggtaagacccccgccctgccctttggctgcgggctgggggcttggagggagaggcgccacgtccgcaggctgggacttggaggtggagggagcggagacgcgccccctgttctgggccgtggcggggaagcaagcggacttggcagtctgcccctccccagctcgccctctgcagcgcacctcttcgcaaacccttgagggcgcagggcctcgctctcctccccgctactcctacagccctgttctgggcactgagcccccaccccgacccccttacattcagcctgtgtcccgggagccgcttccgccgcccccagcccttgcctcccctccttccttccctccagggcagccgattcctcgagagcccggctggcgcgcagtggcgctctttgcgagtggggagggggctgctctcggggacagccacaggcggagcaagagctgggcggctgggcaactgcgctcctgcccaggtggcctcccgtctgggtgataccgagccgcgcacggcgggccaggatggaggcggggggatgggtgcaaacggctgaggcagcggactcgggttgcgggggcgctttggcgactttctgcgcttttgcgaggaagcctaggcacgcccgggcggggtcctaaggacggaccctgcctcccacagcgcttcctcccaacagcgcccctacgtcgaagccctggattcgagagggtggaccccgcgcctctcttcgctaggagcccgcttggcgtccctcccggggccccgctctggatgggtcccgcgggtgaccaggcgcgacatcccggcgtagagccgagtccagccagcgccccagctccatggtgtctcccgagcgaggacaccgaaggcgccagctttcttgccccagagcaagagcagggtccactcttccccgacttctaagacctgcgccctgccccagataggcggggagaggacttgggcggggagtagggagaaagaaccaccccggagccgcttctgaacggtgctcaggccttggtgcccttgggctgcccgggctgcgggcctgagcgccgtttctatttgcagctcagctggtgctccctccctggcccacggcggctttcccacctctccgggctgcctgggagatttttccgatggaagcttgcccttccccgccctactttaataaaagcatagaggaagggcagggaattcctcctgggctcgagttacacctcccagccatttccccacctgctctgccctccctccctggcctggccagggagagctgaaggaggagccaggccctggtgggaggcaggataggagccccgccccgacccagtctggccaccctcccccaccccattcacacaggcagg

SEQ ID NO: 63488 - DNA, 1596 bp, Homo sapiens
tggatcccagaggcaaagagggatgcctcttccctaatcccatggccctcgtgggaatggaagaaaaagtgggaagagacccaactcagcctccagtatcaggacaggtggataagcccctggtaccagccattagccagcccctggagatgccccccatcctgctgccatcggccgatggtgatgcaggccaaggtctagatcacctctccagggcactggcactggcactgccttgtccttcccctaggagtgactgtcaccctgtaggggtgagagtccagctccacgttcagcgtttctgagcatggcacttgatacatagtgcacaacacggtggcctacaccctgtgtccagagcctccctggcaaaatagtgcaaaacagtgacagaagcgaatggcatttactgttgggcaagtcactgaatctgtatgaacttcaagatctctataaaaagggaatagcaatggtctatctgcttgatggagttacggggagattcattgcatttatgtgcaaaacactaaacgctatgcacaatgcctggcacagggggcctaaggaggcgcaggtgttatttttgagcaccttcaacatacttgtgtctgttgtggacacagactagggatgttttgtaagcgttttcacatttaatccttgtattaactcttcaagtgtagatgctgtcattactcaatctacaaaagaggaaactaatactgtgagttgagagaaatgacccccgcattccatagccagggagtggcagagcttggatttgaacccagctcagtctggcctggagcccaagttcccaacccccatgcggggttgaaggctacaggtcagagcctagggtgccatcctgtggaaattccaccaggcagaattctgctgggcccgatccaggtgggaaagaggtttctgaggtggagccagggctgcctgagctgtgtgagccaaaagccctcccccggcccacccagccttgcccccatctgtccagccacccaagctctgccctgtggacagccccgtctaggagtcagcacctgcagggaggtttccaggtgaggacccaaggccgggcccccagccaggcccgaaactcctggctaacagaggcctcttcaccccgcgcgctggccagggaacccggttgttttttcctccaagttaaggagtgtggggcaggctggaaggctgctgggtaaagaagtggtcagacctcaagacgtcttcctccttcctgcttctcctgctggacttccccaccacccagagtcccagcccccacctgcaactcgcttaaagacccatgggagggagcagatttaatcccagactaagcatgtgtgtcctagaactgctgaaatgtggaacatgctgcctctaaaggtagtgagcaatcctccaaggaggacctggctcgatgccgcctttttttttttttttttttttttttttttttgagacagagtctcgctcttgtggcccaggctggagtgcagtggcgtgatctcggctcactgcaacctccgcctcccaggttcaggcaattctcctgcttcagcctcccaagtagctgggact

SEQ ID NO: 63489 - DNA, 899 bp, Homo sapiens
ttctgcaagctccctggctcctccaggactcatcccattcagcacaggctctgtgcctagtggctgggagtacagagctgggcacagccttggcctgctccctagagccctccataccaagactatagggtaggggagatgggcatggtaaggacctcacaaggccacaaaaggtccgggggctggatccatcgctggcagccttgacaaggcttcttttgtgcctggctgggcaactctgcctgggtctgctcagattgcagacagaacctgggtgacagagacaaagcagagcccagtggaaagtgtccttatcgcctggggtctgataagggccccggggagggggctgccggccagctccacagatctgagtgctggaggagctggaagggccggctggggcggctgcagcagacgcttgccccctcccccaccccactcccactcccccaccgtggcggctgctcactgcacagtattgatctagtggcttcttacaccaaccctctcagcagccagtgggggagggtggactgagatggcccagcgcccagacccggccggagatgtcgggtgtggggaggattaggcacccttccccgtgctgtgctgggcactgctcctgagaaaggtccagtgtccccagcctgaggccaagaggagctggtgatacttcagaagcagcctggtccgatagccccagctccagcccagatcagctctgggaccctgggtgaggcactcactatctctgaaccttgccgtctgtattatgggaatggtcacaaatctacccttcaggagtggctgtgagcattcagtgggggctggaatgggtggctggcccatgccagactcaggtgctgcggttatgacctctcctgtgtgccaggggc

SEQ ID NO: 63490 - DNA, 1366 bp, Homo sapiens
tccagaggtttgaaatcaaattaagtggatttgttagtgaattgtgatttttctcctttattaagtttaaagggctgcaaatacaaactcactggaaaagagtagcgtggaggtggtaagggcgatcaatcagatatgtgcattagagggtaatttcccaaagcctcttctctaggctctaaaactaggatcaaaggggagaggcgacaggcaatttggggcaaaggctccccaccaccctggccatgtggctgtcattgcctaatattataaaggtcttccaggaaagcaaccgtctcctaaaaccagcttctgaaaacagcatacaggaagatacatgtctcagaaagtatcaacgtcctttccttagctccttccagttcagaggtcactgggcaggcgtggctttgggatgaagataaaatgaactgctcagcatttattgctcatggcggaagcaggttttaacatgttctgtccttctctagatcacaaagagccgactgtttttgatttgttaattctttttcattcatgacacattcccactatcaaagtgtggcctatgagtgctttattcctcaaaaaaaataaaataaaaataaaaatctaaagccaatattgttttatttcattaatttcccctcccctgcccatgagctggagatactcaaagagcttcagaatccagttactggcaattacagatcataatggttctctgcctctgcagacaacagaggtgaccaaagcttcaggccagtcttacaatcactctcccaggctttccatggttgctagggcaactaataaagaacaccgatttctctccctccccgcaatgtaagcctcagggaggtgggtcaagctgagggaaaaaaaaaatactactactgggatagggagggagctggtggatgctgtatatttctatgactgctttaaaaataacatgagttgtatccattccctcccccaactttcatttttctggccccacccactcagcctggcaggcagctgaaccctcagccatctggcatcctagctttaatgacacatgctctaatttacattaaaccattagagctgtccatttcagcaggaaagttcctgcactgggttaagggctgggttcccagacagaaattaggcagagggagacccctgtggggagaactgagcatagctccgactcagactcccaggctccaagggtcaaaggcttcactcccttcgctgtacttgacaggggctatccagacagcagacaagcaactctgggcatacaccaacaacccctaagtcagcgtaaggacaattatgtgcacagctaagaaaaggcaagtgtaattaaaacccatgt

SEQ ID NO: 63491 - DNA, 2280 bp, Homo sapiens
tccaagataaaattcaaaattcttggcttcattaccaataaatcctactgagattattccacatgcatctctctaaaaagcagcattcggcatacccacactcgccattctcccagagagcagtactaagaatatgacttaaatttcacattggagtgcctcccgtaacttatattcaagaaatagtacagctgattgcctgggaatttgcatgaagaacgaaataccaaagtaataaaatgcagaccaattcatagacagctagatctttcttcacatctgcaaaaaacagattcatcatctcgtggggccaaacacatatcatctagtggatgcctgaataaagatgaggcctgtacttggctctgagtttattaatccaaacaagactttgactgtcagcattctgcagttttcctgatggagaaatcaggcaccgagggcatagtacaggcaagtcacagtgagtgtggagcaggtgccaagggccactgaattctgacttatttgggatcagtgggaggaagggagcaaatgaatgcaatttaaacatcactggcttggccggagtctttctgtctgctcctctgtaagggtgcctgaacaaaggctctgtgtctagtgcccagcaccgtgcctggcacaaaaacggatatcagtaaatatttggaattcgtgaatagcaggtcctttcatctttacatccccaaagctccttcaaataagttcgtgcatttcatgctacgagatgggcaccatcaaccccattatattggtggggaaacagtggctcaaaagaatggactgaccgaccaagtcaagacagcagcgagggtcgcggtcctaaccacaccacagctgcaggacacttagatctcagccacgcccacccacatgcaccgccccccccccacctcctccgctgcttacacgacgcccccacctcgcgccccagtcccgccaggctggggacaaggcacagcagcgtcctctcggcctctcccaggccccaattcgacacaaccattccccgtccccagcccccggacgaggagggggtgcagcccctccaccccgccccgtcgccgcccctagcccgacctttttgtcccagatttgcagaggcttgctgccgatgctgtagaggatggagaggaagccgctctggaacgtgtttttgaacatctcgccggcggccttctcctaagccgcccccggagccgacctaggccccggagtagatacaggcaccgagcgtcgagggcacagcagcaggccggccctgttccgaagaagggtggttgagctcctggcctccggatctgcagccactgatggccggactcggacgcggcaacgctaagtccgcgatcttcagctcctaagctgcgagctcagaacggaaaccacagcaactaccgtccgcgccgcggtatttccccgccttcaatggaggcggagggccgcccgttgcttaaaatgaatccctccgcccatctgagcccgccccccgggagcgcggggcccaatcccgttacaaggaccacggacttccgtttcgttccgcctgtaagtcccgcctggtcccgcctcctcctgaaaagagctcagttgtcaaggaactatttttcttgccgtcgtcccagagatgcctttggaaaagcggaagggcacggagggttctggagttcgttgctggcacctgcgtggtgtcatgagaacgtggcggggcggtgagtgacgtgagggggcgtgacggccaggccgggagtagttgcccgcgcgggagaacaggggctgcgcagggaaagcggctttgaaaaagagcttcttggcgtcgggcggacgcccaacacatgcttgtcggccaagtacaggataaggttaaagggaactaaccaatattcagcactaactgtgataagcgcctaatatacatccctgcctgtcattattcacattgtggcatgcagtcaaagcgacactctgaggaaaatgtatcgccttaaatacattgattagaaaataagaaagcccgaacatgattaggccgggcgcggtggctcacggccgaaatcccagcaccttgggaggccgaggcaggcggatcgcttgagtccaggagttcaagaccagcctgggcaaaaaagcgagacccttcctctacaaaaaaatacaaaaatcagccgggcgtggtggcgcgcgcctgtaatcccagctacttggggggctgaggtgggatgatcccttgagcccgggaggaggagactgcagtgagcc

SEQ ID NO: 63492 - DNA, 971 bp, Homo sapiens
ccctaaatgaaagccacgacataatcttggctcccttcactctgcagagctcctaacctaattggtctctcctaacttgggaagatggggcaggaaggcaacgctctgagccaatccagaggggcgagcaaagcacccgtcctgaaggcctagagggtgccccctgtgccccgcggctccccagcacctgcttctcgtttcacatcttcaaggtagacaatgcctgttttaaaaatctggacgtctttaagaaatttcctcccaccacctcatctcagaaaacctaaaaggcagggcattttaatagctccaaaggacagctgttgacttcccaccccagtggaaacccagaagtgtgaggaagggcagctccctcacttccacccggcgtcgatccctggaccccacacttctccccgagtaaaaaagcattccttgggggaaaggggtgcgcaaagcggggagaaagggacgaaacgggggtaaaggggagggaagaggaagacgaggacatgtgcgagagcgggacctctgcctccctgcgggcccgcggaggggtcggcgggagacaccaccgggcccgagtgcggttcgcagggggtggccgggcgggggcagggatcagcgggcccggcggggggcggcgacggctttacccccagctcgggacgtgagcctcgtagtcccagtactcgcggctcctcagactgttcacctcggcgtagacccgggccctgctgcccgcggccgggccgggcatggcgggcgggaccggggggcggcgcggggcgcagagggtggcggcggcggcgcggcgggggacgcggggcgtcgggcggaggaggcagcgggccgccgggcgctggaggaggaggaggaggagcgcggcggcgggcggccgcgccaggccgggcccgcgggggcgggcgggctgggggcgcggggggcgccggccgagccggcccggccct

SEQ ID NO: 63493 - DNA, 548 bp, Homo sapiens
ggcggcggcaccggcagcggcagccaccggccgggaaaggggcagcggcggcggcagcggagaagaaggaggagaggaggaggaggcggaggaaacccggaaaaggggccgcgctcactgggagcggccgccgcccggcctggggccgcccaggctcacagcgccccctggagcgcggggggacccgccgggcggtgccggccccgccccggccccgccccggcacgccccgccgcctacctcgcgccctccgccaccctcgccctcccgccgccacaggtcggactgtccaaatcgcctcaccctcgggctggcttgacttcacgccacaggagcccccccttccactggccgttgccctagagccctcgcccgcgactcccgaccctttcactgtccttggagaccctatccccagccctgcactcacccagcttttacccacccaacacatcccatactgaccctattctgaccctcctgtcacccaaactgtcaagtccctccccagggcctcactcaaacctcagaacctcccccacctcaat

SEQ ID NO: 63494 - DNA, 1182 bp, Homo sapiens
agagatccttagactcagtgtgactgggactggcaaataataggtgtgatatatgtcagcatttatataaaacacatgtacacaaaatacagctttctatttcccatggacatagacatatgtacacataaaagcacatagagaaaggtgaagataacccacgggctgtggcaagagtggactcaggtggtgggtaaaggtcaaagcagattttgctctgcttcattttttttttcctcaaaaaagaaagatttctgtattagttgcaaaattaaatgttaattttaaacattgaatatgcattagacaaaatctggaatgtttccacattgagctattaataatggtttctttgggtgcgtggaccgggatggcgggcagggaggggacattttctctttttactctgtgttattcagtaatcatagtttttgttttacaaaggtgatcattgggaagacttttgaatagagtggggttctggggtcctgatagttctggcctggtccgtttgtgtcttctgcttctgattccagagaagggaggagggccagggttggcaagggccggcttggcaagggcaggcctcagctctagggggatctggtagaaccagctgtgatgtcagaagggcatgttgatagggtgactcactttccaggagggtggagatggctcctctcctcccttcacaggagctgcctgcggagctgtcgcctgcggggtgccctgtttcagcaatcctagaggaggagtcccttccagatcaatagaaaccagggacatttcaatccaggcctttgcacagagttctcttgcagccagcctggggaagttgtgcaaggttcattgattagagcaaagggtgagaggaagggatggcggaaagtagaggaagagtcttggaaatgaggctctgggggccctcgggcctaagtgtgttttggagggagggaaaggttttaatgatcccttgagcttctttagggatcctatattttccaggagctcctaattctagccatttttaaaatttgctccccaggactacttgtgaagtagatggaactggtgtaaatatctccattttccagatgaggagactgaggcccagacaaattagatcattcatcagatgctcaagttagtagctgagtctagtgtcctctcgtcctctcagcc

SEQ ID NO: 63495 - DNA, 559 bp, Homo sapiens
ctatcaatttaagagttattgttaaagaagtgaaactgaacgcgcttaggtgtgcgctcaaagccagcaacctggctgggtccgcacggagacaggcggggcagcgcggggaggggccaccggaagccccacccctttcctcgcgtccggtcgcccgggcaacgcgccaccgcgtcgcagccggagtgacgcgtggccgccggcacccggagctcctgggcacacggcattggcaggggccgcttcggcagagtgatgactgatgatgagtccgagagcgtcctctccgactcccatgaagggtcggagctggagctgcctgttatccagctgtgcgggctggtggaggagctcaggtaccgccgcccgcgcctgggggccgcccctcttcctcctaggccctcctctccgggcggcctcggacttggggaccagcatggagaagatccaagccctcactgagcactggggagacttttcctctttactccttactccaccaccactgagccaacaagctgttggtggagctagaacggggtggtagggcgaggggatg

SEQ ID NO: 63496 - DNA, 591 bp, Homo sapiens
catatctaatttaagaattagtcatgaatattgaagtggattactttttgtcacattgtactaagagaaacaacaaacattgccaacaaaatatcacccaaaacaacaaatatttaagcttatttaaccaaaacatggaggttaggcattttgtttcttcaaaagcaaggtataatagttttaacaaatcaaacatatggagctaaaaaagatgttttagctataaatataaaattttaatagattgttacctaagtgactatgtaaagcttggaatgtcacattatgatgctggcttcaccttgctctgtttatttacagactaggaaagagagaaagataagcctccaggtttatcgagctcctaaaaatttctcactttggcagccttaaactattgtgcaagagcaagtggggtcaggctgtgtgactcatgcctataatcccaagaagctaccagctttcaggtcccaaatataataagactcaaagaaatggcatcaaattctagagcaaaatcaagcatctaccatggttgtgctgaatatccttctgtttccacataagggaacattagagtcatggcttgcg

SEQ ID NO: 63497 - DNA, 820 bp, Homo sapiens
ttttattataagaaaaatattattatttaaagtatcattcactgaacaacacacctcactccagaggtacagagaattccaggacagttgcagtagacgtgggaacattttttttctcaactgggtgaatgtgaagctctcattcgtttcctgtggtgaccacataaacgttgtcacctatgcatcgcccaagaaagttaaatatttccgtcctcccccaagcagcccagtcaaccaaatgccactggtgcttccgtgcgatgatcatttctgccggcagggggcaatcttgctcgccgcattctatattgacgcttcctccagctgtctgaacgtggcgctcaacaaaattaaggtaaaaggtttctgtgctgacgattccttggcggagaaactatttgcaaacagcaagagaaacgtgctcaaaagccaaagcgctttccctggtttctgatcgctgtttataggagtaactgctgtagaaaagaaagaaagaaaaaactgcctgtttttgtcaacttgttgcaaatgttaaaactttaattaacatgttagctgttttgtttcggtgccttttcttcattgatgtcaggtggctttttcatcggccgcatttccaatgaggcaaagtggcaaactcatcctttctgtgaaatgaactgtcacagccgatgggccgtgcaggaggtgccacccttgctgggtgaccgtgtttggagcgttatttcctcatctctgaaacttgggcttctagccattctctggcttcccttgcagcctcttacagacctgagtgaacccaggagactaaacaaggccc

SEQ ID NO: 63498 - DNA, 743 bp, Homo sapiens
gcttttattttaaacccctaaaagtgttgcaaagtgtttttaatttcatataaatagttaaggatcacatgaacacaatccagtacaaatgggtccaggagcttcaacgagcgttccagcttcttcgtaacgttcccacaccgtgcagcaagcggagggaagagaacttccggcgcccccacctaccgctccccagccgtgtcccgctgctctaaatctgcagacttgatcgattgcttctgcctgggcggtaccgcccgaattgactgctcctgtctgatgcgtccccgggcgcgggaaacgagtttcaatccactttcctgaccccaaccatcctgcccagtctccgcttccccgtcttgtacacccctaactcctgaggctcctccgaatcacgcgagtggaagcggagaagctcaagtggccgccatgtcagaggcttatttccgagtggagtcgggtgcgctggggcctgaggagaactttctttctttggacgacatcctgatgtcccacgagaagctgccggtgcgcacggagaccgccatgcctcgccttggcgctttcttcctggagcggagcgcaggcgccgagactgacaacgcggtcccacaggtgagcctttgggtgcggggtcctgcccggaaagactgcagctcccggcgggcccctcggccctgggacgccgcatcggggcgcgctgccctttgggatttgtagttttcgaggagccagggccgaag

SEQ ID NO: 63499 - DNA, 3096 bp, Homo sapiens
tgtgtgtgtgtgtgtgtgtatgtgcgtatgtatatatataaagcattgaagatcatacccccaaaatgttaacactgcctattgttaggcagtggaattattagtgatttttattttccccctgcataaggtttatgcattgaatatacataactattataatttgtaaacaatattatcagttccacctcttgccttgactcagcaccaactgggtttccatgagcctgctaaagtttccaggggaagtggagggacatttgcaaatggcactggagggggctctactgtcctcaggaaccgaggagacagtggggtgtccagagttaccaggatagcaaggggctggccctgcagggcaaagggcccttacatatcatgggagaaaggggattgcaataaaaccagtgagtcgtccacggtggcccaggagcagggagcagataatctggtaactggtgaaattccagagccaggctgaggccgggaactcttccccacccgcttcctcgttccagcttcctcaccatctactcatgcatacccaggcctctccacctcaattcaggagctcccattgaggggcagggctgcaatgtgcttagctctgtgcctccctgagctcagcacagggcctggctgatccagtgtaggatggatggatggatggatggatgttctctccctttcgtccgcctcccatctccatctgctgatcttccacctcttgggggctcagatgcctcttcctccaggaagcccttgctgagtcccctaggcctccactgcactctatggtaacatcaattactcatcttagtagagtcggcctggtactgagattatgggactctgagctggtttccatcagtgcatgaaccttaaagtcaaggtcaatgtcctgatcagctctgttctccattgaaccccacaacaccaaaaagacgctcaatcaatactatgaaaggaaagaaaggagcctctcttctctccctgagtgtggctcaagattcggaagtagggagtgttactggggagggggagacagttcctatctcccccacccctgctaagggaagaagattcattggccccaggttcatcatctgcacctctgactccatcagctggttctttctacttgctcccagtcatggtcacgaggggatggtgactcagcccaattcatcaccacaatggaaaaacccagtcacctgtcctcctggcagcaggactggagctgcctctgtctgtggaagggcagcaagccatactgttttcaaggtccttttgtcttttacctgctgaaaaatcaaaaatttaaagaatggaggagtaccactggtttacatttacagtgtggtatgaatctcaacaacgagggatcgttgagatccctatgttccctccacgccaggctccaagtcaaatgtccatgtgcatcatcttacaacagtttcacaagaccattgttatctgaagtggtcactggtcactcttggcccccagcagctgacacaccctttctacaaggcagagcccacctcccactagagaaactgaaaacatctttccccagctttgcttacagctttgccaaagtatatgacctatgctcctccaatcagacatcccattctatttatttatttatttatttatttacttatttatttatttattatttaccgagacagagtctgttctgtcacccaggttgaagtgcagtggtgcaatctcatctcactgtaacctccgtctcccaggttcatgcgagtctcctgcctcaacctcctgagtagctaggaccacaggcgtgtatcaccatgactggttactttttgcattttttgtagagacagggttttgccatgttgcccaggctggtcttgaactcctgggctcaagcaatcttcctgcctcagcctcccaaagggctgggattacaggtgtgagccactgcacctgggcgtgttctgttcttggttgttaattagaaactagtggcacgaggaagccaagaccacacagaatccactgcggtgaggactggggaagcagcagctgagttcctgatggcagtgcccagtgaccacgtccaggggtggcactggctgcagcttctgtgctgggggatggcagtagtggttttaacatcaggccaacatagcagtgtcaggcctggcacctgatattccaagagatgcccaccctccttttttttttttttctttttcttttttgagacggaatctcactcttttgcccaggctgaagtgcagtggcaggatctcggctcactgcaacctctgcctcctgggttcaatcaattctcctgcctcaacctcccaagcagctgggattataggcgtgtgccaccacacctggctaatttttgtatttttggtgaggtttcaccatgtcggccaggctggtcttgaactcctgacctcaagtgatctgcccgcctcagccccccaaagtgttgggattacagggtgagccaccatgcccggcctatcctccttttaacaaagcctttttctgcttcaattagccagagtaggtctctatttcttgcaattaaacaccctgactagatatatcagcctgagtttacagatgagaagtgaaggctcatttgagatctttagaaaggttatctcatctccgacctgggtgcaggccagtgatcttctgcccattttacaaggcagtgacttaggaagcatgtttcaagtaattaggagcaaggctggggggacactttcttagaggcctcctgtcccaggcaacagcttggctctctgcactgttctgcttttcactgttaatccaacctgctcccaaacatcacccctcctccgcagagtgctgaagatgaagagagcccagcggcacaggggacccagagcttgcccttctgctgactcagtagtgactccgctgcctgtcatgactgatgtttccagaagggtcagggcctcctcaacctacctcttccttatgcacctttgtttgatgcaatagccctggggactctcacgattacgtttcttcttcatctattgtctccacttttatttatttatttat

SEQ ID NO: 63500 - DNA, 1774 bp, Homo sapiens
cgcctgtagtcccagctacttgggaggctgaggcaggggaattgcttgaacccgggaggtggaggttgcagtgagccgagatcgcaccactgcactccagcctgggcgagactcccgtctccccaacgcgccaaaaaaaaaaaaaaaaaaaaggaaaaaaaaaaaaaactgagtgttgagctgcggcgttgcttggcttcaaaacccattcctgtaacctctatattcacagcctcattttcttacatttaacagcatgctacttccccaggtttaaccaccatttgttttattcatttatttacccaataggtagatattgagtccctactatgtcagctaataaaacccaccacgtgctatgcagcagattaaaaacgaggatgtactggcaaataagggcagagaggatctattctagatccaggagccctctaggccacgccactctgaaacacacacgaaaactgctctgaacgaataccaccagtaaaagggttccatggccatcggcaacaaggggtcgagatcaggaggtcgctcgccgcccagttgcgtcgctcaccaccggccggccaccagaccctcggcttccgatccagaaaccgtattttgttcttgcacccagaccgcaagaagcctcagccctcggggacagaccgaaggccagggctgtacctggctcagaaccaggcgccaagcggcacgggactctccttctgcactcgcagcgcgtgagtgcaattggagatcctggactcaagatgttttcatgaggaacgattccagcccgcggtaactccggccagtctgcagcgtggacgacaaaacaggcaccacgtggttccggcgccggggcggggccagagacgccggaagtgaccgcgcggtgcgccggcccgcgaggaaacgcgctcttagaccatggcgacccaggcgaagcgtccacgggtgagtggcgggcgcggggtccagccttttcctccgcgcctcaccccttctccgttcgcagaaccgtccgcctgcgccccctccgctccctcccgcgggtcccgcgcccctctccgctcgtcccctcctccacccaaagcccgttctgcgctcgcgccgcggtctcctgcagttcccagcggcctctctgggggtcggacctggtcactgcgcgcacttatctcaggtggcggggcccgtggacggcggcgacctggatcctgtggcctgcttcctgagctggtgccggcgggtggggctggagctgagtcccaaggtgagcgagcgagccggcgggcggaggacccgcggcggggcgcgggctgccctgaccagccctcctgctcaggtggcggtcagccggcagggcacggtggccggctacggcatggtggcccgggagagcgtgcaggccggagagctgttgttcgtggtgccgcgggccgcgctcctgtcgcagcacacctgctccatcggcggcctgctggagcgaggtgggcacggcggcgggctagggccctggggcggggcggggcggggcggggcgggcccggcccgcgaggccgcgccggggcgctcacacctgtgtcttcctcagagcgagttgcgctgcagagccagtcgggctgggtgccactgctgctggcgctgctccacgagctgcaggccccggcctcacgctggaggccctactttgcgctctggcccgagctgggccgcttggagcacccgatgttctggtgagagccttgggaggggttggggagcgcctgcaccgtagcct

SEQ ID NO: 63501 - DNA, 418 bp, Homo sapiens
agtttgggtcaccatgtcattatttataggccatttttaaatactgtaacacaaagctatagtcactttccaacaagttcatcacaaaaatatttatttagagaattaattattttaagatcattaaagttgagattccaagatattcattcactataagggatttgtagcgctggatcattctatttgtatacgcgttgtctactattggctctttacatgccagggactcagatagttttaatgattaacttcatatccaggccaaaaccttaaaaaaacactgcaaaaggctgggcgcggtggctcatgcctgtaatcccagcactttgggaggccaaggcgggtgaatcacctgaggtcgggagttggagaccagcctgaccaacatggagaaaccccatctctgctataaaaa

SEQ ID NO: 63502 - DNA, 2366 bp, Homo sapiens
tcatttttttaatccatgtattccctattcctatcaaaggggctgtcataaggaaaacgttcggcattgtttcaaacagtataattatattcactcaatcactgacttaaaaaaaaaaaaaaacccaagtagtcacaggctatcgaattgtagagaaatcggcagggtaggttaagcattgttactcagttttcaggaagaaaacagactttattagagtcctaagaaatgtgacatttgattaacttcatgggaaaagtttgtcataaagtttattttaaatacaacattttcaaacgcacagatgtcaagcattcttttttaatctacaaagcttactcctcggggagttagtatctgtgagccctcttgggtgaattctgcaaaggaggtggtactgaaaaagtattatttgtgtttggccttaagtacctctacaagacctgccgtggatcttatcagccttgaggcctacaagtgctcagctcactagcgggacacttgtcctgggtgagcaggaccgccactactgcagacaccggaccgagtaggtgggggccaacttcaaagaaagtgtgagcgcccaggcgcgcgagtggaacaaaacctgtagcaagtaataaggaagtgcttgctcccgcccgcccttcccatccggggacacccgaaacctggggggctttgacaacgtgctgggggcgtaagacggggagagtggcagctccgagtacacggagaagaactggaaacatgcaaaaactccaaacacggtcccccccgccagaagccctaggcctcggaagccgatgcccactgcaaccatcagggagcagagacagaaacagtagttaaggaggtcgtggaggtctcagaggggtgcaacccgcgcgaagccaggcccagcgacacgaactgccgccgctgccgccccctgagcctccaggcccgggacagagaccaccatgggtctcaccccgcgctctaccctccgcttcctggagccttctcgctggcctctcatcttcagagcgcgaagcctccgagagccgtgtggagaagagtccgccctctcccgcctcgtcccacttccccgtcccggctgcctctcactccctagagctccgggaaacgcttccagtggccccaggtccacccctgttcctcctcccaccggctctcgcgttcccaagctgacaccgccaccctaccctagcccctgacgccaacccgcctcacctcaggcggctccggcagcgctggacacaggaaactcctgggtccccgactccggctctcctcgaccccctcttcggttaactccgcttgtttctctacaaaatggcgccggaggtcgcgcgctcacgtcgcggcctttcccctccccgttcccatttcatcattcgctgcccgcccgaggagggatggccccagagccagccaatggccgcgccccgcctgtggcttctacccaatcaccgacaggtgcccgcggatttaaaccaatcacactctatcacttgcagaagtcgaggaagaaatcaggctcctgctagcaactaccaatccggcctcctacttcgcggactttggccaattgccgctcaccaggcccaggggaccggagtcagagccctcgcgcctgcgctcgaggcgagggccaatagggagaggctgataacttcgatttggggcttcacgtacttcccacctgccctggagggctgcgaccagtggggcttggcattgcctttgaggaacaataaattatggaaggggcccataactcctcgccaccctgcgcgggaactactttgaattacagtgaaacagctttcctccactttccttcctctttcgaaatgtcacggtccagtagacttcggggattcccaaccgaaacaatcccctcccctagtgtccctttggcggggaacgccagccagaaagcaagccaggttgtgactagagttggggcgctttgcatcctgggatgtgtagtcgcgctcctctaccccgttcccatcgcagaagtaatgcgtcttcgttcgtcgctgcgccctagaaggagcagtgcatgctgggggttgtagtcacccaggtggccaccttgtcctcgcttgcttcgctttggtcaagggaactttctgttttagttctgtctattgaagaagggacaccttccagagacgccttccagagacgtaggagacgcaagttctcttcctggcttaagtcctagaagccgtctaagaaaggatacccatgtcctttgctctcaagagaaaaagcatagaaacatattttgctatggtttgtttgttaactatgatagttggtaagattttatactcacctgtacccaaaag

SEQ ID NO: 63503 - DNA, 1013 bp, Homo sapiens
ggcgatccacgtgcctcggcctcccaaagtgctgggattataggcgtgagccactgcacctgcccactatttgaacattttacaaagagtatgtatttatgttttatttgtataattttaaatacttttttaaatgaattaaaaactctttttgtagagatgagatctcactcagtctggtctccaactcctggcctcaagtgattccccacacctaggcatcccaaagtgctggggttacaggtgtgaaccaccacaccccaccttaagattttttttttttttaaagacagtaggtgatacccacagaggtcagctatctaaggtcaactctgtaattctacagctagttctggtctcaaacatagatctccaaaaataaagataaggtaaaataaagccgaattgcctttttctacttccacctgtctttgccgggaaaatggtttgctgctttcaactgagactgctccaggagacccttgtgcccactgccaacccctcccctggagttacaacaccacttctaggatttgacttgtcatggagcctgagctaagtacctgcaagatttgcacaatggcctagagatcaaagtccttcaaccgtctgtcagaatcctaggtggcttctatccttactaaaaagctgaaagactcacaggaaatttacaaactggaaggggtactgtaggttacttgatacacatttgaatttttatcaaaagacataattggaaatcaagcccagacaaactattttactagacaccttcacaaaggattaactgaatcaccttataactcagcaacccactgtatttagaaacaggatattttagctagctgttaattactttcctggcctctttccttagccttcttccggtctttcacttctccccaattaactgcatcccaggctctggaagaattttacaaaactctcggccgggcgcagtggctcatgcctataatcccagcactttgggacgccggggtaggcagatcaca

SEQ ID NO: 63504 - DNA, 2210 bp, Homo sapiens
atgactaacaagaccccttggactacttcccattgctcctcctgatgatggacaaacaaagctggggaccatccactcatgagagggaaagggtgaaagttcatgtgctctcagccatctgttatcaagcatggaaccaagggacatggcaccagaggaaacattcctctgctggctcgaaacccagaaagatctgtcagatgtcacagggcttacacatcctcttacacatcctgtcacccaaccagcaactcagcaaaatcaaagcagtgagcagcgaaggcagagtcttgggactcccaggcttccagtgtagctagagaaagaaccctgcaaagtgaccactgccagagctgtgaccatctcctccccgctgctcacgtcacagagacagaggtctacagagtgattcgtccaaggtcacaaggcttggtgcggcttcctgactctccaaccaaaatgtttcccttgggcacccctgcccgagtcctgcaccatcctccagcctctcctgccacccacatgagagtgcaggctggggtcctcgtggaactcagaagctgggggtcccacctcttgcagattctctgccttggttaagacctctcggcacccccactgctcactggcaaattactcagctcattgttgcaccttacctgctctttctccctgatgggctgtgccagaggcggttgctccttctccccaaaggtctgggatctgattctcctcacttccctttctggacccaatttcttctttctcaagactttgcctaaaatttgctgtcagcagagggaagagtttgggctacttctgtgctggcttcagcagagctggaggaaactgagcggctctcacgcttactcatgaaatggagcttcaggacagataggaaaacaggcccaggagggagaggttagactaaggtcacagtgggtagctggcagagccagaatagaagcctgatgcccacatgctcaggccagcgatgtaggcccctcagatcccaactggagtgtgctcccagtccagcctggggttggagccctgagatagaaagggtgggctgctttgtgaggtgaggctttgtgaggtgagccagggcgcacccgggccaggaggccggggcggggcgattcccaggcctggagcgagaagggtgggctactgtggggtaacctggggaggagctccgggacccgatcccggcctaggactgggtggagaccctctggctgggtaaaggcgcggcagagctggcgcaacagagggacgggcgtggggcgaggacgccaggatctggacccctgcagggaaagggtctgagcttttccgcggtggcggggactgaggggctccacagacctcggggatctaacacttccaccctccagagcctgtctccggccacctaccttgggggattctttcccgagccggctgcggagacacgtgagcatgcatcacatgacgcccgctcgggcggccgcgggacacgctgggagttgtagtttccgcaaatgtgaagcttggacaacaccagctccctgaatcctcagcccgacagcactgccctgagccagcctcgcgtccagccagctcgtgtttatcctcttacttttagtcttggcctcttgaccaaatcaaacactgctccttcctccaaggaagagcattaggaggtctggcctctttgccagtcccggtggcggtgggccaaagctgtttggcctcattatcctcccggtctctgtccttgccttcacgcccatggccagagcactggagtttttttttaatcagtaatgtgggggacctggagccacggtctttcctgcaagggagtgggctgggggcatggttacgaccccatcggtttagactctagaacagtttttgagggattgtaggtgctcagtaaatatttgttgaatgacgaaatgggcatccagtcctggttctgttcttggctgtgtgtcactcataaattgtcacgtaatctccagcatcccaatagcctcatctctgttttgtggatatgctctccactgcacttacctctccatgcatcagaggtcctcaccgatgaggacacactgggaatccttagaaacccaaatcacaccttttttttttttttttttttttttttttttgagacagagtctcactctgtctccccggctggggtgcagtggcacgat

SEQ ID NO: 63505 - DNA, 847 bp, Homo sapiens
ggggggcgggtctcaccatattggtcaggctggtctcgaactcctgacctcaggtgatccacccgccttggtcccggaaagtgctgggattacaggagtgagccactgcgcccggctgaggcacaacaacttataaaagacaagctgatgttattttaaggtaggccagtttcatacttaggttgttatttagatggagcagagactaggcaaaagagcacatgaattaaaaagtacagaaatttccaggaggggctaacaggcagttgactgtatggacagaactaaaccaaattctatttgacgtaggataattactacataaccctggggttgaggttgtgtgctttactctgagttaacgaattcatgtgtggacttagaccagtcttgtaaataaagtgtatttattctggcttttcagagggggaagggcagaaaaaatgttgacttaattttgctagtttgtatgtttcttcactccccaggcttacccagaaaaacgtacaaatgcactcactaaaaaacatgtttttttcaaaagaaagtgaaccacaatgtgcacgagttcacatgttgggagcgtggtcttctttctgtgtccatgtgggctgtgaagggacagcagagggctgccagactggtccagcccccacagtccacccatggcttgtttcctgcttgctgcttctgtgcaagttggaagcttaggacatgagggtgtgggctaactgcaggcttaaaactcggcatagttaacatttctaaagcatatttgatgtaaaatgaacataagcaggtagagactaacagcaaaagtaacatcaaatctatcagtcaaatgact

SEQ ID NO: 63506 - DNA, 532 bp, Homo sapiens
tactcaatttgattagccccacattagtaaccatctttcaactcctccatgcctttcattattccatttcttaaaatggtaaagactacacacatattgtaagaactctgatgtttttaaaggaatcgagtagatgaaaataggagtgttctaggggcaaaactcatgctgataacctgtgacctagaaagtgatttctatcagtacattttggatacaggcacaaagcctcaaacattgagcaatattgactggtcatccaagagaggttaggtaccaagtattcaggtaagcctttccaatcgaaacgcattgtaatttccctggagcttaagcctacttaaagttttacagtttttaaactgcttttcctcacattcttcttactttaaaatcagaagggaagttaattagcttgcccacaatcacagagctaaaaatggcagagacaatagcacagctgtgatcttttttttttgagacacagtcttgctttgttgctcaggctggagtgcagcggcgtgatcagcgg

SEQ ID NO: 63507 - DNA, 2183 bp, Homo sapiens
gcattacgtgaaaaatcagggcttaaaataaaaatatccaatataagagacatgccagcaactgttaatagtgctgagatgtaacagtgaatataaagtaggtaaagtctccgctctcatggaacttacattctagtaagaaaaatacagaaaagaaaaatgagtcagactctcaaactgaaagaatgactaaccctgaccccaagggattttcaccaagcactagagcttcaggtgatctagccaaatccataaaacaaggtattattttaagattactgcaatagggaaacatactttctcttgacggaaattttaagcactcctttggttttccaaatttgttgcataaataactcctcctggctctggcccactaggtaggcagacttaaagagcacacgttgacagtgggccaggaaggagccaagtcaggaagagaaaaaagtgcgaagcctgggcaaaactgtactgccaaggctgtggggccttggaaaggacagatagttctgctggctgaaagacacagagcatacattcaaacgaaaggccaagctacgctttgctccttgcagttaatacctgcttgggggtggttttaaaactcagttccttattaaggtagtgcttaaggagagtgctccaaatcggcttcttgagttgaattaatcttctggctccggtctccactgggaatgaattactagagctcgtttcaagctctgaaatttccctccatactattatacacgccacagtacgaaattacgtttgtcattttttgagcaatgaccatttgtcattgtccttccctcgccttgttcacagttgtatcgttggcatctggtccagagcctggctctgagaaactgcagttacgaaatatttactgaatgaaagagcacagggagatggagaggaagattgatagcctccctgcaaccggacctccttaggggcaataaggaaaaaacaaaacaaaacaaaaaaagagacacactacacctcgaccctttcccaagcaaaggccaaacgggccccggggtcacagggacctcggggggtcgcaaggtcaggagaatgccgcacgccaaggtcgcaggtgcgggaaggaaagcgaggcccgaatgccggcgccccggaaaccttcctctcgcgctcttcccgcccagggcacacacgcggcagccagccgccgccggcccaccgactcgggcgggccgggggccaggacaggtgcgcccgccgcccccagggcaccctatcaagggcacggtcgttacccggcgccgctgccccagtactatccgcacccctcccactgaatgggagtccggcaaccgccgagggccacacttcctttccctagggattgcgttgcacgccttcctgcagggcccagtgcggggaccagagggatgtgggatcctgaggatcactgtggggcacggacgctcaatcctcagtccccagtaagggaaagccgagggggtggcagaaaagtgtgtgtgtgtgcgtgtgagtgacagtgtgtatttgggggccgggaggggtgaatgtcctggggtgctcgcagctcggcggggcagggccatcgccctggctccatctccgtttcccttggcttacctggctctggcagaggccgcggcggcgaggcccgggtggaaggcggcggcgatcccggggaggacgcggccggagtgcagcagggccatggtggaccgtaggagggcagtgggcagccgcaggacggagcagagggcgagcggacacacacacagggaaccggctcctgctgaaggtaaggacagggacttccctgggccagagcggccgcgtgctgggcccgagccacgtcacagcgatccctggcggccggcgggcggagcggcgtgggctcagcggaggtcgtggaagaggatgactgcacagtttacctacgcccagcccttgctgcgcttcattcatttaatccagctgggccaggcctggccggccgaagaggtggctgctgttatggcagtttgaaagatgagaaaatgtaggctgacatagttgacgtattttgtctgatgccttacagccattaggacccaaggtggccttactttcaaccctaatagtttccctaagcacaagtcatgtcacgtcgttcctgaatgtttccttatcccccaccc

SEQ ID NO: 63508 - DNA, 883 bp, Homo sapiens
gagaggagaaaaacatttaaccaatgaatttgaattgccaagcacatgtcaacatttaatgtaatattcacaaagacaatgaaagcaggatacagtaaatatttttgtcccagaagtaagatggaaacaagttgtctaggggtgtcctaagatagagtgactttgtaaagctttgataatgtgtcgcaactttgtggcagggaaagcaaacatacgtattttatgtcattggttctggggcagagctcatgctaagcagaaaagctgacataattcctgttctgttgttcggctgccaaagtcttaggctaaaaagaggtggttactgttgaatgaattaagtcttccatgctcctaggattctggttcttccaggctgaaagttaagaaaaagagtgggttttacccattggctgatgaaaatacttgcttactttgtctcagtgttggttacagctctgtgtgcaaacagaacatccaaacagcaaggaactttgttccagcctcattatataaggttgcttacacagtcagtttgatttggtcaccaaattctaatcaataaaatttaggctgcagttgttattagtgacactattgtcattagcaacataaggactctttttaacctagaaatgtataattacgatgttctagtctggatttaaccacatgtcctcctaccacttaaagttgacactgagatgaggacttgatgcaggatgctatgggtggaatgtgtgtttaaccccagcattgatatgttgaaactctaatcctcaatgtgatggcattccaaggtggggcttttatgaggtaattagggttagattaggtcatgagggtggggtccacttgatgagattaatgagcttataaagag

SEQ ID NO: 63509 - DNA, 705 bp, Homo sapiens
tgctttaacaaacttattctgatgttgaggaggaaagtgttttgaaggataggagtaattgctgcagccagaagtctatggttgcaagtgattggaaatggtggctgggtcagagaatgctaatcagccatgaagtgggcttgccatgactctgacactgtatctcctggtgcactctgcggtaggtgcatctttgctgagtaaatacaaagtgaacttgacgggaaaggagaccttagcagtcctacaaaggcaattttgcaagctgtctggctgtggaattagtggaatgttttctcaggaagaaacagctgacgtcaactttgctccctttgtaattcaagggcagtgttagccatgcctctggcctgcacagacacccacagagggaagaacagcttccagagggaaaggttaaagaacaggtcagctgggcatccacgctcccttttcctccctccccgtttgtcatctttctggcaaggtgaattcaatgctcagtaattccttctgactttctaagagctgtgggacacacaagtgtgagagaagtcattgcggcactaacaggattagctcagcttcatagcctaattactctggccaaagaaaataaagaggagggcaatggcaggaggcaagagatgtaagaatgaatgggaaagtttctttgaataccaaagggtgtgtgtgtgtatgtgtgtg

SEQ ID NO: 63510 - DNA, 753 bp, Homo sapiens
ccactaaagccacacctgcattattaatcatcagtacaacagccttgaaagttaggtgtcactgtactcaggtcacagaaccactaataaatacaaaataaaacagtcagaatttaaccacaagtttatttggcacttcccagttgttatgttgaagttctgaaattagtataattgttccttcacactataaccagacatcaaatttcataggccgtactaaatatattattgttctattactataattacatttagataaattcctgcaattctcagatacctagttcattcacctacaaaatgagaggaacttcctgtgaccttaaagttcttacttcaaacagagataaagcctgtccaaattatgtttatctttcaacagcgtccaaagttcaactaggagttgacgttttcaccatctgtcctgctgggtgaagtgattatataccatgctcatacagatagtcttgaatggctcaccttggtcattcaagatgtatatatcaaaagtgaatttgacccttttgcaaaagaagaagcaaaaatgtaaacatgttatgggatcatgaagcttaatttatttgttaacttacccaaaatgtgctagcatcacattgattctctgcattcaaataatcatctactggatcaaagccatcaggacagcagtaatggaaaaaggcagagataagtagaagggactgctttgtctgtggttaaccacatactgtatttttgctgttctgtatc

SEQ ID NO: 63511 - DNA, 762 bp, Homo sapiens
aaaaccactcccccaaaaatgaaagagaaagatagacagatatggaaaatttcaagttactggtgcagaaacccaggagctgaaacttctaatggaaccaatgtcagtgtaagaaagactaacccgtaattgatgaattgctgggggcttggtgtggaaaattctgagcattaaaatcttcagaggaatctccacacttttgtgaaatgtatgtccaggagctcaaccaggctttcataataaatattgaagaaaacttcccttgtgcttctggccaaggaagaagaaaataaactattttgaaataagccagatcactctgttcttaataaggtctgccctcaagagaaactattttaccagagtccacagtgctggggttttatcagattctaactggcttggtggaagggaaactcccaactccagctcacactagtcatcatgtccaactgacagtgtttggatgtttgtccttccaaatctcatgttgaaatgtaatccccaatgttagaggtcaggcccagtgggaggtgtttgggcaatgggagtaaatgtctcttgaatggtttggtgccctccctgcagtactgaggtcatgtgagaggtgattgttttaaacagcctgacacctctgcttctctctcttgctcccactctcgctgtgtgacacattggttttctctcatgctctaccatgattggaagcttcctaaggccctcaccagaaggcaatgccagaaccatattccctgtacagcc

SEQ ID NO: 63512 - DNA, 668 bp, Homo sapiens
cctgtctgtactaaaaatacaaaaatttgctgggcatggtggcatgcacctgtagtcccagctactcgggaggctgaggcaggagaattgcttgaacctagaagcaggggttgcagtgagacaagattgcaccactgcaacatagcttgggtgacagagtgagactctgtctcaatcagtcaatcaatcgataaaatattttttttcaaatcaaggtatccttaattgcaatgttaacagtgatgaaaggacacagtgtccaagaccacagtgacctttttcttttgattatttcagcagaagagtaggaaatgagaaagcaaatattttcttgtgaactctagacttatggaggctttgggcaaacaagtcaatattattatccttacttcaagttagggcttctgcaagcctaccctaaagggtcagatacaaggaatctccaaaagttgttctctagctatacttctagctgagggcaaaagcagcagctcctgctcatttgtgagtcaagcaggtgttgaaattcaagcttctacaagttatgatgaaactgcagtggggagtgagtcacacaggatcccagaggcccattgccggtgtcaggaagctaatggattatgctcgccacacagggatgccaggccatgtaggtggcctgacctggt

SEQ ID NO: 63513 - DNA, 759 bp, Homo sapiens
taatttaagacaaaagatgaagtttagataaagtgaaaacatgcaaaacatcttacacagtagctatgaaagacaactcaaatcgtacttgacatcaccgttcccaggaaaatttatactgttggccagaaaaagtcgctatgcctttcctgtcctttctggacaggaatgttcagaattattgttttagatgattgtatgtatgacctgttcttccttaaaaccatttaatggctctcccagatgaagaggacaaagttcaatgtccctggcacagcaaagaggacatttagcaatctgaccattcctttcatttccctcacattagtcttttccccagtttaggtccttccaggccttagctgatgttgagtctcccatctgaaatgttttcacctttccttctccactgtgaatttttacctgactcactttcaaggccaaactcacatgcctccctctctgctaaagtgtattaattgttcttacctctgtgttctcagaactttttattcatatctttacaatagattaatcacattgtaacatcattgatgtgtgtgtgtgtgagtgttttcctggaaaagttaggactcctagaggataaagatcatcaatttatcacttctgtgtctacagagcttgaaaaacactaggtattaaataaatgtataagggattgaatatacagcactcacaaaaaatctaattgggattacaaagtgtgaaagaattaaaataaaactccattatttaaaa

SEQ ID NO: 63514 - DNA, 756 bp, Homo sapiens
cactttcctagtgccagcacctggtataggtcagtcacacagaaggtgctcagtaaataaataaatgttaactctgattaactcatactgattagaaactctgattggaaaataggtacaaatgaataactaaaaataggaaaaggaattgcttgttactttataaacacaatttgttcagggagagtatttttcaaaatgcaaggcaaaatggtgatgacaaggtcacagactctgggagacgctgaaaaaaaccaacctcccacatggcttgtgagatcagcagaggcaagagccaaatgcatgagtcatgcccagcaattctgaggcagggaccaatcagaggtatgtgctgtcctcgtcactgtccgactgaactcttcattcattgaacaaacagttcaaaaggtcctttgaggaactccctggtgccctttggcagaagagtggccacagagctgacacctcgagcagaaaatgtgagaacctatgctcaagagaaagtggtcccagtggaaaatgaaaggaggtcaaggcagggaaaccagcaagcccgttaacgattccatacaatgccacagaagtgttttccaaaagcagagtccccacatagcaacggaaaatgccagcttaatttaggcagctgcacaacacacacgcacacacacaaacgcgtgcatacacacatgcatgtataaatatatgcacatacacccccatgcgcaaactccaaaaagggagaaacgactctaaaat

SEQ ID NO: 63515 - DNA, 486 bp, Homo sapiens
atgaaacaagaaaataaaggactcagaataactgggaggagagtggaatggggaaaaggaagaggtgtattttaggaaacagtgcttttgacaggcagtaagaagagcatgtgcaaaggctcagaggagggaatgagacagagggtgaccaacaggacgtgaggtctgagaggtcagcagactccagttcagaaagcttctctgtggatcacacaggtctggactttagctcaggggccaagggggatgacataatactggagtttcaggaagatccctttggctgcaatgtggaagacagatgacagaagggcaagggtggaagcacagagactggtgctggggcttctgctctggttgaggtggaagatgaccctgaggagtggaataggtggtcaggtgtgggaacgagctgatgagcattttgcctctccggcgccatgctcctactaaccatttctccagcctcccgagcttcactctctc

SEQ ID NO: 63516 - DNA, 852 bp, Homo sapiens
cctgcttctagtgcacctaggagaagacctgggtctctgagtgcctgataagccacagcctgcagaggttaatgaggcatcctcaggctacctacctctacatgaccagtcaccacggcctttcacctggttgctgtctctagtctcactaactcctatcagcaatccatggtgcacccagaggaaacgttccaaaatgctcttttttctgtcaaaaaaagggatgccctctactttttacattctaagaagctatgaagtttagtggtgaacacatagactttagaatctacaggtctgcttccaaatctgacttcaactatttactttataggtgagtttggacaagttaatgaaccctgttaaacaggctgcttctcatctgtcatatgtgtgttaagggtcttgcacaatgccgggcacacagtacaagataactttgatgatgattccatccctggctgcagaacaagtggactcctgacccagacgcaaggatgcccacagcttccggggcacccacaacagaagggaattgttttcttcattcagttttaacttgcaacagacagaaccatctctgcaaagtaatttatgtgttgcctccaggcttatgtttggaagggcttcctgctctgttctaggctgatattccaaacattaacatatgtcaagagcccacacaaagccaaggacgtaaaatcacttttcaagggaaagaagagagagggcagttcacaatgccaggggagatccagaaggaaaagaatcttcagcaagcagagtgggcttggggaatggtgggtaccatgaatgcagagcccagggtgggagacagggattgcggtcact

SEQ ID NO: 63517 - DNA, 458 bp, Homo sapiens
catcacatcagagacccatgagcagccatcagtgagaattacatcctgcctgcagccccagaggccccctcacattcacttccttttctaggactctttcatgtcccattagcacctcctcctctgcactcctgccaattggcatcacgtgtctctcttggtcctttcaggagctgaaaacacgtgaggagctgtggctcacaaagtcaatagcatgaagcaacatcaaaggcagaaactgtggtaggatcagggctcagctaagtccaggtgtccctgggctttcagatctgagcagaaactgggtcctgtttgtctctgaggtctcagccccaggaccattatgcagagtgggcatgaccaagtgtctggggagaacatgctggaacagtacgctgtgatgccttcggtcatcccaatgagctgttcactctgcctggagggctcttctctctatg

SEQ ID NO: 63518 - DNA, 587 bp, Homo sapiens
ggaaaagccaacaacagaccaacctggaatgggtcccatgggacagaaaccaagcgtttgagcatctctcacctaggagtgtgcaaaaccagcatgcaagagtgcaagagcaaggtctgctagccagagactgctgggtgtctggcccctggaggcagcttaaggcagagtccttagcaggaaggctgatgccagaaccccttggtggagtagggggtggtgagctcatggggcgagttggggacagggtcaaagagctgggacagagagggaaggggtaaagttcaagtgtgcaagttggagggaaaacccaaatcaataattgggacagggacggacttctgatggattatatctgttggttgtagccagttagggttgcaaaggtaagaggcatatgagcttggtctgtggaagccacccacctgtgcttcaatacgaagacaggggagagacagaacaagtgaggagaggaggaggaagagagagagcacacaagggtgagagtagaaaaaatagggcagcagataagttggactaaaagaagaagatctatggcatattcaaacattaaacatcagccttgt

SEQ ID NO: 63519 - DNA, 878 bp, Homo sapiens
ctcctttccagatgagagccttgaaattcaaaaaaaaaaaaaggattttccttaggtttcatgtacagtgcccatagcagagttgggaccaaagcctggttcttcaccactgtggggtggggtgtctgcccccaggagcctggggtccacaaggtcccatatgagaaaccccttaggattggggaccccatgtgagttagcacagagggtgtgaaagatataaagtcctggttaaccatacagttatgtgatgaggaggacaggacggaagaggagacaacagaagaggatccaaaaaaaagagtagggaagagatgtgccagccccaggaatcccaggacagagaggaagcaggacatgctgaactctcgactttggccccaccaggaaacagagccctgtgctcactgctctgactgggggaagcactgtgttgcctcagagtcagaaatcatttcaccagtgcatttggtcctcaccctagaataccaaacagaaggtagtcagataatcacactttcatttttgtttccttcccatcagcattctactaagccagttagccattctaaattacttcagacctctggtggccaggccaactccatgctgaattgccctgccattcaagccaaatgtacaacaccattgacattactacacagtctgctatgcagcaaggattcacttcctttgctagtgtatgtgcacacacacacacgttttcacaacatgttttccataaccacaatctcagagtcaattaatgaccagattctccacccagttgctcagcttcaaagtgagggatctgcttcagttctcccttctaggcatcccatagcatcaagtctatctaatcccattgatgtctccct

SEQ ID NO: 63520 - DNA, 552 bp, Homo sapiens
tgattttttaagataaaacaacagacttgtgctttgggcgatattgtcaaactcctggagctctgcattcaccctctcctcatttaggggtgtttcacagcaacagaattggacgggattatcctgataaattaggtgagccattctgttccactttcgagatgagggagctgaacctgagagctgttgggtgaattgtcacacgtcaccaagttaatgaatgatgagaacccaggtaaactgctggctggctggttgagtaaagacacacttgcgtctgaatccctttcttcatgttaataaaaacagacaagggagtgacctgaatatgcctcattgaacttgtcaacccacttctccccagacaagcacaccaaccctctggaagaacaggttaggtgacgtaattgttactttggtttaaaaaaaaaaaaattggccggacatggtggttcactcctgtaatcccagcactttgggaggccaaagtgggtggatcacctgaggtcaggagttcgagaccagcctgaccaacacggtgaaaacccgcct

SEQ ID NO: 63521 - DNA, 601 bp, Homo sapiens
tgtttttctatttgaagccacattaaatcaagtcacattctaatggctgtatctatgacacgtgtttcaagtgtttgaatgtgtgtatgatggggcaagaggccctagagaaaaaaaaaatcaacagcccagcgtccttgagtgcaataggaaggaaatataataaaattcaccaggcagcataaacaaataaggtatactcctgtgtcttttacatgatgtcaatcctgggtcatggcctagattatctgactaaaggctcatggaacacagtggattgcttattgattagaggcttaatgattaaaagaaacttttaatccccatctcttcccttcaccagccctatcatctcttttggaaatgtaatcacttacctgcttaaatgacttccctagtttaacaagattatagggtaaaatccaaatgtcttagcatagaattcaagacactgctgagccaacctcatcttccaggaatcaccacctcacaccctctgcccagcctcccagaggatgcctctgtatctccaaaaaccaagtttccccacctggtatcaccttctccatattttctactgttaaacttctattcatccttg

SEQ ID NO: 63522 - DNA, 597 bp, Homo sapiens
tgcggcaccgagttcagggcccagtgactgagaagagaaacctgaaggcctcgagctgaggagctgccacgcgggcggcaggcggtgccactttgcagaagcgcaaactgaggccagaggggcagcggatctcagctgggtccccacgctcggcaggagaccgggtgctccccgcggggcctgtgagcgggccgccagggctgggctgggggtggcagcgccgaaccgggagcgcagcgcagggtccgggttcgctgggaggccggcggcggccgcgtggccacagcgccccctggcggctacgggagtcctgcacgcagcggccgcgtctccacgccttcctggagcagaaggttgcctgcccgctgcgtggcccccgggttcccagacagcccgccccgtccctagcgctccgaaatggctgccacctggcgtctggcctgggcaaacgaggtatcccatctgtatgtatttaaaagcggacagcagggtgcccgctgctgtcaccccaccgcctaaagaggatagacacttatcttcccctaaatgtgtaattagcaattccagtgtgacccctctcctcatcggactttagtt

SEQ ID NO: 63523 - DNA, 1904 bp, Homo sapiens
tgtaccctaaaacttaaagtataatttaaaaaaaaaattaaaattagccagccatgtagtcccagctactcaggaggctgagatgggaggactgattgagcccaggagctcaaggctgcagtgagccgtgattacaccactgcactccagcctgggtgacagagtgagaccctgtctcttaaaataaataaatggaaaaaaaaaagaacaggctgatctggaggcagagcaggtcagcaatctcaggaggatgaggcaagaggttgcgtcagcttggaaccatgacagccactccaaggcatatcccccagggcacctgacctgcagcaaaggaacctgggagagcaacttaggccaaggattccaggggcaggaaaggcgagctaattattttttttttattcattcttttctgaccattaacataataagcatgcttattccaaaccaaaacagaacttttgctctctccactaagcctgccgctcccgcattccccatctgggtaaatgagtccaccatccactcactcactccaatccaatgcagacatcacccttgaccaacatatatctctctctcctctctctttcctcctccccccgctctctctctctatcacatccttcatccaattcctagctcctctctttcacaacagagtctgaatccaaccccttcccccctccttccacagtaaccaaattcaccatcctctctcactcacgtccctggaggctgccagccttctgcagcctgtgctccacccgaatgctggaggattccgttaaacctacattagggctgtgcgtggtggctcatgcctgtaattccagcactttggaaagctgaggtgggaggactgcttgagtccaggagtttgggaccagcctgggcaacacagaaagaccccgtctctatatatttaaaaaataaaataaaatagaaaatgttaaaaaaaacaaaacaaaacaaaaaaaaaccacctacatttgatcatgattctcatgtgttcagttccctccaggggtgcccgaggccatatcaagtcccaggctcagcccctcactttccctctgaactcatctcaggtcccttccccattgtccgctgtagccagagccaccctggcttctgcaaggttctggaacatgctgagcctggccctattcccagcctctgcacagactgttccctctgctctgtctccctaccctaccctgccatgttctcttccttgttattcacatctccccttaaatgtcaccttctcagagaggccccctctgaccatctatcacatcagcttaattttctgcacaaagattttaattcatgtattcattttccatttccccccattagaagataagctccatgagagataaacttcatcttgtctcattcaccgttatttccaaggatccaccatattaaaccatcaaatgagtagaaaacttagaaagtacagatgaatatgaaaacgaaagcaaaccttaccataatttccaccattcagcgatacccaatgtcaccacattcctgcaattcctcccagtcttttttctatatacgcatatattaaacatttgggattgtaatatttacagtgttgtgctctgcctttatttcccatgaagggcgttattctaactaattttagatggagagaaaagttgcaaaatagtacaaagaactcctttccactcctggccctgcttctcctaaagttgacatcttacgtaaccatagtataatgatcaagaacaggaaattaatattgatacaatgttcttaactatactacaaaccttatttaagtttccccagtgttccattaatatcctttctctattccaggagcatatacaggatcccacattgcactgaagttgacatcttat

SEQ ID NO: 63524 - DNA, 5235 bp, Homo sapiens
agggacattaccagcatctggattaaagagtggatggggagcagtgggctctgatgccaaccgtgcccagagcaggagctccagctgccatcctggacagtcaggccccagaggaaggaagccaggagccaagaggtggacccaaaagagaaaggtgggaagagcctgggaccccgatggccactaagccaccacaaagccctggaccaccccactacacacttcttttatgtaaaagataaatatatttctatctagtttccaaaaaaaaccaggtacataaggtatttttaaatggttataatcatatattttacatgtactgtcaaaaagcttaaataaaagctgaaataaatgctaattgaaagaaaatgtatatgtgcaacaaaaaagtcagcgagaggtagagcagctgagcagctctgcggtgtactgacttcatgtccccatggaactccagtctcacagcaaggatgaggtgagcccaacatatctggaatgtcactgccctgggtggcccctctggctctacagggatgccagcccctgccatgcccctcccagccatgaccccccagtgctctaaggacaaggccctgttgtgcccatgtgccatctgcccttctcctgccctggtccatggtgtctatgactgctctgtgacccctgcccccaccagctctgcctgccgcagagggacagcagcccttgtgcaagctggcttcagccgtttcaggtgtggtctctaggctgggagattttgcgacctgccctggccactgctgatgcgtccagcctcctctccaaggtggaaggcagggaggacagcaggctctcttagacccatacactccacgttaggaaacacggagtttgaaaaataaaaacacgttaatctactggcaaaagcagctggcagaagctaaaatcactggcctaggaagcacttcaaaatcaacaacagggcttaggtgaaggagttattgggtatcacagagcaagaaaaaaatcatgggtacgtggtctcaggacctcttgagattgtgccttaggcaaaaaaaaaaaaaaaaaaagagagagaaatcacatttccccaaaaatggatgtgcaaaatgagccgagaggaaatattggactgttcatttacaaattctcaaagacagaccccacatgtcaagattcctggtagcaaaggttctgccttcgccagttttccagctaattagcagcacgtgggctacaggtgctgctagacacagctcccgcctggctgctgcctctcatcctgccaatggcacaagaactggtccaaacaggaagaaccaggagttgcaggccttgacttcctaactctctgggactggcccagcaggggcacttggcacctctgcagagtcggagcattgcatgcacaggtgcccacactcacaggggcctgggagcggccttgctacctctatttacagccaacagctgctctgagaggctgtggcctgtttctccagagttgagccttaatcctttccagggtttgcatctagtcttcttgaagctctctctgcccacctccaaagcttcaggaccagcaatgcttccagagcctttatttgcaaatcccaactttccagactatccccaaagggaacgttctttctttctcttgttttctgcttgatccaaggggcagcctcgccttcaatgcagtccagctgagtgaagctaaggtattttctgagccaacaaagatgatttcaggctctatggctcgaggcatttccctggatgaaataacacttcaaaaagacttaaggccacttgtgtctctctcttgggccacagactttcagtaattccaagagcaaagctccttatacaaggacacagacagtacgggagccttggaagccagggctggctgccccttgccccagcttggctctgggcaaaccagccaggcaccaaaagcgacttccctgacatggagttggcagcagttcaagcaggaccttaatcaccaaggagactgagcacccttcaggagccagcatgtgaatctcaatgtccacatgaagatgtggtagatggggctgcagcgacctcgggcagggaaaccactgaacaccgggctccagccaaatgcagcataattttgtggaagtctagaaatgctgactgtccttgggaactgctcaatattgggaaaatgttatcagctccgcacactgccagctctccccaaagagacatgagagcctccaaccggaagaggcagggcggtggggaacagctctcaggaggaggcagcccagggcaagggaaagttgctgagtcggctgaaagtctgaatggtgccagctccactgcacacaggctgtgtgacctctggggagcccctcaacctttctgagcttcaaattcctcacctgggatataagactcctacctcggcctcctaatgaaggctgagacgattggtacacagctccagcgtggtgtcaggcacacaacaggtgctctccctaagggcttcatgagagcgactcagcagcacaaagccatgggagaggcaccgggggaatgtgaggctgcgaacagcaaagggcttggcaaacccattggtcccgtttgtcatttacccacgagggccagagacgcatgacaaagacactagcaaaggagatgagaccattaggaaaatcaagctggccagacacaaagccctcctgggagcaagtttttccagattgctcccaatagctaacttggcagcagcaggcatttttcagacatgagccatagaccttttgcctcctatgggcaatgcttccgattctctggagttaatattcgatcccgattttgttcaaagagttctaacatcctctccatgtggtggtcagcctcaatcacctggaaattagacacatgggtcacaaggctgcactgacctcagcagcatcctcctttcacagctggagacagacagatggaagcaggcagcagggggcagggaagggcacagaaggttgcaggcagataaaaaggaaggttagagccaaatcgctttcagctctagggcaatctacatttccaatgaggttttcacttaagaatgtactacaagagctaggtatggtggctcatgtctattatccaagcactttgggaggctgagacctgaagattacacgagcccaggagtttgagaccagcctgggcaacacagtgagaccctgtaagctcatgaatgatttgtttttttccctcatcactttctaccctcctttttttccataatgagggagaaaaataagctgtacttatttaaaaatctactacagtaggccgggtgcagtggctcacgcctgtgatcccagaattttgggaggccgaggcaggcagatcacttgaggccaggagtttgagaccagcttggccaacgtggcaaaatcccatctctacgaaaaatataaaaaattatccaggcatggtggcatgcgcctgtagtcccagctattcaggaggctgaggcaagagaatcatttgaacccaggaggcagaggttgcagcgagccgagattgcgtcactgcattccagtctgggcaacagagtgaggctctgtctcaaaaacaaacaaacaaaaaattactacagtaatatctcactttccggcaacctcactgcctgcaagagccataagcagaagtgtttgagcccaaacagatattcctatggccacgcacaaaagctcatgcacagccctgcctcacatcccatcaaacaatgctcctatagccatgcaccaaagcttgcgcacaaccctgcctcacagccaatcccatgttgtatatgtaaccatcttaggttccctccaatcaagactcggagggaccccagactccgcatttcttgggagcatctgggccactgcttatttgtctgagtaaagaaatctggaaacagcaaactggaaaacaaggagatggggaagtaaggaaatgctgacgggacagacacatcaatatcagtcagaaatgacacatggcagcaagagaaaggaggattactgtaaaaagtaaacacaggaacgcagagacattagtgggcagggcagacagttccacacacctcagcattcctaagggcatcactgtgtgacagcccagaccagacaatgacattccttctgatgacctgagtcaccaaacaaaggtgaaatgaggctctgtgtcatccacggaaggaggaaggtcacatcagaggaactactatcccaaatggtgaaaactgagacccgggtctagagtcttcgctgaagatgctggatcagtgacaactgccaggtgtgatggcactggcacagactgccttccctcgggtctggccaactcactctgagactcagcccagaaacaggcactgggagagagagcaccagccttcccaccttccttcttctaagttgtcaaactctaaaggactgtgccctcccctgtctgcaaggtggctgacattccccgggtcactcctctttctagaacagtctcgtaccctgtaagggagtcttacttaccagaacaggggctgccatggggaaaaggctgcctttgatgagccactcctcatggagatggtgaattgcttccaggtattcctgccagggaaacacaagcagtctgtcgggagtggacagagcagaccccacctaccaagggtgtcaagcagagggggtcaaagtagtcaatgaccatgggcagtgactcagacaaaggaaccctgcaagagcaaacctggctcaagtggacagcggcagacgcagccacacactcggtggccaggctgagcaaaacagcacaagtgtcaccagccaccctgctctgctccactgggggttcgtgggcacaaacactggcccttcccctggcgcctgaatcaaagccaaggcaaaaggcaggaccccctccccctccccctctccctctcccctttgcacggtttccctctgatgcccagccgaggctggactgtactgccgccaactcgactcactgcaacctccctgcctgattctcctgcctcagcctgccaagtgcctgggattgcaggcgcgcaccgccatgcctgactggttttcgtattttttggtggagacggggtttcgctgtgttggccgggctggtctccagctcctaaccgcgagtgatccgccagcctcggcctcccgaggtgccggg

SEQ ID NO: 63525 - DNA, 3569 bp, Homo sapiens
cctccactattgtcctatgaccctgccaaatccccctctccgagaaacacccaagaatgatcaataaatactaaaaaaaaaaaaaaaggcaggacccacacctggcttctcccatttactgccacttttgcagcagcagggcctcagttccttcaggcaggggcccagccctgggcagcctctaaaccctccgctctgtcttgccaccaagaggactgtgaccctcacccattgcccttctaccccctcaacaactcgtaacctatagaccctccagactataaagaccaccaactgcagaaagcctgatgcagcggagcccaagggaaaaggggcacaggccctcctgagccatggggcctgcatgccaggcagagcagatactcgtgctctcccaggcacagagtgggatggctcctcacacagattccactcgccatcccagaggctcgcgtgtcaactctgcagcagcctttacatctcctgcccagctctcccttggcaataggagccagatgtgtcccatggacctggtcaaacccttaagacaatggcttggatcacggcttggacggcccccaggcttggggagcatctgggtcactgcacagagctgctgtgcgcatcacagcatggtccagcctggccccattccaccacattccatcttcctagcattcttgtctccaagatttcaaaggagctgcccagagtgacgcctgggccctcgtggcaggaatgcatcgtgctggcaccaaggaaaaacaaggctgagcaggatttcaggagttggataggcttcccagggcccccagtccagcctatcctgagctcagagcccctgacaccccactgaatgcttgcccagcctctgtctccctccagtggcagcttctcacatgggacattcagttcaatactaactgagcaactactaggcaccaggccccaaggcacatgcagaggacacggagggaataagacccaatcttaaaaagctcacattagtgagggatggggaacaaaggtataaacaaatagtgtcagtatgctgtcctaaggcccatgatcacagaaagccagggggtgggtttggggggggttacaatggaaggaaggtcaggggtggcttcctggaggaggtgacatctgagtaacactttaaagacaaaggaaacgactgtgcaaaggcacatttgcataactccactgtgtatgtggttgtttgtgtgtggccacaactagttccttatagccagagcatagaaagtagggaatggaggatgataacgccagagaggcagttggggccgggtcataagccgtattacaaagtggggactgcattctagccagcagcaaggcactgaaaggttctgggctgggaaattgcacgagtggtgatgagtattggaaatatcagccgggcggcagcctggaggccagattttgaagggagatgcaaggagggaagggccagggcgagatgcacagcccgggcctatactggcagagtccccatgagagtcagtgtggcctgagcagaactcagaagggcatggcatctctccagtgggcaaacaccactaagcatgagcaccgcctccgtgccgggcactgtgctaagcactagggatgcagcagtgaacaagagggctgggtcctgccctcctggaactcgcattctagggaggacacagagagcacaaggccaggcaatcttcaggaggcagaacagacaagccctggtgctgccaagatggggaggggcaggtggggaggggaggggaacgcctccaagcaggagggttgccaaactgtgagtcagcgaccacaggaagccaagcagatctggacatccacgtgggtctctggccaaacaggaagtcagagttcaccctctgatacacttggttcctgttctctctctgcaaacaagggcacaatgatctcatgggggtggggccgggagaggaagccgggttggacagaggtggtttcccagtttgtctttaaccaagtcaaagaggcctcttaccagcggaatgaccttctcctcttccctgcatctcttctttaacctctggtaacaagtctcaggattggtccgaaggtaaactgaggttaaaagaatacgtggctctcaggactctgctcatggcttggaagcaaagcaggcacacaggcaaaggcgggaggaaggtctgcacagctcgagcaggaagcagggagggccagctcttggcttgaccactgaccctccgcctcgactttcattctctttcagtgtcagcggccccgtggggtcgttttgaggctgaatgggattctgttcatagacagagctcaaaacaggcctcacacccagcaggtctcagtgaatgttcaggctctgtccttcctgttcctttgcaaactagaaaaacccatcagatcacagtggatttgggtctgaaagtagctgagccagggagggaagtttaaagaacaaaggccagggttcttctccatgagagaccagaagtcccgaattctgtctgccctcagggagaaagctgaactcccatggggaaggaactgccaagggcaagtgcctcacccactgcccccaagggttggggcccagccaagcacatcctcaagggacccaggagagagacaagagagggaggtgggaggggtgcatctcacctatcaaatcaacagacacgtccatgttcctcaagatccagtcaaaccattccgacagaactacatagtccacttctggcatcttcccactgcaatgagagttgtaagggcttattcacctaagagaaaacttctgggctatgcaattcccccaaaaggatcttgagacggctctcaatgaaaggagtcaccaagggtaccagggcacagtgtgatccgtgcaatactggacatgcagtgacaaggaccctaagcattcccgacctcctgctgcctgggagcggcttatggcacaatgctgcaagggccatggcacggagtgatgggagaattcacttgggattggaactctaagcagagaaagggactttaaagcttgtaccctgagaacagagacagtgctcaggttaggcaatgaatcagcaaaccaatttcacttctagaaatttattttgtggaccagggtggtggcttatgcctgtaatcccagcactttgggagggtgaggtgggaggatcacttgaggccagaagttcaagatctgcctgggcaacatggaaagacccccatctctacaaaaactacaaaaaaattaactaggggtggtggcgcatgcctatggtcctagctactcgggaaactgaggcaggtggatcacttgagcccaggggtttaaggctgtagtgggtcatgatcatgccactgcactccagcctgggcaacagagtgagacccctgactcaaacaaaacaaaaaaatttattttgtgaaaataatcatgatgctcaccgcggcactgtttaaaccaataaaaaactaaatcttggtaaatctatataacagaaaattcacgcagtaactgaaggatgatattgtaa

SEQ ID NO: 63526 - DNA, 1870 bp, Homo sapiens
aagatacaagaaattggtaacagaggtggccttctaggagggtgacagacttccttctccctggagatcctcttgtatttttgctttttactatggaatgtatttttgctttttactctgcttttttctctctcctcttcaaaaaaccaaattatcctagagagtacacataaaagagggacttaccactgattttttctctttttcctgttctttatctacaaaagaaaggaaatcagtttttaaactcacttttaaataactctcctctgccctaatttgctacatgaccacaaaaacactaatgtttatgctcactccctggcctaaaaacattttccattttgggcgccctccgagattggaggcgcgcaccaccgtctcgccgatgtgccaccctgggctgcagctgcagcttcgtggacccccagtgtgctcgagttctttcacttagtacattatactttgcattttccacgttatttatttagatcttcacagactggatgttaagcaagtggaaaggcagaacagcctccactcgcggtgcacggggaagagtgggcggcggacgtggttttgggcctgggacccaggtgttcctctaggcccagggcgggcatcgctgcccatccgtcccacaggtggttctgaggcgtctctcaacagccatatggcggacaccagaacccgggtgtaacagtgacccgtttctgtgtgggtccccactcccagggagggcaggagagcgccgggggcgtaacccccctcccccacgctggcaccagagtgtgagcagaatcggcttaaggcagctcccagtccccatcgcccccaaggtcgaaagaatcgggacaggaaatgggtcgggggaccgagtttgggccggaatgttcagagcgtgtccgtcctgctctttaaaggccctctctccatcccagaaccaaagccgagcgcccccagcgctcgctgcggtctcgcgcccgggtaacggccgatggccgcccccgtcccagccgcagccggggaggaaatcccgcgcctcggaagaggcgcttcgggctcgggcgggttccggaagccgaggggccgggagtaggtgggcgcataggggctcctgggaggcgggaccaagacgcgcgttaccgggaggccaggcccggcgctgcaccctccgcggcccggggcctgaggccgggctcccgcgacttcccggcccaaagcagcgcagcgcccgggcggcccagccccgcagcggccacagcagcatagccgggcgagcggatccagaggcccggggttccttcttgtgcgagtcggcgcggacgactgctagtccagccgttgggcgccgcctggatcccggcgcctggcccttaaagagacccggtcgcatttcatctcagcaagaggagaaatactcgaagggagaggttcgccgctggcagccagaagccttaccactgctaggacgctggcagaacgcacccataacttggcaacactcggaggatggatggcaaataataccagcgactgaagggttaattaatgattgcagattaattgaacaccttctgtaatcagacacctggcacacactcatgatgtcacttattcctcccaacaaccctgcaaatagataactgtctctcccattctccgagcttgtcctcagagaattaggtaacttgttcaaaatggtcagaagcaacagatataactccttgctctactctttccccccttctcactactgcacttgactagtctttttaaaacataaattttttggccaggcacggtggctcacgcctgtaatcccagcactttgggaggccaaggaaggcagatcacctgaggccagaag

SEQ ID NO: 63527 - DNA, 1351 bp, Homo sapiens
ttgcctctagatctgctgcctcatcttgtgcttcctgtatatctgccacacacctagcaagtgtgctctccgtaaataaacttcaggattaaggccatttttgtgagtgatttgtgatgaagctgttggaggtaactgtcgatcagatttaaaagaatgaaatggactgaagctgagatgggcaggatccaaacagatctgaatgaactacggtgatggccaaattatccaagatagaatgtaaatcacataaaaggagcgacatatacttcccatccctaaaaaggaatgccccaagacggtggagatctggcttcatggcagcacttgagaaaaaacattaagtatctgaagggactcaggctgttccacggaagaactagtaccagtgggaggcaaaagtaaaaatatgcagaacaagtcccgagtgtgatgccctgggggcttggataggacctgaggctgcacactttctgcaccaactatgtgccagaacctgggccctgcagggagagaagcagaccagtccctgcttttgtggaatttgtatttttctgatatatatcagctagcaataaacgctcagaagttatggtggctgctctagacgggatgaccaaaggagatcccctttaaggaggtgatattcacaatgcccaagttgttgggagatggggccgccatttctacagccccctccctctcctctgctcccaaccctgggaggatttcccgacaggaagactcctcaggagagctggagtgctgccgtcattaacgccaggccagaacacggcgggctaacagggcgctggcctgcgtgcccacctctaggtccgctaatatgtgcccagctctaggtccgctaatgtgctacgcgataactgaaagacagcacaagccagagcggacggccgcgggatcccgttggggcgcatgcgcgagagcgaacgcggcgccgtgcgcatgcgcgcaagagagcgggaagccgagctgggcgagaagtaggggagggcggtgctccgccgcggtggcggttgctatcgcttcgcagaacctactcaggcagccagctgagaagagttgagggaaagtgctgctgctgggtctgcagacgcgatggataacgtgcagccgaaaataaaacatcgccccttctgcttcagtgtgaaaggccacgtgaagatgctgcggctggtgaggccgggccgcggagggcgggaggctgatgaagctgctggggggcgggagatgtgggtgtgaagtgcaaagctgaacgcctgtttgcttttcaacctcgctttgatcaagattgaaaggcaaggcatggcctccttggggaagaaggaga

SEQ ID NO: 63528 - DNA, 1362 bp, Homo sapiens
ctgccctcccagatttaactctgggtaccaattgggcagtgccagccaccgtgctgggcggtggattccgggatgccaagtctgtcttcttggttagaaggacacaaacctctgcagtgtagagaattgtgggcatatctgggctcctccactgcatcagggctacctgcctccatccagcaaatacttactaagcgcctaccatatacgcctggcacccagctagacatcaagtgggaaccaaaccacagtccctcgtctccgcaggcagaaacaggcaccgtccggaggttgcgcgggccgggaaaacctgccacaggttgctaagaccagctgtacccaggagacagcaggattcccagcagcacccagcccagtaacgccacagactcccgggagcgagggcggagcggacaggtaggcccgaaggcaggtgctcaggtaggaggcgcacacctgaggctgccggcctgggaagggcaggctctggccgaaggcggggtccccagagaaggctgcagagtggtcccgggaccccacgagggagagggggcgcgaggagcgggctccggcctgggcaagcgggtacgcggcggaggccccgcagcggggcggggagggaggcgtgcggctaggccgccctcgggcacctggggccccgcccggcacctaccacttgggcgaccttgaggcggccgagcgcgccgcgcaggtagtcggggtcgcagcgcaggccggccagcccgcggcgctggctcaccggctcggtggtgggctggtacgggctgctggcgcccgagatcatggaggtgctcgaggcctcgccctcgaagccgtccagctcctcgccgctccgcatgctgccgcccggcccgggccgcctcgcgcggctggctcccggcgccaggagcgggcggactcagcggggccgccgcatcgccgccgccgccgccgccgccgccgcccgactgactgcccgcggcccgcccgccgccgccgcctctcgcccgccgcccggctgcggctgcggctcggtccgctcgggctcggctcccgccgcctcggcagcggaaagggagggaggtgggagccaggagagggaaggaggcgggagcgggcgcgccgggccgggagaggcggagccaggccgcagccggccgctcggaggcgctccgcggctcgagcgaggtggaggcggcggcgccgcgggcctcggggaggggcggggcgaggcggggcgccggctcctcaggccccgccctggccccgcccccacctgcgcctagagccggggcgggagccgctggtgggcgctggcgatcccggcacgcggggcgatggggttcaggcagcggggtcttg

SEQ ID NO: 63529 - DNA, 2323 bp, Homo sapiens
gatgatccctgcagccaaacagctgccacagacacaaaaccactgggaacctaaccctaaaagagactggccggccatggagcagctttccaaaatcataagaatggagactggtgttggactggaaaccaggttgaataacagcccttcactccttccatataacatctagagtccaattaatctggaaagcaagagtcctctgggcaagaggatagccaactgctttattaaaatgtagcctaaacccagtactaacaaaggctcctccaacatacaacacaaagacgtggctaccattccaaacatctgagaaggggtggtgacagcagagaggccaatggaaaaccaaccagagtcgtgggacatggttccagcaattgctagctgccctacggtgtcctctctcctcttcctccttataaccaaactgaactttgatatttagaacacatggcaacccaaagtaaagattacatttcccagcctccttaagagacagcagcccctgcagccctgcatttctcttcctccatcctgctgactggaacacggatgtgaaggctagagctctcagtcaggaggaagagaaccacaccctagaaatgacaaagcagtaagcacaaaggagcaaggtcctccagctgtcttcccagggctctaatttccagtcctcaactacctacacctccagatttcatttacaggagagaaataaccctcagtcttgtttaagccattatgttatctcaggttttatgtcacatgcagctgaatctaatcctaaataacagccatcaatgactaaatcacaaaataaattcagtgtttcatggaaatttaagccccccagaagcaggccttttatttactgtgtctccagcacctagaacctggtacctggtacagtatagggcagacactttccctatctgggaaaaaacaatattggctcaatctctctcttttctgtcttaacagatctctacaaggttatcactctaagaaaacagcttcagagaactgaagtcaccagtacattagcccactcatctgggtacaaagctgtctgtgcagtggatgaaagcaggtcttcagactcagaactattcagagaagttgtccttaagggctctatttcaggaaaaaagaggcattatctagaaaggtcagtggttgaagacacatgagctgagctgcataacaatcacagtagcacacatgcgggtgaccagggaaatatacacatgcacaacaaaccgaagaatacaatgttaaactcattgttttagacaacgtgggacagaagcaagatgaagtactggacagaaaacacactgcgagaaacttgatttaaaaagcgcatcaaaatttctgaaccattctgccagtaagtgtgaagatcccgtgtgccatgcccgagaagccctcattaattcaccagagggggtgatgtcatcctgtgaaaatacgccaggctgggtcaagcttgccccggccaggacggctgctgctgctgccatggctccagcccctgcccctcccatttccctggcaagtggacagaagatgatgtaactgcacagaagcaagggaaaggaaaaacaagcttctgaaccacattaaggaaaaaaaaacccaaacaaacttcctttaatttgaaagttctttgttgtcaaaagggcttggatgtccttagtcttaaaataacctttcatgttaattacaaaaaaaaaaaaaaaaaaaaaaagaccctcctatttctaactaaaatcgtattttgctggattccaaaatgaactaaggagctgaaagctttgtctttcttaggacttcctctaagcctgccaacacgagggtccatagggccttaatggaattccagggcagtaaactcaagctgcagagaccacagcaaaccctcacatcctctgatgttaactcagcagacagagagtaacagaaaagcacagagatccacagaacttaacacattttagggagtgagggaagaactcttatttgaaacggaaaccaatgaagataataaatattgatttgttttcttcaacttgtgacacttgagttaaagactgctttgaatacttttgactactgagtttacaagaggaactctgaaataaatggtgcaaacaaaacaaaaccacgaagcaagggaagcctctaggattgggaaaaggaaagtgattcaaaccatctaaagagactcgtgaacttcccaattaagaaaattatattttactcacacttccgttccagctccctcattttttctggtggaattttcattttatcaatgtgc

SEQ ID NO: 63530 - DNA, 1969 bp, Homo sapiens
catctgtgtccctgcatactgacacttttctgcaaaatactcaacccccgaatcatcctccttcaccagctctaagcagtgtaatgcttccacaataatcggcatggtgcaatgcaatcaccaatacatctgtcttccaccagactgagattcttctatagtgtttaagagtcgcctatgctgagcctgtgcccagcccacaggtcccaagcaacaaatggacttgctgtgtgaatgtacccaaactccctcacttgaggagagtgaggccagagggagtaagggacctgactcaggtaacctagcagtgagggctagcataatggaggaaacgtccccagtgctgactctctgtcctctgcaaagtccctaaaacctcggactatgcactactgatgaggctcaaagaaggctcccgtggtcatttccccacagctccgagcccaggtcacctcgttctcccaccttctccacctaatctcatctactagcttcccctctccacgacctcaatttggtaaccgtcgaggcaatgaaggcatagagggccaagtgactgaaacaatatgccgacaaccccaaagcaccactacgctctccaaagagggcagcatcccaccctcaggcgctggaggcttgaccactctccagctgaccggccagggccgacggtccctttcccgccaggctgcgggcaggcggctggaacggggaaggcggggacctgagggaggggcgcccgcctcgcccaccccagcgacctggggcaacgccccgccgccggcgctcaccgaagaccaggatgttcttgccggacggcagcttggacctggcgcgggtggacacttcgctcagaatggaggacctgtggcgacaatggcaagagtggtcagccccgggccgggctgggatggcccggctcgcgtcggcccctcagtgtgtccgacggtccggcccagaggccgcgccccccacggcccggcccgaccgcccgcggcctcaccataggctctggccttcctcctcctcactggtcaggtcgccggcggccgccaccgcgggcccgttgggacctagcagcagcttcttctccacccccaccggcgccatcttgccaactgcagccacaaagagggccctcccccgggcccgccgaggacccgcgaggacccgggccgggccgccccccgctcgccgtccctcgcgccgcgccgcccgccgaccttgccgcggcgactgcgccgcccaacgtgtcctctaggtctgcgatggccacgggctcccacgggttgcgaggccgccgaggtggcgggcggcggtcaggcagccgccggggcagccatgcgcggggaggcggtggcaggggcgggcaccgtccggaccgagggcgcgctggcggcctctgccggctgaggggcgcagcgcagcaccccgccacgctcgccgattcccctgcgccgtcgcgggtcgggcagccggatgaccgacccgaaagcctaggctttgggaatgagactgatggacacaaaagcgccatttatctagagctcaccatgtgccagagtcacacattatctcactgaatcttatctaaccctttcacagatgaggaacctgaagctcaaaaaatttaagaaacccacccaaggacccaaggctagaagataacattcggtacttctaatttattccccaaccttggaccattatatcatgaacttggcctaaccctactcaagccctgcattgaaagactagccttaaggaagaccccagaatcctcataaatatcctgcatttccccctcctcctccgaagactaaagactgtgaagtagtgctcttgaccgcagtgcataatacacttggctttgctttattaacatgctttttaaaatgatgttttcagggagccagcatttcacaccagaagaggagcccttaatttccttgggggccagctggcaggt

SEQ ID NO: 63531 - DNA, 1273 bp, Homo sapiens
gattacaggcgtgagccaccgtgccggtcctccaagacagttttaaaaaggaaaatactcatgaccagcttggggaaaggtggcaaaaacctcgtttctacaaaaacaaaaataaaaataaaaataaaaatttaagtaaaatatctcaagaactttttatattgtgttgaaatagtaatgttttggacatattgggttaaattgtatttaaaaatcaatttcatctgtttcattttacctttagtgtggttactagaaaatttataattacatttgcggctcacatgagactagcattttatttccattggacagcgctggctgagaacaaaacctaaccctctgtgccgccctcgcggccgggatgcggtgcgccccgggcctccccattcggaaaacgaggagcctgggcgcaacggggccggcagccgccttagctacccggctggcgctggggaccccgtcccccgaactgcacaccgcgtggcgggggaaggggtcccagccctcgcggagcacctttggcccagggcgggagctccgagcgccggcttcccgcgccccgcacggcccggcccagcctggaagaaggcctgaggaaggcccgaccgcgccgcccgcgcccttaggcccggcccgaatgctggaaagcccgccggcccgccctcggctcggtgagcctcggctcacctcagctgccggtcgtacttctgctccttgagcagctttcccagctgcgccatggccgcgcctgccgcgcggaaaacagccgagcccctgcggagcgccgccaccagctccacaagcgcgcaggcgcactgagcgccccttcgccgctaccgtctcctgcgcgctgcctgcagggggcgccgcactgcactgcgcacgcgtcgccggtacgccggggcctaagcggccctggtacccgagcgggtctggggctcttggtccccatcggccagaaaggcagacccgctagcctgccaatttgccctctgtccatgcagtaattgggggcgactggggcattggaatcaggcatacttgtatttcgaccacttaactggctgtgagatctactctttacctctcaaatcctcagtgtgctcacctgtgcagtggggataaatgggtcccaagtgtcttttgaccttaaatgagattttgaatacaggaggccagactccccccaaatcttgcatgaataataactttcattttgatgatcattatttttcacccatttcttcctctcatgaaaagcccacaagcc

SEQ ID NO: 63532 - DNA, 1635 bp, Homo sapiens
gagaaaaggtgggaggggcgtcattctggctgctctgctctgtggttaggaccaagtcaaaggtggaggagggaaaaccgtaaaatcaagtgagaggcttggaatagggtggctgcgtcgccggatggatgagtggagagagatttaggagataggatttacagcattagataactggaaagagagggtgagggagaggaaggagtcaagatgcctcccagggttttggcttgggtctctgggcagatggtggggccattactgggttaggagagaagagaaaaagcaagtttggcagaaagctgagtttggggtaagttatgtttgaggcgcctgggggcctccagaggcaggtgtccaggtggctggacatcagggtgtggcgctcaagagagggttctggagtggtcgacaccgaagtggagaggaagcagtgaggtgttctaacaacggtgaggaattggggaggccgctgggttcggggtatgcagagtgtagcggccacgtagctggcgatctcaggcacgtgactgcctggtcctgtggccccgcgctcgaacactttcagcacccaggcagggggtaaggggcggtgttgccccctcccgggtcccgcctttctgcccgcctctcatcctctttagccattgggcaatacctctgtccatcaagggcccgcctccgcaattgagccaaccagggctggcgggagggcgcttccttctggagctgggtcctgactagggaccgcctgggtgaggtgaggacctggtggccgcagttgtggcactgtgcgcaggcgctgaactgaccggacggagcgggcggctgtggcctcgccagctggtgagaagcgggcgagggtccgaggtagggaaggtaacgagcgggggatgtggacacctctttccccgccaggcctcgccggcgcctgaccctcccggcctgcggcaccggctcaggtgactgggcggagggagagctgaggtgagggggcgggtccgcggcggagagggaccagctgggcctacgaccacggtcaccccactcacgtgcgcgcgccacgtgggcccgcgggctcgccgaggacccttggctgcctaccggggcaccccactagctgctctggcctatcgagcaccccttggagctctgtgtcccgactgcacgcccctgttttacaggctggcaagccggggctcagaggcaccaagcgggtcgcccgggggcacccagctggggtacggccgtgccggggttctagggagatcggttttggtgggctccggagtccatgcacttagcgatgaggctgaagtcagagatttgaacttgggacctgtctgttttctttaaggatgcaagagggtttgcgtcctggctgcggtgtatcaccctgcaccgctgcctgccttgactgcagggccggagcgtcaggcgccctctgctcccggacagaccgcccccgcaccgacttctgcggggtgggctggcagggggtgggggagtgaagggacggtcctcagtcctgggaactcttgaggtcccgacaaatgatctcgagatcccgagggcaggattcatacatgaaaagctcattataatgggtcaaggttttgttctgttttttttttt

SEQ ID NO: 63533 - DNA, 2322 bp, Homo sapiens
aataataaaagctttcagtgacatcctcccatttctgcctcccaccatcctcccctgcttccaaggagtcagaaaaatgtcacaatcccttcatgatgtgcaaggctgagtgtgacctggccctgcccactcttcaaccccatctcatacctctaccacttctgtgcttcagccactctgagttgcttccagtgagggagtctctctgttaactggacatagtagggactcaatttgtgataatttgtgatcataaactaggtcacatctgtgagccttgctgagcactttacatgtattatctcatttaatcttcatgcaaccctatgatcaagtattattaacccattttacagatgaagaaactgagcctgggcatgtaaaaggttgtgcccaaggtcacaaaaatagtaaatgcagagtcgagtttgaaaccctggtgtctgaatccaaaccttcctcagcaatcatgtgattctaccgaataggtattgatttgataagaagcatgtgctccacctgctccccaaaggccgggcagcaacttaggagggagagtgagctgttggtctatggaagcattctagcaagagctggggagcactaggcaagatgtgaattggacggagtgtgggggccccaccctgaggctgggacctctgcctatgcctgggattgggggctgtgtgcacgcatgggtcatgtgataccctgtatatggcctttccctgtgtccaggccagcctagtccttggggctgggggtgggcaagagcaggtggaagcttggggagcccgcctcgagcaggcagagtccagcagaccatagcctgtccactgtcctgaccctgtggccctggactggcctctgccctgggcctggcacctctggcttggggaagggcccagaactactcaggcacacagtgaggcctgccctcccacctgctaccaggcagaatttatctcaactgagtgagaaatagagagagggagagagaaagagagaaagggagagagagagagaggcaattgcgtaagaggatttgaacaaaaatggttatggcactggtgtttgtaagaaagagaaactggacactgtttacatgtcctcctcaagggctggacaaagagattctgatgtgtccatcctggcagactttagaaataattaggaaaagaaaaagtgatgggggaagatctttatagtttatctgacaggaaactgctaattgtcaatactgtaaatgttggggggaattgatcacaaaacagaatgtacagtgtgaccccaagttgaaatccttcccccagccctcacacacactcttccaccagctccctcgtgacttaccctgttggccagtggccagagggtgggggagggggcttatcttgggaagtggatgagatcaccccgaggctggctggtttagtaccgggtaaccttttctacccttatggctctcagaggcttctgtgctggctcctaaaccttggcgccaacctcaggctggagggggttatgctccccctccccagggtggagatggtggccaaagccggatagggcacaggtgctgggctgacgcagagatggagtggcagagggggtctggggagttccagggctcagctgggaccctatgagaactctgctcccagcagatctgggtgtcctgtcatttcccagggacctgtgtgtgcagaaaatacattttgtggatacaggaatatcccagaggatagccactgtgtgaagggccgaggggtctccctggcagtgcctctaacaccttggcatgtcttgggattccagtcagccagccgggctctcctcggacaggactcctcttgtttctggccaaaattctggtgaggatggttgtggggggaagagataagtctgtgttgggaaagggactagggctcaattccagctcagcaaataaatattctgttcaaccctctgcctgccccctacctcccacgcccccactctcccaccccccggtgcctatcaggcgacttccagccttaaggaaactttgcagtgtgtcccaatcccctgagcacagccacacctctgagcctttgcccagacagttgtcccaacctgaccacctttcccctctccagctgcctttgtcaacccccaccctggagctgggtcaggtgccatctgtccccaagtcagcgtccatcatgtcagcttgtctatgttcatctggggtgagcctgagggcaggagctgggtccagggaaaattctaggacatgctggatgaaggaaacagtgggctcctggaagggatcaggggttg

SEQ ID NO: 63534 - DNA, 4384 bp, Homo sapiens
cgcgccagggcgctcttgcccacgccgggcgcccccagcagcagcaccttgtaaacgctctcgtctgagtcgctgccccctgagctgagcgagtcctcggagtcctcgggccagtccagcctgggaccctgggtccccgtcccggccgcggccgccgtcagggcacccggggtcagcgccgcctgcaggtcgcgctcgtccaccggcatgctgcggcggtgcagcggcggggcggggccccagggtgtgctgccccgacggcgctcgcgctcctggcccccaccgcggctcccgcccgctccgctgccgccgccgttcagggtcatcgcgtccgggaccgtctaggggatcaggaacccgagtggccgtgtaagccgcgagggaggcgggacccggggcgcacctgcccaacccggagtcaggcgggatgctccggccgaggtcccgccgcagccctcccccagcccccaggtcgcggcgccctcacccgggacccctccggacctggcgcatccatctgcagccgccccgaccccgctccgccaggacactcacccactcgcacacagacacgctcaggactaggatccggattaggaggccacgcactcgtagtccggactcggactttagggtttccgccgccgctgctgctgcagccaccgccttctcagcccgcactgggctctggctccagagccgcctatttaagcctccacccgcccccgctcccgcccccggtccacgctgctgcgggggctgacgtgtctgtccacccccaccaggggaatcccccaccctcttcctcggaccttacatccccgacaccccgccctacccgccaggggagtagcggtagctgtctgggaatagaggggctgaccggtaggcgaggtccggagctgagggtgtgtgtgagaaggagagagagagcgaggttgcggggggagtacgtgatggggaggcaggcagcggggtaaacccaatcagccaaaagcagcaactgccctctggagaagaattcggtctggccccgtgagactgaattctccctttcctctccccaagtcccggctcgtccttttagcaagtaagctagttacaggctggacagagatcccccttctctgcccatgacacccactccccataggctcaggtctgagctagaatttagggggtgtcctaaattcacacaaaatcctttccactccccatcctggagttgaagattctccctaatgagcctaaccttcagtgtgagggttggtgtcaccccatgagcccctgggggccctgagagggctgttgggggtgggggcagctctgacagagttgcaggtggagatgcctgcttgaaccctggggaggataccccagcccagaagagggaagggattaaactcagtccccatcccacctcccagcacccaccaggcagctgccagcaactctgctaaaaataaataatctgccccagccctggccctggccgtggctctggttattctgctcctggactggaagttgcccagagttggggaaatccaggccaatgggtgttgaatgccagcaggagccagccacttcgagtcgtcaaggtctcccttcttccctctagctgtaggctgagccagccacccagggcacatccagggcctggaggttcaggcccccacccaaaaggggcataaacacagggtgtggtcaaggcatgaggagtgtcttagctccctgctcatctctcaggggtctgagggttgcaggtcaggctgtgaggtattttgtgacagggacctgctatcagactgtgacatctgattgtgacaagtgtggtgggggtgggagggcatccatttggggctcaggtgacatcacagatggatggaccctggtgggctgtggtaggttgtcatggagacctgggccaggctctttggctgctgcatcagtttccttggcaacgcctaagaaggccttggattgaggagggcctggctcggtaagattagggccctcttgtccttgaggtcttcaaagtaggcaaaagctgggctgaggggtggcctgcccatggtcctaggggatcttggaggcctgagcatccccatgctggttctggcttcctgaacgaactccagtgggaagaggaagttatgggcagagcctcccgttagcaggcaagtctaaagagccaccacacacttcccatgaggaatcctggctgggctgcctgtgccccctccaaccccatgactgtgccactggaaagagcctcctctgggtgtctggcagagggcgagggtggggggtagctgtggcccttcccagcagggggccatgcaaagaaggagggctgggtttcccctctggcaatctgagctcttgacctcagcagtgtttcttcattgccaagggaactgcaaccacaaagggccactcaagccccaggcattccagtggctgctccaacaggccagagacactcaccacaagctagatatggccaggggccccagggattaacaccaggacacaaccttgagacacccccactcccaccacctggttctcccagctctctgggctgagcatggctgcccaggaggaataaactgaggctagaaccactcctaggtccgcccgggcttcagatcccagctgtgctccttgctagctgtttcacctgtgtccatttatctaggctgagcctcagtttctccagtgtagaacagggatcacctcttcctgatggttattataagacaaaacaaacatgaaatgcagaggcacagtagttggctcaagtcgggcacacagtaatatctcactaagagcacgtttatcatgatcatccttcgttggatggggcaggttaggtgaatttgtggtccctctcctgtttctgctccactctctccaggatggtggtctgtccaggagtggggcagaggtctcaggaacaatgcagatacctctcccctagccccatacccatgtctcctctctgtaggaccccacactcttccccgtccctcaggtgacaagatgctgcagagggaactgggctgggcttcagtgtccccaccccctcctcacaccacagccttcaggccccagagcctctgctgtgttctaaggcccaatgcattcattcattccgcggtcctgtactaaatacctactgtgtgccaggcccttgtgctgggggcaggatgatgagcaaaaatagacatggccgggcatgttcatacatgtcatctaatccctgggtcaaactcagctatgatttgttgttcccattttgtagacatggtaaccaaagcctgaggagtcacaggccagaaacagcagagccagacatacctggtggagggtttcaggaacctcaaacttcaccatcccctgtacccttgtgtcctcagatagcatctggggttccagaaagttccctgggcactggcccaggatgcacagatggtggccctgcaggcagccaggggccaggcactgatgagtcaagagtgacaagagaactatctgatatgtcagctgtggcatgagcagtttggtgtccctcacccaccatggcctggctgccaggaaggccagccaaatgactcaatcacacctgccgcccccatgactcccttcatccccagctcaacacagacaccatggccacctcagacagggactgtccggcagaaggtacacacgtcgtagggtgtgaggccttcagctcgggaaggctccctggggctcagctgttcactctgcctctctggagccctcagcttcctcatctgtgcgggatacagtgcctagatcatcagagctaggcctagacccatttaaatctcccaagggcagtcccaagtggttgccatgactatccccctcacagatgaagaagctctgggcaataggggctgatggcttcacctctctgatcttaggtagccagatccagcacctcctcttggtcattaggtggcgaggccactccctcctaagagtgagctgagtgggagcaataggagttggggttcaggatgggcttagccccttctgtaggcaacggcgccccctgccagctgcacagcacctatcaagctgctcagggcctcctttactccctagctgtaagtttttttttttttttgagacagggtgttgctctgtcacccaggacggagtgcagtggcacaatcatagctcactgcagcctcaacctcctgggctcaagcgatcctcccacctccgcctcccgagtagctggaaccacaggcatgcaccaccattccccactaaatacacacacacattttattttagagacagggtcttgctatgttgcccaggcttgcctcaaaatgctggg

SEQ ID NO: 63535 - DNA, 1315 bp, Homo sapiens
gcgagattctgtgtctcaaaaaaaaaaaaaaaaaagagagagagaggatagcaattgctgcatagggctggatggagaactgactagatagtaagtgtaaagccctcgactgaattccactcttaggataggctcaatgctgtcagcaggccctcaagaacagatctgcaaaatggccaggatccctactgaggcttctctgcccacaatcatatctgggcctcagtagggatgaggtggggttgggcactgcttcttaatattgccatttatcttcagagaatgagactaaagcaggaaggatgctccccctgggaaagtgatcctaaccagctaagccaaggtctaagccctacagtctgtccaggtgaccaaatgcaatctgggcatagggccaaggggaggcagaggccttagacccgagcacgtcacttcacagtgctgagcttccctcttactcaacactgggggtgacacatgcctttgggagggctgattgagagggtgcctcaggttcccttcaacagagaagtctgatgtcactgcccttatcagggaccagacggccatcactaacagctggaaaagctggcatcacacacctactagtgggcttataaaatatatatgccactcctgggcagggttttcatcaaaaagcgcaaacctggactcactgaggcctttagaccaatttccagttaaaggcaacacaaatcaggaacaaatcagactgcagaactgggacttctctgaacttttccaaacaatcactgtgaaaaaagacaaagggctgggcgtggtgttcacacctgtaatcccagcaggttgtggggcttgagcctgggagtttaagaccagcttaggcaacatagggagacccagtctctacaaaaaattaaaaaattagcctggcatggtagcacacgcctgtagtcccagctactcgggagactgaggcaagaggatcacttgggcttaggaggttgaggctacagtgagctctgatcacatcactgcactccagcctgggtgacagagcaatacactacctcttaacaaaatgtttttttgaattaaaaaaactgaaaaacagctaggtgtgatactcaagcctgtaatcccagtgctttggcggaccaggtgagagaactgcttgaggacaagaatttgagaccaggctgggcaacacggcaaggcctcatctctacccccaaaaataaaaaataaaaataaataaataaataaataaataaatattcttttgattgggctggttggggtggctcatacctgtaatcccaacattttggga

SEQ ID NO: 63536 - DNA, 4447 bp, Homo sapiens
gaccacaggcacacaccaccacgccccactaatttttgtatttttagtagagatgagatttcaccatgttggccaggctggtctccaactcctaacctcagatgatccacccgcctcagcctcccaaagtgctgggattacaggcgtgagccaccgcgcccggccctagctattccaattctatccaaagaactggcccactactgttgatttaaaggcctgcctgtgccccacccctggtccaaacccatctgccgctccctactgcccttcctgccacactcttcaatacttttctccactttccagctcagatctttattcttgtcacatcgacttggaaagcttcctcccagtttcctctctgctaatggggatccttccaggccccactctgatgtcctatccatgttcatgctctcccagtccccatcctcagcagtagaccctcaatgcctggtctcactcccggggctcagctccaactgaccttgaaacgctgaggaagggagcgcagaagcttgaccttgatggacagaccaataagggtggccatgctgcagtgcggaatggttggtgtgaaagccacagccactgtactctcggggtcgctaacctggttgtggaggagagatgtcaagagtcaaccaccctcagcccaaggtccctcttcttagtttgttgttttgggcaaatcatccaacttctatgggcctcagtttcaacacccataaaataggcacaacaatctccctccccaaagatacccttcggtgttcgtgagcatagagcacgccagctcctgctgcacagaaacctttctgactctctggaacaactcgctcccctcggaagtgactcacctgaacccgcacctgctctactacgttcaactcctctagcgtcagtggatgctccgggtcattgatggagcgaatcagatgtgggaagtgaaggaaaagggactctgcgcccttgcccacttagaaccctctgccaggaacgccctgctgggatgcggctccaccagctgctcgatatcactgctccccccaccgcaagcccccggaacccgcccgcgcccagcagcggcggatatcgaagatctcgcgtgcgtcgatgctgtcgggaacctgctcgtcctcctcgcctgccgtcacaggccgctccccagagcgctggtagatgagggggttggcattctccaggaggccgccgccgaccccgccgccgcctaccatcgcggaaccaccaccgctgatcctagcaggcgtgcgcttccgctccaacccgcgcacttccggagaacgggaagggggcgtggcgtggcgacggagtcgcgcgagggacacgccgcgttgtgggttctcggcctgaggtgcgagagaagcggtgaccgcggccctggctgctcggacccgggaacatgatggtcgctggagcagaaggcgctgagaagggaccacggcggcgctgggtcgtgcgagccagtagcgggctgaaacgtagaggccagaaccaggtctcagggggcactaaaggcggtcggaggtaatccccacaccgcttcctcctggaagtcaggctggccgggagctcccgtatccaggacggttggtcgcctctggcctggcagggatcctagtgtctcgggacctcccggtgacgcgcctgcctcccctgctgcaccataggcccgggagtacggcgtccccacagcttggaccggcaggggctcgtgaaatgtttgtcaagtggataaatgaccatggccgtggtctccgcgggaggtgaggaaactgaaagccaccgaggaaaaggggggcgctccttaagaagtgccgcggtcacgtgtacgtttcaaaagaatggcgtgactgagtagggaggggaccgcggagaccctcagaccctggactgtaaggagatgaggggccgtgaaggggaacccaggaaactgagtcctgaaagcaaggaggaacttccagaatgaagggcgccgacactccttcctgcctttgctcaagcggttccttcaccccgatcaagttccttcccatttctccatctgggggatcctgaacgtgcacatcctcagagaagccctcctggggtctccaattctagtttattgccccctcctatcgatcccccagcgcgctcatcgggcctgtggacaaggacaggtttgaagagaggattccctggatcgcggaagggctgcaggaatggcacagccccttccgaggatgccaaaggagcccgggcaaaggaaagtggccgtgcccgggcctgcctaccactagatccccacccacctatgactgctcagtcccgctctcctaccacacccacctttcccggcccaagccagcgcaccccgctgactccctgcccagtccaaactccaaggctgggcaaggcactgatccactgctggacagacccggggcagcctctgggtgaacagcagcgtgtccgccggcagcgaaccgagaccagcgagccgaccatgcggctgcacagacttcgtgcgcggctgagcgcggtggcctgtgggcttctgctgcttcttgtccggggccagggtgaggctccctcggaggggcgacagggaccgggctcagatctgccaaatgctgcggaggcagaacctgacagtgcgggagggcaggcgcctgggaggtaggagctggtggagatgacagcgtggaactcgtgagccccacgcaacgcctccccgccgcccaaggtgggctcctagaagcacagaaagggtcgggctgggggacaccacggcaaggaaccagcggagtacaggggccccaggagcgccgggacatgccaggccgggtaggcagcctggggtcggagtgggtgagggattggggtgtggggattcagtccatttccctcttatgattgtggctgtagcgggtgctgccggccggtaataacagtaatagcttctggcagcatctggctctcagtgtgtggcgtccttggccaggggggatgccctgagccctccaaaggggcctcagacaaggatagtggtccttggggaacagaagcccccaggcgccaaatcctaaagcagatctaagaggccacagtggctgggtgcgattggctcactcctttaatcccaccactttagaaggccaagggagagtatcgcttgtgcccaggagttggaggccagcctggacaacatagtgagactcggagtgtacaaaaaattgaaagaaattagtgggctgtggtggtctgtgacctgtagtcccagctacttgggaggctgaggtgggagatcactttagtaggggaggttgaggctgcagtgagccttcatcccactactgcactccagcctgggtgaaaaagcaaaaatctgtctccagaaacaagaaccaaagagctcgtggtgtccctcatgccatttacctcatcctgggcaagggcacaacttggcttccagggcaaaggtgaaggctctgtgtgcctgccaggcttctccaggcccttatcagaagctgggggagtgtttcggcctttggtcctctcacccgaaactctcctaagtgtatgatctgtctcttccaacccttccccaatttaatttgcgcaggtggagtccatactccccccgccccatggtgcactgctgcagggcttcctcccgtgcctgcccttgaccacattctagagttcaccaggagcccagcaggaagatctgcctggcctcacagatggctaccttttaaaatattttgggccaggcacagtggctcacacctgttatcccagcactttgagaggcagagatgggaggatcacttgaggctaggagttagagaccagcttgggcaacaagacttgtctctaccaaaaaaaaaaaaaaaaaaagtcaagcatggtggcagacagctgtactccaagctactcaggaggctgtggcgggaggatctcaagcccaggaggtggaggctgcagtgagctgttatcatattactgcattccagcctgggcaacagatggcgaccttgtctgacaaatatatatgtatacaaaattttgggttggacccacattcagaaaaaataattgacaagccataggagggtacaggtgatgtgtgccatcctctttttacccaaccagtcctggcttctcctcaggggccatcaaagtccccatggcccacactggaaactgcttgttgacaccgcagtacacacagtgcccagcagtttacacaagaatagatgtgtgcacttgtccttgattttcatctaaacagtcataaactcacccactttctggagccaggcttttctacagctgggactacaggcatgcaccaccacaccccgccaatttatttcctgatttttttgcagagacagagtcccactatggtccccaggccagtcactgtgctttt

SEQ ID NO: 63537 - DNA, 804 bp, Homo sapiens
cccacctgcctcggcctcccaaagtgctgggattacaggcgtgagccaccgcacctggcctgtctttatgtcttaagggggcctgagatttgttttaatgaagtatagtaagacaagcagatatgcaaatgactatcatgagggaaggagtttgctcgtagttccctgtgaacaggaagcaggccatgccacatagggccacagagggaagcaccaggtggcatcagccaggaggcagagggagcagggggaaaatgtgggcaagcccctttgacacggttgccacgggaaggaataggcaaggcaggctaaagaggtttacgattggcagcaggctctggggaaaggggctgtccccagccagcttcctggtacccggctctgtggtgattatggctggtggatggcagccaggagctgagagctgtataaaggaggtggttgggtatggctctggactggtttgcctttgctccctagagagatgcctgccaattccacctccccagagagctgcctcctatctctaggaattgtctagcctgggagaggcagtcctccagtcttagtctgtttgtgttgttgtaaaagaatacaggaagctgggtaattcacaaagaaaagaagtttagttaggccacagttctgcaggccgtacaagaaacatggtgccagctgggcatgatggctcacacctgtcgtcccagcacttggggaggctgaggtgaaaggattgcttgagcccaggggtttgagaccagcctgggcaacataatgagaccccatctctactttttaaaaaat

SEQ ID NO: 63538 - DNA, 698 bp, Homo sapiens
gcgctgccacctcctacgatggatcagctctggctgcctatggggatgtggtcgtggttacagtccagtaccgccttggggtccttggcttcttcaggtgagacgacaggcatggccagagcactgcctgcaccggggagaggccagctcaccagagcaactggggatctaggttggggtccggaacctgaagggagggccccttacccatgatgtctgaggcagagaagggcaccccccaagcctccaccctgggagaggggtccagccaaagccagaattatacagtgaacttggtcccttgggcagagggcattgattcctgggctgaagcccaggttccagcaggatatgggacaaagagcaacaggctgtggagatgccaaccacggctcccagacaggccagacctggggagcagagaagggtctggcatcctggtggctaattcaaagcaaacctgcagaggctggcgaggagccaggctgaactaaccgttgccccaacactgcccccagcactggagatgagcatgcacctggcaaccagggcttcctagatgtggtagctgctttgcgctgggtgcaagaaaacatcgcccccttcgggggtgacctcaactgtgtcactgtctttggtggatctgccggtgggagcatcatctctggcctggtaagtcactatagggggctagtgat

SEQ ID NO: 63539 - DNA, 1902 bp, Homo sapiens
tgcatctgggtggggctttgcacagctcactgagaagaactcactgtgtgatcacaggcaggcctggggcccattctgggcctcagttttcagacccgtatcatgagcaaactggtcctgatggtgtttacatcactgacaatgctgctgttggtttttgtttttgtttttgttttttttagatggagtctcgctctgtcgccaggctggagtgcagtggcacgatctcggctcactgcaacctccgcctcccgggttcaagcgagtctcctgcctcagcctctgagtatctggggctacaggtacgtgccaccatgcacacctaatttttgtatttttagtagagacagggtttcattatgttggccaggatggtctcgatctcttgacctcgtgatccacatgcctcggcctcccaaagtgctgagattacaggcatgagccactgcgcctagacttgttgttggtttcttagaggagagctccaggcaagggggaggctgtcaccgaccgtgctccagcacctgctggggagctgcgttttcctaaatgtgtctgaggggcagtgttcactctcacatcacccccctgacccagtccggagctcttccctctctctgggggctgagccctgagtcacagaagcataattagaacaatgactgccctttgaagcactgggcttggcgatttacccagaacaagtgtatttactgtttattcagactattgagtaatccactgtccagaacattctgtggcaatcattaacaatgctcagcatcagttggttaaagcacagggtttagaaaaatgtctgagaacctgggtatcagctgatataaaaagatacaaataccaccccaggtgtctagctgttaaaaacaggttgttggctgggcacagtggctcacacttgtaataccagaattttgataggccaaggcaggaggactgcttgaacccaggagttcaagaccagcctgggcagcatggcaagaccccatatctacagaaaattttaaaaaaatatctgggggtggtggtgagcacctgtggtcccagttactctaaaggctggggtgggaggctcacttgatcaaagcccaagggatcatggttgtagtaagccatgagtgcaccactgactgcactccagcctgagccacagagtgagaccctgtctcaaaaaaaaaaataaaagcaggttgtccactgttagaacatgactagcagttactaaaataccagaacgttccttgtcagaacattggctgtcaccgataagatcccagttatcctgaacattctgtgacttatttagaatcccaaagatcaggtgacagaacatgggatggccactgttagaaccctggagatcagggatttagaggttagagtgttcactgtatagaagtctgggcatcagttgttagaaactgaccatgagctgtcaaaacaatggctgtttggaaacggagtgtcaggtgtaagaatttgtggattgctcagaatagcccatggggtggtggttggggtgggcagcgggagaggaggatgtttcaaagatagtagtttctgcctgggtagttacgggggaggtggaaggaaggtatcagactccaaatttattttgaaagtaaaattggcaggatttgctggagaattggatataagccacaaggaaagaagaggaatcactgataatgactagtttttggccacagtagacaaggaaataggggtaccatttatcaaaatgaggaaaactggagcaagagcaagtttgggcaaaataggaattcattttgagccaggagcagtggctcatgcctgtaattccagcactttgggaggccgaggcaggaaatcacttgagctcaggagtttgagaccagcttg

SEQ ID NO: 63540 - DNA, 763 bp, Homo sapiens
tcaagccattcacctgtcttggcctcccaaagtgctgggcttacaggcatgagccactgagcctggcctctctaaactacacttaatgaagagtgtgaattggtctggccaagaaaggggagaaagacaagctagacagagggaagttagccaggcctggagcagaccaaagctgaattccttgcctatttactcagtagtgtcatctcaaggaaaagaacgattgtctgctttctaaattgccctttttgtgttcctggaggggaggcaggctggtgaggtgtccgtgggctagtaattatttctgcttatttacaaggtaatattacagcatgatgagaaagcctgcctgttttgatggttccaagcttggaaagtttgggaaagaatccaagaacatggcaggttatcaaggcgttatcagctgggacacaaaaggagagaaggtaaaagaggcatttggattccagagtcaataatgagccagaagtgagtgttgaattattcaacctcctgtattgatccattgatctctatctgcagctcttggtttattcttggttggcatttcctgtgtctcagacactgataagagaaatggaaggaggaggaggaacagattcttaagactcaagaaaagagaagaggtgatgtcaaagagaaatttggcaacatacatcaggaatcttaaaatgtccatatcttttgacctagtggttctacttttggaaattgatcctaaaaatactatccagaacttttt

SEQ ID NO: 63541 - DNA, 2178 bp, Homo sapiens
ctttgaatcaaactctgccataaatcccatgtcagactttctccagtttgggctaaacaacttccctagaatttatggatcttattttttgcagctgattgcacattgagtaagtatatggactggcaatcggttacattcttaactcagcttgttcttctttagaaacttaaatttattgggctcccactgtgtgctagacccacataaaggttctcacgctaacactgcaaacctaggagtgtctgcattttggaaataaggaaactgaggtttagtggtccaattcttatctaaggccccagccagcaggtagtgtagctgagtgggatcccatctaagacccatctgactccaaaagccacgacctttccaccatgactcggttggattctttggtccgtttccacctcagtcttcaacgtgcagagcctacacccctgccggtcggtttagggacgaaaagtccccaaggacttaggtttcctcgcgttcaagtgacaatctggggttactccgcgcacctggggaacccagaagttccagatgaccgaggaagggcggtagaaaaggcctgcgctggctactcccgtctgctaaaggccaggcggatcccccaacgacagctccacgccgagtggccgcgggcgagcagggggaaaagggccctgatgcggaaggagccccggggcgccacagccaggccgctccgccagcgggcgggtggcgcatgcgcggcgtgggccgcggagttgtgaatggtgcgtcttgtttgccggagttggaggcgggcgggcgcgcgaggaggaggggtggggccggcgggggcggggtgggcggtgagaggaagtggcggcggcggcggcggcggcggccgggggcggtgagcgctggggctgcgcgggcggcaggcaacggctgaggcggcggcggcggcggcggcggcgtgggttgggctcgagcgggcggcggcgcctcagactccccggaacgggagcccacgcgggcgggcgcctgaaacaaagggaagcgggcgtccgggcgccgcgggtgggcggtcagtcggtcagcgcggagccagccagcgggtgcccgcgcaagccccgagcgcggccggccggcgcggcctcagggcgggaagatgccgcgcgtcgtgcccgaccagagaagcaagttcgagaacgaggagttttttaggaagctgagccgcgagtgtgaggtgaggcaggcgggcgggcggctaggaggccgcagcgcgccccgagtgggcccgggcggagaaaagtttgggcggcacggtccccgggagtcccggtcggtgcgcccgcggaggggcaatctcgccggggcggccatcgcccgcagcctctgcttgcccttatcggcgctgcgctgggagggcgggcgcgcgggcggcgccgcggatttggctcctgatttcgggccgtcttgccttgcagattaagtacacgggcttcagggaccggccccacgaggaacgccaggcacgcttccagaacgcctgccgcgacggccgctcggaaatcgtaagtcggctggcccggggcgcgcgcgggtcacttgttgcgcggggccgcggcggcccaggccggttccggacggcggcgcggctgctgcggctcccggaactgagtgggcgccgtctcacttcctactcgggattcaaaatgcgaaaccagatgccgcgggccggtactcgcggggagacgcttttcctggggctcgccgcggtggcgcgtgtcggccaacggagcaccgcgagtggagctcgaacccgagccagactaaacaagcgaagggcattgtttaggcggcgacaccgaagaagggttcagggtatttgtagcaagcaaacccccattcggaaaaagaagtggagcttcattcaaggtcggcgatagtttgtttcttagaaggtagatctgtcggtaattctctgtgtcaagcggtctcactaccagatcgccgagtagaaatctttcctccagttatttattctaatagagaggggaggggggggaaaaggccctaaaaatgtcattttcttagaatgttaagcttcaggagaatcagaaagaaaccattatccccatgtcctgagtagggctgctgttcctaaaaactgcacagatgggcaaaacccacggttgatctcga

SEQ ID NO: 63542 - DNA, 2650 bp, Homo sapiens
aacatctctgggcctcatgtattcgcctatgtaaagtcggtataatctcgcatctcaggttggttgtgagaacccagagactgcctccgtgaaggcttggcatcagcataggcctcggctgtcctttagtttcagggtgtcccggggcacgggccaaaacctcaggctgaacctgctagaggaaccttcctgtcccttgcagattaggaaaactgtggcacagaaagcgccaaggggttgatcaagacccccacagctttggtccacgctgctgccggcggcttcggatcctggtcccgggggactgcgcacatttggatgtggtcagcagggaggcctggcctggccccttcctcttctacccagtcctctccccgaaccaattccgacccctaacgcccacagtcctcactcgcttacggttcgacccttgccccaggggcgactgggtggggccgtcattcctgaacaactaaaagctgctgcggccagcgtcacctccggccccaacggagacggtgggggccgtgaggcttagggactccgcgtcctccctcctgctgggcctcagcgtgccctctgtacttgccttctgctaccagtgaacgtgagtgggacgtgtgtgtagacagcagacgggtcttgtgcagctgtgtgacgtgtgtgttgtgtggtgaacccttctttatgtagatatgtgaagtgtgtgtgctgtggtgcacagatgtaggggctcacgaagtactgggctccttgctcctagagcccgaacagttcccaacgttacagccctgcccgactcagcctccgcagagacggcggcgggacccgcagtttgcgcgtgcgcggctccgccccaggctcctccctcgcgctggcactcccgccttcgcccggccctccccgcgctttacggcccggcacgccacttttactgcagtcgcgcccgccgccgtcgttgcccccgctgccgcggctgctgcaggtgaggtgaagtgaggtgaggtgtggtgttgggccggtgctgctgccgctgccgccggggaggaggtggaaagcggggctgtggcgggccggcgggggcggcctgtcagccgctgctttgtctccttagctcgggtcccttctgcgctgccgcagggaggccgcccgggccaggcgagccgaaccaatgctggacctggaggtagtgcccgaacgctctctggggaacgagcaatgggaattcacgctgggtgagtttggggtcctctgtcaggaccccattcgctgatccttgctttctcctgggctcttcccacctgttctcagtctctcacgcccctgcgcccgcagctcctcacctctttcgtcctctcggctcgctgggctccaggcactagatacccgctccaactggcccgatttgcctgtcagttgctcgtctcgggtctcagcagggtctcttctgggacggtggaacagtagtagtaaagacaataatagcttgctctccccaaatgcctaatgcccggccctgctctttttggacgtaattctctctagtacccctcgccggcacctgaggataggtactgttgttattcccatttccattttacagactaaataatggctgagaagtggctgacccctctgatcatcactgtggcctgtggtctgtctcccactgcttttctgggctgtggcttccttcccctttttaggaggggaaacctaggcttggaacccatgatcagatgttggggctctggtcaagggagttgagtttgtgtgtattaaaggaacagctgacttgcttctctcttttttttctttttttttgagacgaagtctcgctctgtcgcccaggctggagtgctgttgcgtgatcttggctcactgcaacttaacgcctcgtgggtttaagcgattctcctgcctcagcctccccagtagctaggattacaggcacgcgccaccacacccggctaatttttgtatttttagtagagacgaggtttcaccatgttgaccaggctggctggtttcgaattcctgacctcgtgatccgcccacctcggcctcccaaagtgctgggattacaggcgtgagccactgcacccggccccgcttctctctcttttgaaatatagtctgtatcggatgctgtaatcctaaacccagacctcagttgtgacaggtgaaggttggatgaaataggagttagggagaagtaacatttagtttctaaaaaatgcagtttggtcgttttggggtttgctggcccagccttctcccttcaccctctccatttccagcatcactacttttatgtgtacaaggatgtttgcattcagtaacccctgtgtgtttactttgatgtcccagcactaagaaaagggggtggggtaggtgttggtgctgtttgtttgtgcaggcctgaactttagtcactctagtgtgagctactggactaaatcagctgctccattggattataaattatccttgactctggaagacttatgtctgtggagacagtgtgttggagaaaccaggtggtacagattgctggtaaggccctgctgatgcttagtggctacatatgtcctgtgtgttgtaagagctagtttttgttgttggtgttttgttttaagacagagtcact

SEQ ID NO: 63543 - DNA, 517 bp, Homo sapiens
gtgatcctcccgtctcggctcccaaagtgctgggaggcatgagcatttgtgccgggccctgaaatgttttcaatgagagttgcagaatgtattgatgcagaggcaagtctctgaatttgtttttgaaattagtcttgaaagggactaaaaaaggtagatttaaagggtcagtgaagaaaataccttctccgagattaccttgttccacagagactgaaggctcactgtgttgaaggcatcatctacctctgtgaactctgctcacaaacattgaaaataaacagtgcacagtgactcatgcttgtactttgggaggctgaggtgaggggatcacttgagccaagagtttgagaccagcctaggtaacatagtgagaccctgtctctatttaaataaaaaataaataaataaaaatttaaaaaaaaagaaatgatcttattccctgaagagcttagtctagtgatagagagggattatagaaatagttccttttattataatcaagtagaagatgtat

SEQ ID NO: 63544 - DNA, 2063 bp, Homo sapiens
atccgccgactggcagctcttcttacgtgttctttcacggaagcccctccttgggaagccccgcgccccacccaccaggagtcgtccctttttgggcggggctgaggcttccaggctgggtcctgagaaagtttggtggccggagactgtggggcgcttaggtaccgacctaacaacttctgcgcctgtttccagggacgagccacgcacggtgccccctgaacacctaacagtcccgggggcagccccacctctggctgggtggacagagacagcctgtgggcgtggcccagaactgaaagcctgtgactccttgcgacccgccgggcacaccccctactcagctacgcagctcccgagcgcttgaggggagcttcccaggctcccactagcccaccctcaagctggggtttcgcacgtgcgatcggctggggtgggcaagggggtctccgctcaaggaaagtattcagaaccagccccttctcccccaccctctctcctgcagggccctactgcacctcgaaagtgctggcagggacgaggagcctgcgggggccaaattccgtaccgtcccccgcctcccacggtgttcgaacagctcagtagaccgccgccaccagctggctggagcagccgccggtgacatctgcgccgcgcccacgcttcggagccaagatccacctcctctcccgcccgcaccggggagcccacccacccacctgctgcactaacctggccgcctcggcggggcctgggttcccacgcccgccaggctccgctctactccgccgcttccgggtgtgcgcggaggcgctggggcggtgccctagcccgagccgccccgtccgcccgcgcgtcccgccccgcgggctcccggtggctgcttcccgtccgctgtcctctgctgccagtcccctgccccgggcaaagcccatctggtccgccgagcaggtaagacaccagcgcccaaggttagacggcaggaagacccgactttgggggtttgcgattcttacgaggcggggggctcgtaagagctacagctgccagacttcggtaaatcaagggggcgccccctggagaccagaattttctggtacccctggggatccggcttcaagatcgctgctaccagtgggcactcaaaacggggtgcccatgggtcccaggtacaagcccggccgaacgtatctgaagccccaggaaacacgtggcacaaattccgggagaaactgttagcccggaagatatgggaacattaactggcgagtagtgtgaagccttgtgtacacaaacctttaagaaccttaaaacaagattggcggccgggcgcggtggctcacgcctgtaatcccagcactttggaaggccgaggcaggtggatcacctgaggtcaggagtttgagaccagcctggccaatatggtgaaaccccgtctctactaaaaatacaaaaattagcccggcgaggtggcgcgcgcctggagtcccagctactcgggaggctgaggcagaagaatcgcttgaacccgcgaggcggagtttgcagtgagccgagatctcgccactgcactccagcctgggcgacacagctagattccgtctcaaaacaaaacaaaacaaaaacaaacaggattggcaacttcaaagaggacgcacactttccagtaacccatccccctctaaaggctgcgctccagggtgggtctgcggagttccagccgaacccaaattgctcagcgggagccagggctgctcaggggtcggaacttaaatcttgagcccctcaggccccagaaccgtcaggtcccagagacccaagttttttttcatccagtggggctgtcttaggaagcacccgggacatctccccggcgaggcggaggcggggaaggagcctcccctccaggggtggatccagctttgccccgcccacgcctcgcttcctgattggctcatggtccctgacaaagaaaagcctacattaacgctcccgccttattaaccctgtagtcactttctactaaccggcggggttaagatggggtttctcaggccgggcgc

SEQ ID NO: 63545 - DNA, 538 bp, Homo sapiens
agaaggaaatagagggaccgagaggggtgggactcgaacccaagtctcccactcatctcaccccaccccaccccactccaccccaccccacccctccactccactccactccacacatcccatccagccagccttttctgcctgctggtgcctcggccgctgtccgagccccgccccgcgggcttgcacgtggcccccgcctgacccggcgccccggggcggagtagggcggagcgggcggcaaacgcagcactttccgcggctttgacgagcccgcagcggccgggcccgagcgcagagccgggccgagactgcaccatgcaggaagcgccagctgcgctgcccacggagccaggccccagccccgtgcctgccttcctcggcaagctatgggcgctggtgggggacccaggcacagaccacctgatccgctggagcccggtgagggccggggcccctcgattccccctgtggtcccggggtccctccacgtcagtgaacacccatgcccgcccaaccccctcctgagactgggccg

SEQ ID NO: 63546 - DNA, 1983 bp, Homo sapiens
acttctcctagggaaggaccccacgctcggggccccactcctgctggatgtccaggcggccttgggaggcccagccctgggcctgcctggggctttaaccatttatagcactcctgagagccggactgcctcctacttgggcccggaagccagtccctccccctaagaccccgcgcctctgaaggggcttggaaccagtccgccgctgcacatccttcttggcttcctggcgccccctatcgggggtgagcgaagcccccactactaaatggcctctctccactaccccgactatccctgcacataaactccgttttttttttttctgtttctggtctcttttctctatcgaccagggagcacaggagttatgggtggggggtgattttgcatttgtagaagcgtccagatactaggtttttaatagaggaaccccaggagggtggaggtgcttggggatccggtgcctagctcccttgcttaggcccgggtccagggctggcgcggggccgctgcaatctctgggaagcgggggcttctgggtcgcgctcagctctgcaatgcatgcgttctgtgatcctggtgagttggtatccttctctgaacttcctctgtgacaggcagagaagaggggtcgatgacaagatagatggaaagcacctggaaattggcaggccctgagtgggcgctggacgtgtggggccgcgggccgaactgccccctcctggcctcatctcctggtgcgccccgggtggggagggaaagctgactacatgcacgtccccagccagcgcgcggcctccgcggtgtggctcctagtgcccggggaagaaccctcaccctccctattcccagcagccctggccgccccgcccccgccgcagctgctgcacccacccccaccctgcccggccctttctgcaccgtcatctcctgccccgccgaggcttgacccgtgagtggggacgcccaaaacgggccagaccgggagccccactcccggctgtgggagggaagggaaaccgagattgggcagaatcagcgccccaccacccgctgcggcgctcgggggtcgggggggcggggtgggtaggactgtgggccccgccctgccgcaggactctcaagctctgggactgggtggagggaggtaaggggcggggggggaaaatccgtgcagtcgcacatgcgcaaaggctcttcactgtcccaagaccctggcttcctggccaaagagcccgcgcagcgaggtggggttgggggctgggacccagctccgtgccccgccacctggctctctgggaagaatcggacctgtcaccctcgaaggactggccgctaaataacttcggtattgagagctgtgtgagcctcaaagggagggcccagaccagctggagtctctacccccagacaggataaagggcaggacttggggtcataggaggaggcggctaacatgaaaacaacttaggttggagagaaggaggggccaatccaatctgcaccctccctgtgtctgtcccgagtaggtgctgtccccctctcccttcctttgcccaccgattggagggacactctggaaaactcagttgaagaaagcggagagtctgcgtgtacacagtgcaatgatgtcagttaatgcactagtgagggcatgtgttgttcacggtacacagaagaaggaaccaccagcccttgggacacttaggcattggtgtagacaagggaacatttgagtcctggacgatggataggtccacggagcggagggaggagaaaaggattccagtcttagcgatcagcatcagcaaaggctccgaggtgccagaggcatagtgagttctccgatccctggctggtggagggaagctgggaagggcctggctgtccagggtggtgggaggaggctagagtagccagaccagatattttgggttgtctctgatgggcagtggggtgtgggggggaggtagataggta

SEQ ID NO: 63547 - DNA, 1671 bp, Homo sapiens
atcagggtcaaggtaaggggagaggggcagggaggctctcagcactttgtgctctgggttcagaggggactggaggatagagtatggaagcagggagctctgatcctgggttctgcagggccaaagcaggaggcagaaggctggacttagtaagtggtgaggatggtgagagaaatattcagcagtcagactggaaaggacttgtctgcaagctgggtgtggagtatcagcatcaatcctaggtttttctgcctggttaggtggggaagcagatttgagagaaagaccttagtttggataaacggggtctgaactcgcctcggatttgccgggggtggagctcaggacgtcctggttggggagggcattcagagagtagatgccagtcctgggaaaggcaggggaggagaggagagccacggctgacgcttggggacagaaggaggagcctgaggaggagacaggacagagcgtctggagaggcaggaggacaccgagttccccgtgttggcctccaggtcctgtgcttgcggagccgtccggcggctgggatcgaggtgaacttaaaccccagcctgggtgttcactgggggcattgagggagtggtcagaggcggcgagggcagcggggagggcaaccccccattacttctctcccctttccccatgcagccccgacaatgggcaacgcgcaggagcggccgtcagagactatcgaccgcgagcggaaacgcctggtcgagacgctgcaggcggactcgggactgctgttggacgcgctgctggcgcggggcgtgctcaccgggccagagtacgaggcattggatgcactgcctgatgccgagcgcagggtgcgccgcctactgctgctggtgcagggcaagggcgaggccgcctgccaggagctgctacgctgtgcccagcgtaccgcgggcgcgccggaccccgcttgggactggcagcacgtgggtccgggtgagcgcgcggggcggggcctagggcagagcagggacggggctggggcagacaaaaggcccggggagggcagggttgtcgtctccgctagaagtaggcgagtgtgaaaccgcacaggggtaaattgagcctcagtcactcccacttccgccccaggctaccgggaccgcagctatgaccctccatgcccaggccactggacgccggaggcacccggctcggggaccacatgccccgggttgcccagagcttcagaccctgacgaggccgggggccctgagggctccgaggcggtgcaatccgggaccccggaggagccagagccagagctggaagctgaggcctctaaagaggctgaaccggagccggagccagagccagagctggaacccgaggctgaagcagaaccagagccggaactggagccagaaccggacccagagcccgagcccgacttcgaggaaagggacgagtccgaaggtgtgagtccgcccaaaccctgagccggcttggcgggagggcatggcctgggaagcggatgccggaccccacctctttgaccactgttcccgtcatctctagattcctgaaggccagagctctgacaggcggtgccccgcccatgctggataggacctgggatgctgctggagctgaatcggatgccaccaaggctcggtccagcccagtaccgct

SEQ ID NO: 63548 - DNA, 1018 bp, Homo sapiens
ggtccgtgtcctcccacaatcccctgaactccccgaaggcaggaatggggtctgattcacccccgtgtaccaagcacccagcactgggtgcataatgaatgaaggatggatgggggaggagccccccactattaaggcggggtctagtgacaaatgagagggtgtggcctgtgcggagagaagccccggagaggacaaggtgaagagccaatggggaaccagaaatagaggaggggcgtgacctgcagccaataagtggtgggggataaggtgaagggcgtgcccaatggagggtggggccaggagacaatggagtggaggcttctccgggagatcaggaaaggtcgcgtcgcgcgcctcctcccggcctttgggggggtccgtccgcgtgccgtgcccccacctgttagctcctctgctcgccgcccgccgctcccgctctgctacaccggccaccggacgcccagccggcgggagccgtcgccgatgacgtacgtcctcgggcgcgcgcacgctcttacgaaagcgtggggcttcgcgtcagtctccgcggcggcgcgcccccgaggccactgggagcgaagccaggcagggttgagggggcggtgttcgtggtcctgggcccgcccccttcccaaggccacagcgagttgctgggcttcaggggctccaggcggccagggcggcggagactcttgctcacggcctgggcgcggagacgtgggggcgtagcccgcggcctcgggaacgcagtctgcacagagggcagatgcctgcataggcggggcgcagcccgtgtaccaggacgggagccaggatactttaagcgtgtcactctgcaagaattccctcaaccctcgtgggcacttttattccatcccaccttccccaacacacacagactcaggcgtccggcagccgtggtttattctgcgagcagcagggctcgggcgcaggaccccgagggcaggcaggaggccggcgcgagcgcgggcgcgggcactaggctgaagaggac

SEQ ID NO: 63549 - DNA, 1530 bp, Homo sapiens
aacaggtttgagggagcagattggattagtcaggtagtgtggtctcctctcccaagatggggactaggcagagttagtgatgttggggcagattggcaaggaaagttccgatggcgtccccttctctactgccagggcggcccactgacgcccttctcattcctccccaacttcatcccaactccccggtctacccaggtagttttcgtcttattcggaggctggacatttgctactggtccctgaagttttgcggctgcacccacagacagcaatagcgccacgttccctggaaggcgcacgggacggaagcggaagcagtaacgctggctccggctgcccggcggccaggaacggaagcggaagtggcggcggcgccggcctggcctggcctggctgaggggaggcggcgggcgggcgcgatggcggaggccgggccacaggcgccgccgcccccgggcactccaagccggcacgaaaagagcctgggactgctcaccaccaagttcgtgtcccttctgcaggaggccaaggacggcgtgcttgacctcaagctggtgcggcctgggctaaggggagacaagggaggctggtggaccaggcctgggccggtagcgggaaccccgggggcggcccagctgggtcctccgagagccggccgccatcgtgtgctttctcacaggagagaagccgggggatgtttcattcattcggccgaggccatcgagctacagctatgggccaggctcgggctgcaggtgttcgtcctcgtggcccttcctggctggcgaggagaagagctgcctatgggacagagctgcggtcctgagctgcagtagcgcctgggaggcactacagggttggaatccagattactcccttcccagaccacgtctcagggtggctgggggtacaccccagagtggggctgagcattctccattctctctgccaggcagctgacaccctagctgtacgccagaagcggcggatttacgacattaccaatgttttggaaggtatcgggctaatcgagaaaaagtccaagaacagcatccagtggaagtgagtgggcatagtgggagggtagtagagtctcccacccagaagtgtcgggcgtggggtggagggtgccgaagaaggcaggggccatgggacccagagttctcagcagtccctctcagccccactccctgggctcaggggtgtggggcctggctgcaatacccgggagattgctgacaaactgattgagctcaaggcagagatcgaggagctgcagcagcgggagcaagaactagaccagcacaaggtgtgggtgcagcagagcatccggaacgtcacagaggacgtgcagaacagctgatatcctcctggcggtccctgctggggggagtgggcaaggggccctctggttcaacttgccctgagtcctgttcctcttgggagtttgtcttatagccactggccatggcccagcctcaggctccctcctcagagcccctccccttccactcttagcctgtgatc

SEQ ID NO: 63550 - DNA, 460 bp, Homo sapiens
gtggttctttggggaccctccttgggactgtgctggactggcagtgtgattgggtgggtcaccttgctggaactaggggtggggcggcctccggcagcctgccctccccgcccccacctgccgcaccttggtgtggggcggggccgcctcggcggggcggggcaggcggagccgtcctaccttcctacccccagactccaacccggaactaacctcggctcccttgggaaggccgcgttgcatggccaggagcagcagtctgggccgcgagtgcgggacaccgaggtcaggtctcggaaagggaggacctcctcgtccccaggggccccaggccaggtgcacccttggccgcaggtgcacggtctccggaaagtgcaggcgcccacgtcccagctggaccatggcgcctccgcggaacgtggtgaagattgccatcaagatgcgtgacgccatcccgcag

SEQ ID NO: 63551 - DNA, 1743 bp, Homo sapiens
gctaaggacaggagcatcattccaggaccgatgggaaagggtggcctgtttcccatgggcagagagagggggctgccaaccctcaggacaaaagagatggagaagccattccaacaggccactgaagacaaaacctgttatctccctggcagatggggcagagtggtcttgcccctggctaaggggaaggagcaaacatcccacggagtgaaagaggtaagggcggccatcactaggggcctaggaatggggaacaggcctatccttgttaaaggaactcagagatcattgcagttgatggggagggagcagtctgtttcccactgccagggagaaggggcggccgtctctgtaggaaatggagagatcatcccaagggaccaatggggataagatcagttacccttcgggacgatgagatggagcggacatcttccagaactgagcggggaggagacagccacttcaagggaaggggatgggcagagggcctgttctcgcggagatgacagggcagctatcttctggggccgatagggaaggggaggacggtcccccaagctaaagggacagagtggcccaaaggaggaaccgttacccagagctagaaggtcccgggatcgggagggcgggtcgtttccgccaggctggaggggccgggctagctatctgacagcccctccccaaagctcaggaccgcgagggcggggcctgtccagagctaggcctgagggcggcttcctctcacctccaggggcagcgactccgccatcgcatccctgccgcctccgcccccactgcgcaaggctttctgggaaatgtagtctcgcctctttggggcggggcttgggaaggaagtgagacctatttccgtcgcaaaagctgacgacttcggtctgcgccggaagtgcatgagctgccgatgtggtgcttagtgattgcggtttcggtcgctctcccgtgtttcccgggctgggtatttgcctcgcaccatggcggtaaggaggatggatagggcggggtccgcaccagcaaagctctccaggggctgtgagagtgaaaactgagaaagaacattaagggatatggggtgggccagagcggggcgccatccctggccagaccgtgctagagctgggctggggggatggcggcgcaggaccataccaggactagtgccagagcggggtgggcatcagtaccagggcaggccagagatctaagtgacctgaggtgggggttaacccagatcgggactacgccagcggaggcctgagagaggcaccattcaactccgctcaggagtacccttggaagagtcgttagcctaaagccagactaccacgggatccagaggcggtattagcttaggattgaattgttccagggcgagcaagaggcgattgatcctagctgcgggtgctggagagatggcgtcagccctaggcagaatggactggaggatgggtggacatcccagggattttgctaggtttctgcactacggggacctggctgagttgcggatggagctctatagctcaccaggctggtggggagaatgaggaggaccgtggcctcctgacggcatctcatcattcctctgcagcccaagggcaaagtgggcacgagagggaagaagcagatatttgaagagaacagagagactctgaagttctacctgcggatcatactgggggccaatgtaagtgcctacctccttgcttctatgcccacttatag

SEQ ID NO: 63552 - DNA, 1051 bp, Homo sapiens
caagagcgaaactccgtctcaaagaaaaaactaaaactcttcccatggtttccttttaaaacagaccctccatgaccaacccctccatttcaataccagagagcctaacccgacctgaaatcactttagtcatgtatgacatccgcttcccagcccccttccttaatgctctgggttctggagacagaccacgtctgttgggagtcctctgtgcccacgcctggcacagagcctggcaaagagtaagcgctcaaggaagatctgtgaacttgatgcatgctaaaaggaagccccgcgctctgccggggccctggaactcaggccaccggctccaggcggaagcgagcccaaagccggccaggcggcagcatccgctaccccgtggctcaagccaggctccgaggtgagaaaccgggcggggactcctcacctgcgcgccgcggaggccgtgccagatgggccctgccaaagtcagccagaggttcgggccccacgcctggccttccaccctccccggggcagccgcgcctcagaccctcgcggtagggacggtccccgggactgggcggcaacgcgcccgggagcggggccccatcccggacggagactgggccggtgagtcctcgagctctggctctggctccggctccggctccggctccggctccggctccggctccagcaggctggaggggcggccaggccagacccagactggctgggcctcgtccggcgctgggcccgttcccctgacaacggcgcgggctacggcgccccacagcggccaaaccgcgctgcgtcactccgcgccggtcccccggccagggcggggcttgccagggaccctcttggtgccccagtcggcccattcccagattcttcctaacctttcgtctagaaaatccgcttttccctactcccgagtcacagcttgtctccccgaaatcctaacatctcaaaagcgcccccttccagtttctatcctgagaccaccgctctcaagaagagacctcccccaaccccagtcaacctgcacacttcaatgagcgta

SEQ ID NO: 63553 - DNA, 1984 bp, Homo sapiens
cacacgcaggcagaaaaatccacccacactcataccacttattttaccccctgggggttcaggggagcaaggcagggaccaccctgtcctagaggctgccttcaccgacgtccctctggcctggctcttggggttggcgggggtgggccataagtaatgggagacctaggtgcttcctctgacaccccaccctccactgacccccacacacatacatttgtgaggcaggaagtggggttgtgcgtccccaggtttaagccctggaaggaaagggaaagacggggcagagactccaagaaccgggagcggtcgtcctgttcccccgccagcccctgtcccaggcaggttttgtggccgcgagctgctcaggggtgagcgcgccttagggtgtgtgcgccagggacctggcgcagccgaccacgtgggagtgcggcgcgtgtacgggcgcgggcggcagcggcagcggcagcggagaccgggtgagcaccggctggttcctcgcggtgttcctgcaggcttggcggccgcggtggtgcgatcagcaaagggcaccgggatgccggttgtgcgtgtcctcaggtgtcccgaacaagcgtgagtggcatgtgctcacctgagcgcggcggcttggcggccccgggcgtgtgggtgggggcgcggcggagagctgaggccgggcacccgggctggaccgacgggccctctcccaagcaccgcccgcagccaggcggctcctcgagcgcagcaactttgggactttgttccggctttttccaaatcgaatctggtcgagggggcggggcggggggggagcacctgccctgcggggggtgccgggagagaagtgaaggaaagccccgcccccgcccctcccgctccccgccctctcccccgcccccggggctcttcataagctcggcccgagggcgagcagagaaagcgagtgtccctctcgcgccccaggccggtgtacccccgcactccgcgccccggcctagaagctctctctccccgctccccggcccggcccccgccccgccccgccccagcccgctgggccgccatggagcgctggccttggccgtcgggcggcgcctggctgctcgtggctgcccgcgcgctgctgcagctgctgcgctcagacctgcgtctgggccgcccgctgctggcggcgctggcgctgctggccgcgctcgactggctgtgccagcgcctgctgcccccgccggccgcactcgccgtgctggccgccgccggctggatcgcgttgtcccgcctggcgcgcccgcagcgcctgccggtggccactcgcgcggtgctcatcaccggtgagtgcgcgggtcgcggagcgcggggactccaggctcgagggcgggactggacactcaacaggactgactccccatgggcacagccaaggcgggctcctcagcgcaagagtgggagagttctccacccctgggtgcagggagcgagccaaatagggagcgccgggcacctccccaagcccgggttcactacctgccgctgcggggagtgttggagggaaagtgagacagggagtgggccggttcgagaaggaaactgactggtggctgagaagagggaacctcctggagtttgagagtttatgccattcccttccccaagagagcagtctcaggggacttcggaggccttgagaagggaggatcgttaccccttgaactctgcctgacatccccacctaagatacccatctcccattcctcgggccagagggaagagcttagatggggaacttccccaccccacccatcccccactggctgggatccttggagttcagaaaagctagaggtcaccgtgaggggcagctggacattcagctgtctttctgtctagccacccactgccaaactgctgaggcagtagtttggagcctacacccagcaccccacccccaagccctcctggtcctctgtgcccaggaaggagctcttag

SEQ ID NO: 63554 - DNA, 604 bp, Homo sapiens
gagggtgttgcggatgatctcgatgttcatctcgtcaaggtcctgctctgaaatgcagtcctggaaaaaagccgctggggaggaaacatggtttgaggggtgggcaggtggcctaggccagaatcctgatgttcaaatgccctacacggcacagagtgcccgtgccacaaggcccacagggctgggtattgaggggtccccagcctaggctgttgccttggaagtggcagaagcaatgctctgggccatgtacactgacctgagcttctcctgcctccttgctcctaaaattgatttataaaggaggcagctagccataacatgatctaatcaccgctggggcagacccaagctcagaccatgccaaagacaggcttgcataagaggccatgacatcctcccttctggaggggcagctgtggattcggggcctaacgcctacttctctacacctcccaggaaggcctggcgtccacatttggaaaaccagcctcctccttaggacaagtccaacagcagggtaggcacagaccagcgacccagggggccactgtggggttggaaagagaggccagagcaggatagagcacccccatcccccaag

SEQ ID NO: 63555 - DNA, 1251 bp, Homo sapiens
aagaggaagaggcagagatagcgacaggaggaaaggctgaggagtggagtggagagaagcttctccagggaaggccagcaaggagccagtgggggttctctggaatgaaggcccaggtcaggcagacctgcacagcctatgccagagatagagaactgtcctcttcttttagggcctgaggccagggctgggcattcacccaggacggcctggataagacccagagacctgaacaggaggctgggtcaggtcgatcccaggccgaggctcccatcactctgccctgcagaaggccagctctgtggggtacatgggcagcagagggggctgtggagctggggaggggtgagactgcccagttcagacttggcaagggacaaggctctgcctccaaccagctacaaaggggctggggcagagagttctgtgtagtcacctgtgtggggatgcagtgaaggcagtaagccccattccacagttaggctgcagtagccacaactatcctccagtctgtcaccaaagatgaactcagggtatgagggagctaaatgaggcctaggggaaattcctccaaggtcaaggtgaggcacctatgggataaaagttggggtggaggctgctgttctgagctgggcactgaacacgggtcttgtcctagcttctgagtgggccagagctaggcccctgccctgtgacaggaccttgtgcaactagtgctcaggctgtccagagaagaccttggtaggaggtgtcttcccccatactgaagaaagaaaggaggggaggtggcagcccagggcccaggccacggctcaaagcactggccactgggggagctcccacagggccctctagaaaggcggcaggaggaaaaggccccagctcctgtcctggcctgacccccactccccctgcttgctctgcactcccccagctcccacccagcctggcgccctgcgaagacctttgctctcctgggcctggagccaggcaactgccctctctccacccccaatctggctgggtcagctacaggatgtgcactgagaagagacagtcccctaactcccaaccataactgagagccttaagcagggcccacttgcagctgcaagccaagaggcccaaatgggcagcctcctgcccccaaccccacagtgctggcagagtgagggacctcagagctcgccagagctttgggccatggtctgcagctccagcctgcatattttctaccccggacagcacaca

SEQ ID NO: 63556 - DNA, 475 bp, Homo sapiens
tgacaatgtataccccttggagagtctacaccaagtcatccttctaccaactttttggaattaaaaaattatatttagtcaaaaagaaaacaagaaaacaaaaaaccaccatgccccagcatcatgcaggaagagacacggcaggaatctggagggagagcccagctgtccctctctctgctccgcttgccaaactgggctccatgccaggtgtcctcgttaggccacacttgtgtccacttggcccacagttaaggctgctctctagcctcctggcaggacttgtgggcagagctaggcttccaaggcaggcttgcccggctatgagccaacagatggcctggcgcgggcctaactgccaccagccagtgtactggtgacttccaggttaatatctttagtgttactatctcacacagccaactgcctgccggactccctcagacatctgagatagaatacttcccctcccacc

SEQ ID NO: 63557 - DNA, 1931 bp, Homo sapiens
aattagccgggcgtagtggcgggcgcctgtagtcccagctacttgggaggctgaggcaggagaatggcgtgaacccgggaggcggagcttgcagtgagccgagatcccgccactgcactccagcctgggcgacagagcgagactccgtctcaaaaaaaaaaaaaaaaaaaaaaagaagtcaacgccactctggagctgtgtgctgagaagaaaggggaactcggtttctcattactcttgtgctcagaaaccctgtcccaacaggcatccccctcgctgagggggtgggattaattggccaaatacttgtatatgaacttccagacctgcaagggccacccttgttctcccaaacattgccttcaggagatactgcccagccagcagttcagagttgggagaaaaccctcgataaactggctcagcaattccccaggaaggctcaccccgcaggccaacgcgaagacacgatgatcccaaagaccttagtgtcttggcggggggagggggaagaggtgggggacttttccgcttagcttccctaagggttgctacgcgacagctctcgggctacgtcagggtaaagaggtttgtatggccacacctcgcaccgaccaactacccccgaaacaccccctcctcccaaactgcagggtgagcacagcgagagaaaaggtggcccaagcagaggcgaacaactgcggttcttaaagccttgtttgagtttgggcccgcgccgagccacagctagaggtagatcccgctcctgcgcgtccgctatcagccccaggattcccagagaggcctctcaggcccttcaagacccccccttccggcttcccggcctacacctctgaaccctcaggccccggacagcctctatccccgcctttcgcggccccggctcaccctctagcgtctcgcactgcaccaggttgaggtagtcggcctggctgagcaccccggccttcaggccgcgcaccagtccctccaagtagccattgtccacgttaaagtaaagctccgggaagaacgacatggctgctgcgggagcggcgggaccggagaaccaggaccggccggcacgaatcgcgactccccaggtcagctgacgctgcgtcctcagcgggctgtcaagtgcgtcaggtgacgcgcaagcgcctcacgtgaccataagggggcgtggctctgagcggtgcccggcttccgggtggctgcgcggaagcgcggtgcaggcgtgggctggccctgcggcgcctgcgcgctaaaaagaggaagtttgaggccggccgcttggtggcgcctgtggccgcagggatttgactgggccttctctagctttccccggtttgctgcacttgacgctgcagggcgggcggggtaaagaagggagcgagcccttctcaagcttggaaagtttccagactgctgggccagcctcctccccagagggaaactgaggtccgattgaggtaggagaatagggtctggaggcggggaacttgaggccaatacgtgctgaattctgaagctgaatcaagggaaaacaccaaggtctgggggcagggaaccggaggccaactaaggcgagcttactaaagctaaaccaaaaagaaaaaccccatctccccatgtccaagtaacaaaggatcaaaggccactgtccccacaaccctcccccttccaccacgtctcagttgaaagggagagtgccttggattggctgcgggccaagcacgggccatcccttcatctgcatagggcgccaattcaccttagccccatttatgccttgtgttccattattggaacgctaagcatatgggagttatttatatcctactgctcaaggtcatggccaaggtctgattgcaaaaattcaaaaagattgcaacctcaggcataaatggattaattagccatggaccaaa

SEQ ID NO: 63558 - DNA, 909 bp, Homo sapiens
aggactgagaagtggagggacagggagcatttctccctcttgaagaggctttggcatatggagggggttttaatggtagtggtggggttcccaggatccgtgatcaggtctgagtgtcagcagagctgtcacacagaaccgaacaggttgtgcactgcactctacagtgactgttcttgaatccaggactggccgccaggggcacccccttgagctggcggtattttgccaagtccgtaactgcagtgtagacacttcccagacggtggcgccaaagaccaactttacttcttaggagcagagtcgggttccgcctggggattctcagccccaggtcgtcatccgatgggacgggggaatttccagatgcctggtggccgggtctctcctaccaccacaccctccaaatctctgtcagagcagttcacctagcgttagcaactcacagaaataaactatgcaccacacactgcagccttcctttgtcagggggcctgggctgaaagggtcccaggggagcagttcatcccatgagctgggagaggcgaagacgtccctcccacttgtcccttaggagaaaggagtcaggaaggaaggaaggacgcccagcccagaccgcgagacacacagtcaatcgccccaccccttgcccaaaccagcagagcaccgcccagctcacagctccccctggaggccgaggctggactagcggggacaatgacagcgacactggccagcctcaggcggtgtccccagggaagcgattgccaagcctagaaatttacacctcctcagtgcagaggccagcctggagatggcccaataagtaatggccatgttgcttttgaaaacgatgccatgttgattgcaaaccattatttgtatgaataaatacaaagaagaaaataa

SEQ ID NO: 63559 - DNA, 3714 bp, Homo sapiens
ggcactacaaaggaagcccaagaggaggggctggagagtggagaactgtgaggcagaggtggctcaagcctgtaatcccagtactttgggaggccaaggtgggaggatcgcttgagcccagttagagaccagtctgagcaacatgaagaaagcccatctctaaaaaaccgaccaaacaggctgggcgcggtggctcatgcctgtaatcccagcactttgggaggccaaggcgggcagatcacgaggtcaggagatcgagaccatcctggctaacatggtgaaaccccatctctaccaaaaatacaaaaaattagccgggcgtggtgtgggcgcctgtagtcccagctactcgggaggctgaggcaggagaatggcatgaacctgggaggtggagcttgcactgcattccagcctgggcgacagtgacactctgtctcaaaaaaaaaaaaaaaaaacccgaccaaacaaaaccaagcaaacaagcaaaacacacaaaaaaacagccctcaggactggtgggggcggggtacagatattcagggacctcttactgtccctgaaaccattcctgggtaggtctgacatacatgagggctgcgggagtgcaaggcctggagaagcctcaggggtgtccaggttggaagggccaggggtgtctgattgatgggaggagcgggggagtggaactggccctttgaccccaacatggggtcgactctcagccccacctttaccgactgtgtggagggccagcattctagccccggctttggaaaggactgggttgcccaacacatggccctgtacccggaccctgccagcgtccccaccccaagactgcccgaaaaccagtacccaatgagtggggaatgcatgacccggctatgagcctggacttaccagccagacagtggcagaaagggcggcctgcctctacagcgacgctgaggctggctgaaatggcagggctgaagggcagcgtctggacccagaaggtgccaggcggcttctggactccccaaggccttcacaacagccctggatcctttccaccaaccagcctaagccagcagtagcagctccaggacctgtttcaggtggtcacggacagggggcccgcaaggtctccagagcccgagggatctggggaggggacaagcaggcggggctccctggcgctcaccgttttagggtctgcgtgagaaagcctccctcacatcccccagggtctgccctccctgcaagctggtgggctgcgtgggccaccggcctgccccgttatccgagagggcggagcgagccgtgggcgcctctaggggtgcgggagccgcgggagcgcagggggtggggcccggcgggccaggggaggggcggcggggcggcgggcggagggaggggccggcgcctgcggcggcgacagcggcagctgcggcgcgaccaggccgggcacctccgagcgcaaggacagcgcgaggtccgcgcagcccagcgcagccatgtgagtgtcccgcgccgtttccggggctgcaggccgggcggggagcaggcgcggaggttctggtgcccccccgccggcgccgcccggtgggtccgggatctgcggctctgtcccgcctcaccccatctcccggaccccggccgcgccttgtctttcctcccctccccccgggcgtggagaacgcagcttctcccacaaaagccgccgcctccgggcctgcagagcctggcgctgctgccttcctcccacggcaaggccctggcggccggtgccccggggcgctgggatgggccaggccagagagcgggctcaaggcgccagcctgggccctggcacgcgcgctccctgggagcccttgctgccttcgccgcaggggaggctgggctggaaatggggagggggcgacgaagggtgcgggccggcctaggagctgagctaatcctcctagctctaggggccggcctaagcggctttgtggccggccccgaggtgaccgagcctgggctggagccgggctctccgcccaaacctggcgtagccgaagccggagaggatcgtccttgtcggggaacggagcttttccctggaaatggaggttggcgcaaggttcctgcaacagccgggcctgggctctctgcagaactggtttgggcaaggggctgctcaccagggctagaggtcggattcagtccagattcagcaccctttgtcctcctctccagggtgagccctgagtccggcctcccctacagaccctccccagccagttctaacgtgtgtccaggctggccgccccagcacctactgtgcgcagcctcgtgtaacaatacttgtgccctggctgcagtctgcggggccgcgccctgggcctgccgcattcggccaacgcacagcatctgaggagggttatgaccatctggcagatgcagaaacaggcccagagaggttagtagtattctcaaggtcacacagctggtttgggagaagcgaggattagatctgagtccttgcccctgcgacacccacctccgtggtattggagggaggagaggaatgataattgggggctgaggtacaaaatactccagcgggacaaggaggactggcatagctccttcttccaccgccctctccggcttgggtcctgtgactgcggcgggagagaggagcaaggtgagccgccccaggggtctgggtttgggtgcgggtgaggggaggactcaggactctgggctgggtcccgcttgagagaagcgggcggggagggcgcgggtgagtcacggcggcccctctgcgtcgccgctcggactcagccctggccaggcccggcccgggggaggccgcctggctcccagcgcgcggccagggaatgtaaccagctgaccagggagggggccggcaggaagtgaggccacccgacagcctccgcccggttccggggtggggggtccggggctgtgccgctccccctccctcctatacgcttgggcagctgcgagatgacgtcagccgccgggtttgggggcagttgccatggagacaaggacaggctcagaagggacccccttctcccttgcagccgccccttgcccaggttatttttagcctctgtttacctcggtcggggcggccccggggtggggcggggctagacccggggactcccagagaggcagctggcctggcacagtgctgagatgggcagcccaggtggtgggatattccgccgcacccgggtgtgccagtcttggtgtgtaggaagtatagcggggctgcaagatctggggccatgcggacaggtcagggctcctccactcacggccatcctgacctggctgtgctgcaagccccataacctttggaaccttggatctgggttatttcccatcctgggaacagactatagggctgacatgagcccagagagtcccctggttcttatcagccagtcccccaccagttgaggtggcccttctgccttagctcaaggggttcagctctttccctacctgctctcacccagcaagggcaatcttgcccgcccatctcccgaagcggtcactcagatggacattatgatggtcatttgtaccaacagttagacatcctagttcctatgggactcgggggatggtggcagcagagggccaaccagagagagaaaagtgatggaacagtcagcggtttccaagtccagaatcccaggggatccccac

SEQ ID NO: 63560 - DNA, 1619 bp, Homo sapiens
gacctcgtgatccgcccgcctcggcctcccaaagtgctgagattacaggcgtgagccactgtgcccggcctcaatagcgactctttaagccccctactctaatgtctgatacttcctccacttagcgtctccattctatcccttcatattcatccccatgctcaaatccctttacgcacattgctgaccccagctgagcagacccctcgccccccgtcggtcccctccccgaggggaaccccagtcaccggtcccgccccatccaggcgggctgagtcaggcggcaggaactgggcggggggcggcgccgggaggagccgaagccgagccagagccgctgggagcgagcccggagcccagccgggcggctcgaagtggccagggccggaaggtccgcggggggcgagcgcgggtcgggggccgtcccggacccaccatgaacaccaagaagagaggtaggacccagctcggggctgcgaaagctcagggactggccccaggggaagcaggccgggtttgggggccaggagtgtgtgtttcgccgaagcggggtgggggtctgccgaggagctctccccgccgatgccggggtggaggcgcacgtccgtgactcagtttccaggtgggagcctcaggaaagaggagggggcggggcccttctcggcatcgcgcccagctctgggaatccccctgcctggagggcgccgggacgcccgggccggtgggggctgggggcagcaggtcacgctggcaggcggggggcgggcgacaaacccgcaccggctgggcctgtcgggcagctccgcagggctccgagcgtggccccgccccgccccgtgacctccttgggctcccggggtggggggccccgagctccgggtgccctggggggggaaatcgggggcagggctggggaggctgccccgcccccgggtaaacaggcgcttccgcacattcttcgcgcgcgccgcccctttcctgccccttcccagccggaggagggtccccgcgcgaccccccttcctgccccgcggcaggcggagcccgcacctcggcaggaagtgggggccgagccgaggccacgctgagtccgaggccgagtcgcctgcggctgtcctgtcattagtgcccgggtcggcgggactaggcggacccggccggagcccgctggggcagctgtgcctagcgacaggaaagacctgcgccagccctggatcccgctgcgtgggagagggcttcggggatccgactggtactggacacccccccgatcacccgcagggagccccgcgcggactcactctatgatgtccctgtcggtgcggccgcagcgccgtctgctcagcgcccgggtcaataggagccagtccttcgcaggcgtcctcggcagccacgagcgggggcccaggtacgcggccgcgcagggttggtggggtcaaagggcgtcagatggggctgggtctgggggtgcgtagtgagagtctgggggactcctgctctcctctttctgaggacagcctctccttcaggagtttcccggtcttcagcccgccggggcccccacggaagccccccgcgctctcccgagtgtccaggatgttttccgtggctcacccagc

SEQ ID NO: 63561 - DNA, 761 bp, Homo sapiens
aatcagtgtctggggcttggccaccctgccgctgcccagccacatcccttggttttgtattttatttacagagttttacagaaaataaaaaagcaaaatgtctttcctacatggcctggtacactcctgaccctctgctccaacaccctctggctgtggccctgcctgacactggtgtgttcacactgcagctgtgacagtgccatgtgcacttgccctggaaattcaggtggaagaaagcccagaggctggaactgggcttggagaagagagcaggggaaaagggtggttcagcctgcaggtggggcctaccctgggcctgggaactacggcccaaggtggagctaaactggagttggcccagaaaacaccaaagggtgccaatcccaggctgtggcctgggagcaaaggggaagggaaaggaaaaacaggaagggaaaggaggcacggggtggctggagcttctgcccaccagggggcagcagatccgcgtcagcagatgccaggtttgggtcttctgcagcctgggcagctttctgcagagggggctgaaggagctccttgaagctggatggcaggggagaggagctccttgcggaggggaagagctgggacctgggaggcaggagacctggatggctaacctgtgacccaagacagcaagtcccttccctctccagctgtctccccctctataataacaaacgtgcctgaactctgtgatccccaacagccggccaacctgtgctgcttcaggaagc

SEQ ID NO: 63562 - DNA, 2895 bp, Homo sapiens
ttaatcagctcatgaagtttaaaaacatctgattcagttgctaacatctaaaaactctggagatttgacatcttaaaaatacagatttttttattcctttaggggaaaaaaaaagagtatgttattgggccagcattctcacaacggaacggtcagatggatggagaagaagctgctccctagatattgggtccatttgatatctaagggaagagtcatattccctgtaagtaccaaaaggctctcatcccagagccaccagcaccttgcagtcagttcttggtcaacttgactgcaggttgggaagggtccgcaggcgcctcctggggaggggtgggactgaaggtctccgcccacagagaacagctctcccgcaaagacaagaaatgcacgtttccacagaattacacagcgctaaatacagaaactcctttcagtaaaaagcgattgctatgaacgtgttaaagcatcaagtctggttttccgccacctctccgggctgaggtggcctggggacaccaagaggaggccctcccactctcctctcgcacccgcttttaggtggccctcttctagggcggagagatcaccaaaagccgctgagcaaggacagcccttccagtcgtcgctcgcgggcacggagctgggagcgcgcgggaaccgaccgggccttactctggggcgggcagctgtaagacattcggagggcgggtcgggcctggctggggcggagactgggcggggccgggcccgggagcctcctcagccccactggcttgccccgcgcgcgcttcctccagccacccccacttccccaaccctgtacgggttcagggggccggagacagcagctagggaataaggtcaagcggactggatccggcaccgcccaggggcggcggcctccgcccaggaagccccacccagcgggagccaggacgccgcggcgccggcagagcccacgagcgacccggcgagggcgcgtgcggcgtgacgacgcgactcgcggcgcgtcccgtgacgccatcgcgcccgcttttgaaagttggcgcccggggccgcctcccatgctgccctgcgccaacccctcccctcacctttcctcccccgccctctactcgccgcccggccggtccccccacccgtcccttcccttatcagcacccgcggccccggcagcgccgacgcaggcgcactgcaccgcgccgccgccattttgtgtctgagcctgtggagcgattaaaccgtgcgcggagctgcttctttggcggcagcggcggcggcggtggccggtgcggacgcgcggagctcgccggagacgccgggtggccggagccgtggagcggcggcggagcgggcgccgcggggggtgtggcgcggaggtaagggggcccggggtggaggaggtttcgcgggccgcctctaggtgtcacgatggggccgctccggtcggcgctggctgcagcccggcgccagcgccgccgccggggggtgtttgtctccctctaccgtccctgctgcggcgcggccgccgccattgcccgtcgccgccgtggcccggccgccccccccacccccacgcccgcccgcccgcccgcccgctaggcctccctcctggcagcgcgctaggcctcgggcggcggcagaggcagaggcccgcgcgcccggcgactccattttccttcctttgtctgccctcgaggccggttcttggccggccgatcgcccggccgcggcccgccctctgtcctgtgtcctccgcccctcccgcggcgggtggccccagctgagacactatctccgcgtcccggcttcggcgcccgcctagcttaagggttcggaccgactgccgccgcgcgctaagccaggtcccggtgccgtatgggtgtcgggccctggccgtcgcgtctcgggctgcccctcctccagccagccccgtccccggaacctaccctgccggcctgcgtgccttcccagctgcttggctgctcggcggtcgctcccagtccgcgcgtcgccgccgctggtctccgtctccgccgagtggcgcaggcggcgctgcagcggctgcgagcagagggaccccagagctgccgagagctccctctgcaaggctggctgagctgctcgcacctctacgctgcctgagcgggcggggggacgcgcgctcgccgcccccgctgcgcccccaaactcgcgcccgggttcctggccggacccgaccggtgcggcccccccacggtgggcggaaaagatgcgagttccgcaccaagtagtttttatccagccgggttcggactccccagccgagtgatagcagcctgactttgtgcgctcagagatctcaaagggactgaaacttaaatttcattctgatctcaagtgacgtgacaaatttctgaatttgggagtatgggctaagtcccttgagtttccctcccgctttaaaatgtcctcacactaacttagtacctgatgctctagggctaggtgaaggcggttctgccccaggattgtgcaactcgatctagagcgccagtagggcagaatgagtttattcttgactcgactggtaatttgcccatgcgatgaaatatgagggttgatgttgtaattgaatcctgggtcacttgctgcagatggtttataaatatctacgcctaatgtaactactgtttagtaggagacttcctgtagccccgagttcagcgttaagtaaacattcgcatacgtagtcttcatactttgagtttcgatcaactaggaaagttaaaaaccaagtcctcataggtgggaaaggaagttaaacaaggcatatatttaaatttattcggtccttaagttttctttcttcactaaaaagcatcccgttgaattgcgggagtcttttgcttt

SEQ ID NO: 63563 - DNA, 1038 bp, Homo sapiens
aaaaaagtttaaaagtggatttgttttagctggagagggggcaagagaattgacatcctgatggagttaaggctgaaaagggatcctcctgctgcatagcccaggatgcatcctgtctgtcccttaattataaaacattcagcagcagaagccagttgtgttactgcttctgttgacagggaagttcctgaacctgcatgcagctccctcagtgttaagccacagaagtaaagaacctttgcccctttcacccctaggctggcatcaccctattgctgcccagctcagcaagtacctgaacccttctctgacttgtcaggacctggtctttgaaaatcatctgtggtgagccttatggcagcaccaagggggcatagcccggcccacctgggaggcaagtctcgccctcagcctgtgctacccagagcaggcgaggctgatgctctcgggagctttgacatttcctgaatgcccatggagtggcatgccatccagaacacagacgggcttgaacaagctgacagcttctcactgagtcactgtcacttgtaagaaccgagtcccatgtgttcacttggtctctgagatcaggtttgctgtgttactacctccctgaccaccatcagccacgtggctagccctgcaagcctgtccagatctcttagttgtccctgcctgcccccatgtgctcacacacacagggactggccccactggcatcgctgcagcctccagaggccctccacctgggcatggctccagcccttttggcagtcactctcatttctctctcctccttgtcattctaaacagaaaaatcccagtgaggtggattttctgccattctgttttggaatccctgggttgtcatggtagacttggcaaatgtgagtgttatctgagtgccaggcactgttgcgggcacttcccttaataaacattgaatcctttgagcaaggcttgaggttagttaatagctccggcttacaaacaaaactggaagaccagaaaggctaagcaatgtgttcagtgtcaaaa

SEQ ID NO: 63564 - DNA, 1565 bp, Homo sapiens
gtggggagagctgctggagggcggaggcatcacttaccaaccaggcacccgtagccggggctgctccgtgggcagcaggctgaagcggtccacctggagatagaactctgcgggctggaggagttcggggggaagggggggtctcagaatcgtcacgaagagtcatgcccggtaacccgcccaaggcagtctcaccactcaccgcgccgccctcagcgacctggacatgaaccccgcagtcctgcagcagcagcagccggccctctgtcccgcggaagccgaactccttctcctccctgcaacaagcaggatcctcactgccgggcccacctgaacacaaggcccgcccacctcgcgctctcctgccggactccgacctccagagccgcgcggggcctctcaccagtccgaggtgtccagggcctcccgcgtcaccaggcatcggacactgtgggtcccgtcagacacaagcagcgtggccccgacgtcggacgtatcaggggcgtgggatgggcccgcgaccgcggcctcggcgtcctgtagtacctgacggcggcgagcggcgtcaatcccaccaccccgggcctccgcctcggtctccgggccctgaatgggggctcacctcaagcagctgcccggctcgtggactggagggtgtctctgaccccagaatcagctcccgaatccagggccgtaggaccagcctccccgaacctgccatccccacggctacacccagcggatgcaacgggcccgggtttcccgcgggcgcccaggccccgcctttcctcggaagaggaagctccttcgctgggcggggccggaggaggaggccccgcccacgtacaccccgcgcctgcgcacgagggcgtcctgctcgggggcctgtgtgcagactcccgctggtccaccccgctggtgcacgggatgctggcccgtttactctcatcgcggcgtcactctgacagcggccaggcatttgggccgttcgtcaagattcctgtggtaccggtagggaacagaacaagggctggtcccgtccctggagagggttccagggccggaggctgaggccgagtgccgtccgagcgagttgactcgaaaccatttcagcaccgtgtgacccccgaacggttcagcacatatttattatgactcagtttcctcatctacacagtgcacggtcttgtaaggccagtggaaataagagcacacacacagcgctaaataaatggtacttccttcgccctcccctcggattggcggagccctgctccccagactccgggggcgcgcggacctcagcgtgatgacgcaagagcggaggacggctcctctccatccacggctccgtttcctaggaaacgtggactccgcgttccactctgcgtcgctgcccccttgacgtcacgctccggatgggaaggcggggcgtgtgctaccgccaggggcggggcggcgcgggcgggccggccgggctgtgcacctgcgcctcggcgggccgcctggggcaccgtccccggcccgcccggccccgccatggcccggccgcagaggactccggc

SEQ ID NO: 63565 - DNA, 2158 bp, Homo sapiens
ctgagactcaagagatgcaaagcctgggcccacgtcagggtggaaagagcagctgcttttgatctctttccaccccgcactgcctctctgtcccttcttccattcctgggacttactcttgagagaggccccaggacctagggagatcccctcgagttgcaacagcacgtccccgacgccgcgctggccgcgctccaggatctctccggcaccgggaccgatgcaggggccacggggagcggtggtgtccagggcccggtcggaagtcagcaagtccagcttcagcgcgtttccctcgaggcgcccttgagctgtggggcggagccgggcggagtccggggctcagaggtggagccagggccgacccctgagcctcgcaccaccgccaagcccccggactcacccgaggtcggccgcctgtagttgtcaggacagagcgtcgggtctggggggatgggccccgagatgcgggacgggccctcgcacatgccgccggcgccgcccagcaacggtgccccgaggcctgcagggctgtttacctccctccccgggcccccttccccaaccccgggccccctccctcgcccggcaccctgaccctggcgtgcccgccactcccgggcccctgccggtccccgcctgggccccggcctcgctcgccacctccgcgacctctgctcccagcccacttctcggtcccgctcgcggcctctcccccgcggcactcgggcaggggctcactcgagaggttttgccgccagccgctgccacccgacgggacttgttgttgccgggcaaccgtggcttccgtccccggggtcagggcccactgaccccggcgcaaagcgtcctggggcttgtagtttcggccgagggtgggctccgcggtcgccggtttctcttcccagctctgccctcgcttgctggccggtctccggggtcagcgcggggccaccatccagccccttggggcccgccccaagcagctgtcgaggacgcactcagcctgcgcagccatggcctcggcaggggcggagaggcggccgggggtccaggaggcgacggtcgtggggcagggacagctcacggaggagcccggcagcgctcagacctccgaggtgaccgtcaggctgtttaaccttcaaacacagggccgcagcgctctgagaggtggaactgagcgccccgacccgctaactgccaggctgggccctccaggcggggaggggcacaggctggtgtccttattcccgtttcggtgtctaacgttaggtgttcagtgacggatccctatgtcctttgcccggccatggtgaccgatggcctgtgtgtcatctctagtgtccagtggcgggagaccagttcctggtgcctgcccatgaggcccgcggaacccagagtgaagaccagcgcccagcaggcgcagcttcggagtcggagctccaggaggaaggacccaagctgggggaggagcggcccaagccgcatgccggggcgctagaggagagaggccccaggcccgtggtctccattgtgaggccccgtcatggtccaaagagaaagcctgtcaagtgagggggctctcggggggaaggagctgcagccccggggttggggcacacaccacagtaggattcctaaatcctgcactcctgcagggaggattctcgtccccagccactaccatcactctcctcccgttcctcaagagcccccgtgtagggagcagcaggagagtgggagcttcagggcttgtaggggcctgggctcactggcctctaagcctcttgggcctggggtctcattgaccaggaacgggacaggcgtcgagccctggggctgtgggcaggctgggctattccctgggccagggaatgggagccagggctggagcctggctcaagtctcttgtccctggctcaggtctctcagcctcccgggccttcgtgcccatcttaaggctgaagctgagctgccacccaagctgccgctgcaggaggaggagccagaggacagccagagtgagccctcaccatctgccaaacagcacaaaaaagccaagaagcgcaagagcctgggggctcccgtgctccacgctgtggccagcatggtgtctgcacccttagagacattgaggctggagcgtgagtggcagtcc

SEQ ID NO: 63566 - DNA, 2947 bp, Homo sapiens
gaaaaggagagggagagagggagggagggagggatggagggacatgcaacctcagctcaactgaggaccaaggctgtggaaccacaggttgggaggtggctactttgctgaagtcagaagtggtgaccgggcagtcctccagctgactcctgagagagagaggtggtgccttccaggcagaggacatgccagggacaaagccctgctagtatggaagctgccacctctgcaggagggctcttagtgtggctggagaggagggcatggccatatggaaaccaggttggtcaagtccgggggtgaggaggaagggtgtggatagggagggatcttggcgtgacattcaggagaggctgcttggccagcagggtgatgggcagaacaggaaaggaagtggctgccatcgtctaggtgaaaacagtcctggatttggctggaggttgaagaataagcgacaggtatttgggaagttctcttctggttgctgtatctgacgagccaagctaactgcatttttactgtcctggaaaaactttattttgacctgaggaagagctggtaacatcctgagatttggaaacaggtcctgggagatgctactgccttcttccaggagggggtgctgccggacaagtctagaaccagtgtgggttcagtcacccatggagaccagaaccctgtgggctcccttggccacaggcatctgggcacatctgtcttccccatccccagtgtgggactgaccagctctgatgcccaggataactcgatggtaaagacgtctgagggaaggggccatgcaccactctggccgtgaatctaggctctggggattccctcagaggaaccggggtcctcattaaagcagctctgcattcagcccactgcagtaccctccccccagcacattctgggaacccgagtgccattctgggttggccacatggccctttcttatgtgggagcatctaagtcaggcttgtgctttcctggtcaattcccacatttcagagtgacctcgacatcctagcaacacatgggaggactgagctgagctaactgtcccagggacaagggggcagcctcccctttaaccttcggtgtcctgcctggtggtgggtgctatctgcatttcacctcctagttcaggccaggccgaggctcctgccacagggaggggcaatgccgggccctcaggtctgaagattcccaaatgctgggaggaagcgtggttcaaggtcaggctctgtggttagatggtcctgaccaggctcctggctccatcatgtacaatctacaggaggcaagtagctttgccctctgtgcctccattttatgatctgaatgatgagaatatttaccgtcagagagtggtttggaggttaagggaaataataacatacacgtttgccctgagggtcagcatgcagtaggcacactccaaccctatcccttgttattccctctcacaaggacatctgaatccaggaaattacaggaaaacaagcctggtgacgtctagaagcggtgccaagaggaagaggaagccctccctgggcttttctggcaaggagcccagggcagggaagagggcggaaggttagagaagggaacagaacttggtccaggctgaacgatcctggcaggctggtcaaacaagcaaaggggaacgcatgtcttttctcaacaccgtgcccccccgcccccaccccccgccgcctctggcagagctgggtagaaggctggccctgtgcagagcacagtcaagagcatggtgggtgattggccctcgggtccagccacagctgctccatggggcacgcctggagctcttcctcctcctcctcaccctgtgccacctccctgaaaccactcctccccgccacctcaagagcactctggcagccaacaccgtgacattaagaacagaacccctcctaacctccaccccagtgaggccccaaactctcccgctatctgctgagacggcaggcccagcagcagcccattaggaagtcctgagtcctgttctctgaggaaatcttttcttctgaggctcctgggatttggctatgagggaacaggcaggagacgagggctggcaggggcagcggcccgtgtggcacagttggcggtgatgacccacgctggctccgagctgctgtggagcaatgagtagagaaaaaccccctaccagccagaaacaagcctttcagtattaaagaaacccaacctaccaaacaaaaaccacatgccatgtcctattttctgaattatttattaacatttctcagatgttctaaagccctcccttgcctcctctctgccaaaccagggccctctgtcctacttcaaaagcccaagagctcacttaataaagcaagccccagtccccacctgggaagggcctggtcacatgggagggcaggtgagggtccctgagggacagcttgttgccctcactgttcctgagatgccccagcccaagaacgaaacaaaacttctcatcatttctcctcaggcctcagccgagctggcccctcttgtgctttctcaccctgttaggactgcggatcaggctgaagggctccccagggtgagcctttcctggtccgactcactggcatcaccatgaggaggcctggcggcagctctgccctgtgcacaccgtggtaacctggcaacaggaacatttgccaccctgcaagtctgaggagcagatgagccactggagggggcgaagtcccagagccacctctggcttcacccagactcattaaatgaaagacactgtctctgctagggccaagtccctgtcatgtctggctcctgttcccctccctggtccctctgccctgtggcaaggagcccaggtgcaggctcataggttgttccgctgaagtgcctcacacaggttctggttggtgtcgggctcctccgtcagcac

SEQ ID NO: 63567 - DNA, 3220 bp, Homo sapiens
gaaggaaataagtttccttatcaagaatgaatctagcttccccgactcaaaaacaaccatcttctctatattgctccatatcacaataaatttaagtgccttccttttctaaattaaatgctgttcccttcaacttaagggccacacactaagggctattcctttagaggcttttgggccccacagatcacaaaggtggtgccctgccctagttctttctggacatttaaaaggacatccactttcttgccctcaggataacattatgggaacaatgaacataaataagacagttaaataagcttccctgatgcctatccaatacagctttcaactcttctatcctgccttgttctttagatcgtgctgtagtctggagggtaaactcttcacacaaccattcccaagccctcatgtccctgtccactcttcctccctcaccttttaagtgtgatagggccttgatgggaagacctcacttcaccttttgtctcaagtccatctgcttccttccagagctacaaatacaaaggtaggccagggccattgagacgtggccatagggcacatgggagctggcagagccactcgcaccttctggggtgtcccttcttccacctgtcaactgaacacccgtttcttaaagatttatccccaaaagtcccatctcattctgaaaggggacgaaccagctaccccacgagccctttgtctgagcttctacacctcacacatcctcatccacaaagcgtccatcctcacacagtcaggtggtccgctcggcacagggcgggggagactaggtttttgcatctggtaaaaggatgggttatgtctcaggttcttccaggatcccaaatcctataattctaccaccaagcctgcgggtcctatttctgcggtggaaagggcgaatcccaaggcgaccctccactccacgcgcctgcaggcagttggaacaagccccctccaaccccggctctgcgggtccacgcctccaacctccggcgccgggccgcggagaaggccctgtcggcgcccgctcccggccgcgccatgccctctttcgccctcacccgccaccggtggccgcctctcacctggcacgctggcatcgcccactccgcgctgcactggaaaccatgggtccgacggggtctcgggggccacccatccgccttaaggaaggctggcggggatgcgcgggcccgggagtccagggcgccgccaccgggaacgcgccgcctggtttctaaggaactgggggctctggaaagggaggggcgggacggcaggaggactgcgcatgctccataacggggatgggcctgcgctgggaggggccgtagccgggagctgcgcatgctcgctttttgggggcggagcttaagcagcctggctaggaggctcaggttattcatttccggcggcggaggcggcagtttcctaagcttggcttctctccggtccgctgaccggcgtcagggaccaggttttggtagctgtgggtagcctcagttgtcctggaatgaaagacggtttcgtgttggacaaggacatatctgcagaaggccagttctctcgaactcgtcggacttcctggctccctgacccccagtgactcgtttttccgttttctcaggtgcctgtctgggctcctcttcctctggatgttttttgattgttccttaaatatcagtgctcttcaagactgtaacctcagtccccttggcctctttactgaagcctatgccccaccaaatagcaaactatccgctagagtaaggaagccgttagaccttagaataaaactgcctgtgtaggaaatgtgattggggtttgtatctgcatggggagcccccgtccctgcttgtctgaccctcctgctgagtatcaagatccccactcagctggcattaggatgatctcccagccatcattccagagcagcctgtggtgacagaatatgtcagctgacctaagcgtgaggcagttcctactgagatatgctaactagcagcagagctatccctgctttgagcggagacaggactcctaccacctctgtgaggagcatggaaggcttccaaagtgatgagaagttgtaacccctaaaccccccctcttctgatgggattttatcctttctctcctggatcctctagagccaggcagaaggaaggcagagtcaaaatgtgcctgtttgatctgtttcttagtcattgttcggagttccactcttcttgagtaggatttctcaacagtggcactattgacattttggacctgataattctttgttgggcaggggtggggggagctgtctgcattgtaggatgtttggcagcatccctggctctacccagtagatgccagtagcaccccaagcccagttgtgactaccaaaaatatctccagacattgccaagtgtctccctgggagcaaaatcattcccagttgagaaccactagtctagggggaaatgagcctactctggctttacttatatagaaccaggactttatgcttaatctaaaacccatattttcccctttatgctacctcttccctaagagcattctatagagtaatagtcctgtaagattctgctgagtgacacagtctgtagtaacttaagtttggaaagtgcagggttaagcaacacattttaacacaggattgagcttttaattagctggtggcgatcactgtgaacatccataagacagttttcctaatttactggaccacctcccaattccagtgacttttttactggcaaacctcccctaatttactggcaaacctcccaattccagtgacttttagccactgcctgcccccttctgttctgtgttattttgtggtactattatccatcccatcacccccaaccaaagtctgcatttgccttgtctcttgcttctcctatttccctcacattcagttattcatcttgtacctccaattctctcctaaatctttctcaaacctgccctctttgcagcctcctacctgggttcttttgctccaatttgtctccagtaccaccttcaggtggacaccagcatgatctaccgtatccctcctctgcataaaaccctggtgcctcggggacagggcaggcaggagtgggccagtcacaccactgggcatcctcatggaggaaggatgctcatgtgtactgtgtgtatccctgtgtgccaaacactgctgtat

SEQ ID NO: 63568 - DNA, 2646 bp, Homo sapiens
accatctcagtctttcctttcctgattccccaatggtagcgggaccacttttactctgccagctgtaaggatctatctgaaacagctggtgggacatgtgtaaagctgatagagtcccattctctggccagcaaatactcccaatagtctttcctaagagtggctagggcccagctgcagggagctgtctggcacagtggcagtgaagtctggcctaggggaccaaggattccatccactccctggagtagcagcccaagaacctgcctccacaaggtactggtttctcaacagaaagcatccattctctcagagctgtgcagagatggtgaagatctaggcaggaagaaagcagcccctgtactcaagggcctctgtcctgggaatggagtcttctttccagcagcctgacacacagaagctctcaggacgaaggcaggtagtttccaggcaatcaatttagagtaaatgtattatttggccatcttaacaacaagggaagatagggtattgaaaagggaggaaaggggagcaaggcaggcagtgggaggtggggtagagtggtagatagtgtgctggccaaggaccctctacctctgctgtgtggccctgggccaagttatcacttctctggacccttggccctgtagttctctgctctgtccagctctcaggggcctagggatctacagttcttgggatgctataaaccaatgtaaccatgcccactaagtggcccaccaaaccctatttgggtttcctaggctgcagctcggcctgtgactcaaaaaagggggagcaaaaaataaatcacttggctgaggtgacagagattcttcttttttaatgagttggactcaaagaaaacatggtgcctggacagcctcacccaagaggtgctggaccactaatgctacgataaatactgtctttttttttaatatatatatttttatatatatatatataatctcatttgttttttacttatgaaaataataagctatcaccaacttggataggcttcatcactaaattagcagaaaccagctcagcacaaactctccagagataaatactggtggctcagtcaggagaaaaaaatttaaaaaccccaacccctcctcaaaacaaaacccccctttcaaaatagaaggcgctacatgagagtaaccagccaatactgtgttacaggccgctgcacgtgaaggggagagagagagagactgagcggggtggtgggcagagaaaggaaggaaggaaggaaagggagagggggaaaggccaggcaggaggagtggactctgtctatggtttcccagtccctgcaccagttgcctatggagggcagggcagctccagccctggggccagtggagggccagccagagccagccagcacagtcagctagtgcaagtagtcatcaactctggcaaaggagcaagaacccaggcctgctcgggccatgagccggagacactcagatgcctggcccagggcgagcatcagagggggctgctttggcaggttctgggactctgtggaggaaagacaaggcctggtcactggcctgcccagggcttgggcccaggtcaaagttcccttgggggtggaaggagggggcagtggacagattctcttggaacagagtgttcagtacctctgtgtaagtgtgtcccagccaccaggccatggccctgaagtcatgccaggaacctgaggaccttagccccatgtagagcgctgggctggcctgggcctactgccatggcctaggacccatcatgaactcagctgggcagacagaggtcaaggtttaggttcaaccatgggagcccaggagtcctatgagtcaccagagagggcctgtacagagcttgctgccccagtgtggataaacatcagctctttctggggccaattggggtgggggttgggaaccacccaggtagctatgggctagcttctgtttttgttagatccactcacctaggccaggcatggtggctcacacctgtaatcccagcactttgggaggctaaggcgggcagatcacctgaggccaggagttcgagaccaacctggccaacatggcaaaacccgtctctactaaaaatacaacaactagccaggcgtggtggcacgcaccttagtcccagctactcaggaggctgaggcacgaaaattgcttaaacccaggaggcagaggtggagattgctgtgagccaagattgtgccactgcactccagcttgggctacagagcagactctgtctctaataataataataaatagattcactcacctaaaatggcgctgttgagggcagcacacacaggttccctctggatggggtcaagctgctggccaactgggcagctccaggggtctgagtatgccagcaggctgaaggcatcctacaggacagggcattcttgagaggactgtggcacacaccatagctcaccctgctacccgtggctccagagggagacagggccctgcatgatgcccagcctggaatgtggggtgtagggtcgggcagggctgtactctccccagagcctaggtgtggagggcacatgtccagtgggcccagatgccccacttccctctgcagacctggctggagcccactctttcc

SEQ ID NO: 63569 - DNA, 5321 bp, Homo sapiens
caaaaaaatgagccgggcgtggtggcaggcacctgtaatcccagctactccggaggctgaggcaggagaacggcaccaacccaggaggcagagcttgcagtgagccgagatctcgccactgcactccagcctgggcgaaagagcaagactccgtctcaaaaaaaaaaaaaaaaaaaaaaaaaaaaaaagagtccttaccaggcaggctggctcatgccagtaatcctaatactttgggagactgaggcagaaggactgcttgaacgcagcagcttgagaccagctggggcaatgcggtgagaccccgcctctacaaaaaatgaaaaattagctgggtatggtagcttgtatctgtagtgccagctaaaggggagaatgaggtgggagaatcacttgagcatggaaggtcaagactgcagtgagccatgatcatgccactgcactccagcctgggcagcagaatgagaccttgtctccaaaaacaaaacaaaaaaaagctcataaaagtctcttttctccactaccaactcagtgcaaaagttgaaagagcacacctagaacaaacaaacaaaattaagaatcagtttgcacttgacaggaaattatttttcctgtacattaagaggtagagctacagatactacagctacaactacttagccaaggccagatgctcatataacaaagaacacagccacacagtatgcaaagaaaactgccacacacgttctgattaacaatgaaaaaccagttttcactcagatcaatcaaagggggaaaaaagtaagattcctgacaattagttgaatcctaagcatcctagattgaaagtattagaaatcagtctactagaaaaaaatcagtgattcacattaaacattgattagaaaagacgtaaggtctgagtgtaactccctgtttggggaaagccagctgccttctctgtgtcataggcacaaagagcaggaggccaagaaaaaaacacaaggacttttcctgaccccatgacgtgtcagggaagcctggatcatgtcacttctgctgattcaagggaccaatggacttaagaccattttctggaacccatcagttcacggcagaagctctgtctccccagttgcagccagtccaggtctaggtatgagctgctgggcagaaaatagctgaaattagccaggtgtggtagcacatgcctataaattagccaggtgtggtagcacatgcctataatcccagccacttgaggggctgaggtgggaggagaacttgagcccagaaggttgagccaaccagaaggttgagaaggtggtgccaagatcgcgccactacactccagcctgggtgaaaagcgagaccctgtctcaaaagaaaaataatagatgataaaaataaggctgggtgcagtggctcacgcctgttatcccaacacttagggaggccaaggcaggctgatggcttgagcccaggagttcaagaccagcctgggcaatggcagaactctgtctctacagaaattacaaaaaattagctggacatggtgatgagctcctgtggtcccagctactaggaaggctgaggatcacctgagtctgggaggtcgaggctgcagtaaactgtgactgagccactgcactccagcctgggttacagagtgagaccctgtctcaaatatatatataaataaaaaataaagaaaagaaattgcttcaatcacattccacgtgggaggtcacttaaaaactttgatcttttttatttattttatttttttttttgagacggaatctcaccctgttgctcaggctggagtgcagtggcgcaatctcagctcactgcaacctccacctcccgggttcaagcgattctcctgcctctgcctcccaagtagctgagactacaggtgtgtgccaccacacccgactaattttttatttttagtagagacagggtttcaccatgttggccaggctggtctcgaactcctgacctcaggtgatccatccacctcggcctcccaaagtgggattacaggcgtgagccgctgtgcccggccaaaaactttgatctttaacacgatgaagtaacaaaggagccaaggttggcagcagtcttcctcccagtacatgcctgagtctgctcagcaaggccaatgggagcaagggctactgacgcgtatccctacctggagcaaactcaggtcagttgactttgatggcaaacagttcaaattccattaatgacaatcacttgtcaattaatttttggaatggaaatgcacaccatcctggcccaagggctacctttcaggatcctccaaccagtagcatggcttgaggtaggcagctagcaaacaaagtcctccccagcctctctgctaccaccatgactctcaaccccaattggatcaggagagcagaacaaatgttctcttaaacagtgactcaccaggaagtctgttcatgttgacgccttgagccgagagtcctattcccatgtaacttcaaaaaaaaaaaaaaaaaaaacacaaaatttttggttagcaaatgctcatgcgtctcccttctcaaacatttattggtaaaagacagaaaaatgagaaaagcaatgaatgtagaggctcttataacatactaatggttcttggagaaacctgacattttgatttgctaatggaaagcatcttagtgcctcacccagctagagaaaacagaaagttgcgtgtgttgtgtcactatgaaccaccggcttcaatttcagaggaaagtgtcatgaattcatggcttccagtcctttggcattctggctgtagctaaggcacagaatctattcctaagatgtgcctaaagcatctcaatcctaggtagtgctttacagagcaatgcacgattgttccacagggagaacccagtctgcaccaaagaccaggacatggtaaagccaagttggatctacataggatcatcaatcaagactgctcaaacgagcttgttctctgggtctcaaaattcattaccttccccgcatacattcacattggcctcccaaaccacacaaagctgggagtaatgatgtgtgaggcccccagagaccccctcactcctcccactctttgaagagtggggcttattctctttgaaccctgacttagttgtgatctcattggagtatgcaacctgggctcctgtggggctgctccctgtgtcattgacacctggaggtagaatggcacccaaatgtgggtgtcagcttcctctggctgctctccccttagacaatccactcagattctcaagttgaggcagaggctcccaggccatctactaataaataccatcttacctttgcacttgggactttttaagttaatgctggaatgagttaagactctgggggactagtgggaagggatgattgtattctgcaatgtgagaaagacatgaaatttggggggccagggtagaatgatatggtttcgatgtttgtcctctccaaatctcatgtagacatgtaatacccaatgctggaggtggggcctggtggcaggtgttaagatcatggggatagatccttcatgaatgtcttggggcagtcctcacagtaatgaacgagttcttgctctatgttcctgcgagatctggttgtttaaaagagtatagcacctccccccaacttgttcccgttgttgccatgtgacatgctggctcctagtcaacatccactatgactgtaagcttctccaggcctttgccggcaccatgcttcctgtaaagcctgtagaattgtgagccaattaaacctcttttctttataaaccttcttttctttaccctgtctcaggtatttctttatagtaatataaaaaaggctaatacactgcccctgccagtcctttattggcagtaaatgcccttttgcctttctctgggttgctgcaccactatatttgggggagcagcctctactaccaaaataaagggtcaggcagggagggaaggctctgacctactcacctgcctctgaaatcagctatcccaatcatgctgggcaggaacaaggaaaggaaacaacccagcatatggccctgataacgtggcccacatggcttagggaaaaaggtagagaagggaaaggagcaaagcaaaaggaacagcacttcaaagagggagtttcatagttcgaagggaacttgtcttctgctttgttttaagcagcatttgagacagagttggatccttaaaggtcaaagacatgaaccaatatagcctgtagctggacaggactgctcagtcattcccagaaacacacaaactgcctgcctcctcctgccagaggggctagcttcaaggaccatcaggagcagaagctgtcttagcctgctggcagaattcccattagattaaaacttgcacatttttccagaaaaactgcagcccaaataatcagcttcctgactttacatggcagaggctgccaaaagtcagtctccattccttcagtacctcagctgaccaagcagcaaacgaccccagctgccctgcagtcagcagtccaacaggcacaagtgcaacagtcagggctttccctgatttagacaacagccactcaccatgccctgttcagaggggcctggggctatgcccaacaccacatgtcatcccatccccagcacataggcttcctgacactaggtaagggtttatgtttggagcacatgtgcaaacggggaggtcaaaggtcactcaagaagagttatgcttggtcgctgcaacagggctctggttccacaacattctatgggaatggggaatcactaaagcacctgtgctcaaaacacaacttgcttaggcctccccacaggagacgcctctcccttctccagcagctagccctcaacaccttcctacagactctgctccacaggtaagatggtgtttattagtggatggctcgggagcctctgtacaaacccctgcctcgacttgagaatctgagtggactgtctaaggggagagcagccagaggaagctgacacccacatttgggcaccattccacctctaggtgtcaatgacacagggagcagccccacaggagcccaggttgcatattccaatgaggtcacagctgagtcagggttcaaggcgaataagcccccactcttcaaatactgggtgacattaagtcttttccaaaagcatggtgttttaaagctaccaaaagatgcactcttctatcttccagaaactcttcataaacttaaagactatcatccaaccaatctgagagaaacaaagcagaccctgtgaatacactaaaaaacac

SEQ ID NO: 63570 - DNA, 2288 bp, Homo sapiens
gaggccaaggagggctgattgtttgagaccaggagttcgagatcagcctgggcaaaatggtgaaaccctgtttccaccaaaaatacaaaaattaaccagacatggtagtgcacacctgtagtcccagctactcaggaggctgaggtgggaggatggcttgagcctggggtgggtggaggttgcagtgagccgagatggcactactgcactccagcctgggtgacagagccagaccttgtctcaaagaaaaaaaaaaaaaaacacagcgagataccactttgtaccctttgagctgccaagaatgagacaaaaataaataaggaaagggcataacaaaaacctcaaactcattctcctgtacacatactgcagtatctttgcatctatggaacaggaagaatccccataggaggccactgacactacccttcctctattgatctctgcaggcacctgaatatggctgagttattaggagctcttgggtccttgctaacgttgagtaattcagtaaaaacaggtgtgataaatttcttttcatagaggttcttccagtcattcatgtcatcaacaaaaatgccctgtacccagtatgatgctggggacataagggtgggggcctgggctcaatccttgccctccaacagttctaatgtcaagtcagggcaagccagagagtcaaggtgtgctgactcaaaatggggaattccctcaggaagtgaaggctgagccaaggcctggtaaagtaaatgacaggagaaagaggatcatggtccactcaaaaacagcagaatgtgggccaggcacggtggctcacgccagtaatcccagcactttgggaggccaaggcaggtggatcacgaggtcaagagatccagactatcctggccaacatagtgaaaccccatctctactaaaaataaaaaaattagccgggcgtggtggcgggtgcctgtagtcccagctactcgtgaggctgaggcaggacaatcacttgaacccgggaggcggagaatgcagtgagccgagattgcgccattgcactccagcctggcaacaaagctagactccgtctcaaaaaacaaacaaacaaacaaaaaaacacagcagaatgtgaaaaggcatagaggcaagaaagcagccacgtggttggggaactaagagaagtttagtatgactgggttacagtctgggcagacctagaaagacagacagctggatctggaaatgggctgtgcatgcacagcctgcatgctagcttaaggagtctgaacttcatgagaggtaaatgggaagccacagaaggggctaagctggggatggtggcttcagcctataatcccagctacttgggaggccaaggcgggaagatcattggaagccaggagtgcaagaccagcctagacaacataacaagaccacctctgtctctaaaaaaaagaaagggtacagctgatcaaacagctgatatttgaaaaatggattgaagaaccaaaactggacacttccagagtcattcccatggaagatgacaagggtgggacaggagcagtgggatgatgtggagacaggcaagtgctctttagaacacagttaatttattgggtgggggaggagctagagaagcccaagacactgcccagcacaaccaggcaccaaggaaaggtcaattctctgagacccacttggaaatactggagccaaagtgctcagtcagagttagcagcagccattctccagctgtgctctctagccctggcattgatgccacgcacacacatctcagaacacagctccaaggagcaaacacagtttacaatcctagactccaatctcacctctgccactgagttcaacacatgcccactggcatgtcccatgtgctctcagagcctgctttatcagctattaccttgaggctggagagcccccaaagcagccattcaacaggatcagacaaacgagcacctgagcgcagtgccggaggctgaaggtggatgatgggacaaccccactttgtccattcattcatacactggaggatcttccagcatcaggatctggtaaggaaatgaggccattctggaaggcctggatctcaggacatctaaaacaaacacctgtttacttgagattaccaaggagaaaggaggtgaatatttgcttccttgttggtaatgggccaggctatgctagaaacactcacagatacaacctgcctgggtcagcctgggagggagggcggcaacaagggcttttactcccggagcaggtgactagaatagata

SEQ ID NO: 63571 - DNA, 2739 bp, Homo sapiens
gattacaggtatgccagttaatttttttgtatttttagtagagacagggtttcagcatgtttgccaggctagtctccaactcctgacctcaggtgatctgcccatcttagcctcccaaattgctgggattacaggcgtgagccaccgtgcctggctcctaatgctgactttaatgaggaccttcctaaagttgatccaactagtagtgttcaagtccttggactgaaaaacaagtttatgagcagcaaggtcacctgattctgatcatgtgtatgctgtttaccctgagatgacaggccggtggccacagaagctttcatgaatgctgcaaagactctactatctctttgaaggctaccagggcctccacatgactaaatgccataaaaaagaacctcatgaatacagcaagaatgtgaaaggaaggaagtcacaaaaacaccacatgctcatgagggaaactccattctggacactaaatttttaaagtaaacttgttacttgtttgcctaaccttctaggtatcaaattacatcatcactaaaaataatccctgctttacccccaacacacccactggccatcaagatctgctgcttagaccagaccatgcccacagtcaggaaataatggcagcccagacccatgcggctccccagctcacatcagcaacaagtgccagccaaaggacctgaactctgaccacagggatcagctccatgatcagggaaagagggtggtcatgaagggcttacccatctcttcctttgctgacaatcttcacttcaaagtaataaatgccacaggcagcaggtatggggtgggtggcacgcactgaggccgcatctttgtgatttttgccatgacctaacaggagagggcaagtaagaaatttcagcagaaggaaatgcaaatggaagcctcatttttctctgcaactcctccatgacaactccactcctctgtggccagaggacgcacttacacaggccgaggaatcattagacaactgaataaacacttaaaccttccacctttgcctcacctcctcctgagaacagcagtcctgcctgagacactgcccatacaaacaaaacaagggtagaggcaatgtgagagatactcaagtgctgctggcagcctctctagaatccaggcagcccacctgggaggccaggggaagaaggatgaggccgacctggaagacaccccccaaactctagcacggaaccccaggctcagtctaggatgcctggcaggtggggaagcccatgagtctcacgctaatggtaggtatgtgaccacccctttcttctaagcagtggcgaaaggtcccgctgccgttggcgccagcctaggataagcacggaggccctggagtggaaggtccggcccagcactgggtttggacacctgttgcggttctcttgacggcaggtgtctcaggacagagaacaggcagtcagccctcggcctgttcagcctcaccaccctggacatcctgaaagggccaagccctaacttggagcacctaggcagggaaagggaggtgatagggcgggggcctggcagcagagccaccccacggacgctctagccttaattccccccagcctgacgggccgatacctttgtagtggacgcggaggttgccctgggagagaccaatgtagttgtatttgtccttggggctccaggagcgcggcagcggagtctcttgctggttgaccgcgggatacaggcgctgcaagcgccggctcagctcctgctccccaggggacggcagcccgcccccagcgcccccgccggaggagtccccaggctgcgggttcccagctcccgggtctgccgtcgctgccgccatcttggagggagctactattgtgtcactgggggcggggaggagcgggaccagatccgccccgctcagccaatggcccgtgagcctccctgggccgcagggaaaccgagtccgagtccggcacccctctttggacactgacacgccttaccacatttcgaactccataccccacaatgcagagctctcgagaggcggagcaactcgggctggtagagaattctgggagatgtagtataaccgtcctcagccataagcctgtcccatcgagacgtcgggacaccgaaaactaccattcccgccggcaaagcggctccggcctctcagcacacttccctccccatggcctctgttcatccccctgcctcagttctggtacctggggtcaaatcggctgtagtggttgactctcagggcacccgctgccgggtcccagtccacctttgctactttgtcctactcccagcccgcgggcgctaggctcgggggcgtggcgcatccctgactccgcccccgccgcgggggggcctctggggcctggtcgccatggcgaccggctgtacgctaccacagcttcccaggccgcgggtgctgattgcccgcctgcccgtgggtcatggcctgccagcagtcgcggtaccacagcttctcgtccgcgtcgaggtaggcgctggcagggatgagggcagagatgagggtttgagtacttctagagagggaaatggcacttgatccggacctctgcacctcctgctggcctctgaccattgatctagggctccagcaccacagagtcaatggttagaatcgggctgatttagcccagtgaagacgttacgtgctagcaaaacggtaggcgcactttatcattactagta

SEQ ID NO: 63572 - DNA, 1145 bp, Homo sapiens
gcttctcattccctataaagaaactccactgtcccagtctggcagatgtcaacgtatgcatcctctgcaccatgagctcaccacagccctcacccactgccactcccactgactcaggccaaattccctgctccttagcaaagcatcttccagttgctgcctcccaacttctgcccaggctgtcctctagctcctttcccatttcccagctgggagctacaaggacagtaagacaatgagcaggaacagtgggaaccctcgggacgcagaagttcagggcaaatgcctaggcacaccctggctggtctggggaaagctgcctagagaacagagcagaaggtgagattctgaacccctatcctccatctccagtggccgagcccccagagacccgggatcagtcaggctctgtggtcccgagggctggctgcctggagccctgggggcaggggcacaaacagctggcccgggcccggctagagcaatggaaccagttctcagagtcccaggccctgctcctctctgagactcagttttcctcttcgaacagagtcgacgctgggttccacccagaccctgctcctctctgagactcagttttcctcttcgaacagagtcgacgctgggttccacccagaccccactccccggtccctctagttgctcaagtactcggggagccccctcacatacccagcccgagcactccggggtcgccgcggggtgcgcgggtccgctgtatccagcacgcgtcgcagcagcgtgcgcggcgtggagtcgctgtcagggttgtggtcagccatcgtctcggccccgggccctcctaaccgcccagccagctgcaggctccgccttcccgccgccacagttaatgtaactctcgcgatgctcccgcacagccccacgggaattgtagttctcgcactatcgcagctcgcggggtggacagtgatggttgcaaactccggatgctttggaggcagcctcgctgcgggtaaacctcggttaatgtaatgcaagcagcccaagtcttggcttcttcatctgtaaattgaggttgatacccacctgataaggagcttgtaatgattcaaggagttgatgtttaactcagagtctaacacacgataagccagggcactggt

SEQ ID NO: 63573 - DNA, 2036 bp, Homo sapiens
ccagtttggtattttcctacgcttggccctacccgggccacccctttccaggctctttaatggcggagcctagctcttttctgccatgtggccttacagactggttcctgggacaagaattggctacttctccctacccaagctttcgttcgtttttttattcctggcccccaccacctcccccccatttctctgctctcctgttaattcctttggagcgattactatttgtgagtagacatccattcgcgtgcattcagatctattatccaaaagacagacgcttatccgtctaggtagtcaggctccaagagaggagcccagtcggtctgactcccgcaaactcccggcaccgtgtcagccacatagtaggcgtctactggagactttgtttagatcagttagtcaacgcaggcagcagctgaatcaggagagagtccccaacgcaaagaaaggggctcctgagacccttcggggcgccgaggcccaggtttcgtctccctctgctgcagcaatgccgtcgactcaaaggggctcggggctggggaactggttctggcaaacagcacaacctcgcccgaatcctggtccgcagtaactcgatctttcccttaggcggcgcttcggagggaaggcgcctagttcagcgcgaggcatcacgggatttgtagtctccgtgggcatatacccaccgcgcttgcgcaccggtgaggcgcgcaccgccccgctccacgcccctatcaggattcgggtcctcgtgaggagcagtccaggcgacagcgttccaacctaatacgcctctctcgcccgccggggacaagacgggctggggaaagaatctgctcttcggaggctatcgcagtgccttggaaggcggcaggaatccgcacacacccgccccggaagtgagccgcttctggcgcggggcattgtggggggcgtagtctctttctcaggcggtccttcgcggcgtccccggggcccactcccgagcgcaggcgggcagccaggcgggcggcgcggcgcgggccggcaggaagcgtattctgggcacggggcgccgggcgggccggctgcgccgagcggcagtggtgggataccacccaaggcctcgcgcggcgccgcccgtcgaggggcgggcggcggcgtagccactgggccgtcgaagagcgcaggaggccggtgggccgggccgggccgcgcggcgcagccatgcctggctttacgtgctgcgtgccaggctgctacaacaactcgcaccgggacaaggcgctgcacttctacacgtttccaaaggacgctgagttgcggcgcctctggctcaagaacgtgtcgcgtgccggcgtcagtgggtgcttctccaccttccagcccaccacaggccaccgtctctgcagcgttcacttccagggcggccgcaagacctacacggtacgcgtccccaccatcttcccgctgcgcggcgtcaatgagcgcaaagtagcgcgcagacccgctggggccgcggccgcccgccgcaggcagcagcagcaacagcagcagcagcagcaacagcagcaacagcagcagcagcagcaacagcagcagcagcagcagcagcagcagcagtcctcaccctctgcctccactgcccagactgcccagctgcagccgaacctggtatctgcttccgcggccgtgcttctcacccttcaggccactgtagacagcagtcaggctccgggatccgtacagccggcgcccatcactcccactggagaagacgtgaagcccatcgatctcacagtgcaagtggagtttgcagccgcagagggcgcagccgctgcggccgccgcgtcggagttacaggctgctaccgcagggctggaggctgccgagtgccctatgggcccccagttggtggtggtaggggaagagggcttccctgatactggctccgaccattcgtactccttgtcgtcaggcaccacggaggaggagctcctgcgcaagctgaatgagcagcgggacatcctggctctgatggaagtgaagat

SEQ ID NO: 63574 - DNA, 2003 bp, Homo sapiens
aggaaggctaggagttgcctggagaggccttgtagccatttcccttacctgtggtaccccaagttggctgcagatctctttgccaagcacaggtctgacctagagactggccttaccacaaatgtttgtgttaccaagaaaacaaatgggcgttgaaaggaaagggcaatgggtaggaagagaactatttacaatctggtcacttaaatcacagcgaaattttgggtaagtcagtcatttctctttcctcattaataaaaatgaaacacttagctgctctatctgctgcaaaaaaaccttacagaatgttttggggggacccctgactgtagaagtttgagggtaacctctccaaccaagccccacctgagggacatttgagtctccggcccaagaatagcctagcctgctcgaaaccagctttgggcccgactcgccgaggtgcaggcgcacgaatgttgggattgcaggagctgtgcgttccgcccgggctggttaaggccacacagctcggaagagtaacagcggcagccatagccccaaggggagggggtttcgtgagcggaaacggcccaggggcccagggaggggcagctgggccagcttggggccgggctgggctcccacggaggcggggccaacccccaccccagtgcacagactgggcggggccgagccagctgagaccaggagacaactgagccctgaccctagcctggcgccaacctctagtgttccagaggcttccgctagaccacaattctcaggggcttgccccggcagcctccctccctggcttagcctcacctcccgcgctgcgggccgtgtctgggcctccgcgcatagcacgccgggaattgtagttttctctcggcgcgctcatgccggaaagggggggcggtgggactgcgtctcccagagtgcagcggggcgggcgaaggaaggcaggggggaagggacagtcggccgcagaccgcgctgggttgccgctgccgctgccgccatcgtgccagcccctcgggtgagtgtcggggccagcacgccggggcgggggctgggccgcaggagccgctctctgggctgccgggaggctccgctgagagtccccgggcggcccctcccctcccccccccccggcggcccgaagccgcgcggggcccgggccatgtgtcgcgcgcggctccgcctcccgccggtcctgtgaggcggcggccgggggtaacgcacagagagccagccgggcgcctatctgggccgtaccgtgctggtggctggtgcaccggcctgcgccatggccaggcctttttctctagtcaggaccgtccggatggggccttagggccccgccccgtctagcctggcccggcctgcgcgagccccgcaagctctgcaggctggctagcgggcagaccccagccccacgtcctgctacccacctacgaaggatccggggatgggcagcgccacccggcccgctccagagtcagcatgggtaagggcgcccgcctgccgcagccggggcttgggcccctcaccctgttcccgaccatagcccggccggggtgtaggtgaacgccccctccttgtctgcccctcggaagtgtacgtttcttaccgcgccctttgtggagcccggactggagttctcgcagggagggcagggtcagggaatatgaggcgggaggggattccacgggagactttatccctgtcttgtcttagaggatctgggcctgatggggtgaggcggctcctgccgggtaggcccagcccacgcccttctctatcagtgaccaggccccagcagcaacacagaattgccccgcaggacaggatgacttcataagaatgggatgttaaggtgggacttaatgcacgggaagtagaattcaggcctgaggttcttgagcctagtgctaaaccagaacctgggctggaaggggctttggggggtggggcacgtagatttcagactttgtggggccctcccgaagcctgggtgg

SEQ ID NO: 63575 - DNA, 706 bp, Homo sapiens
tacctaccttcttcctagctgttgacctagtattcacctaggaacccatactgactccttacagctgggtcctgctccataccccattcattacctcctaacatcctacaattactaatgatgggacagagtcaaagggtcaaataacaagggagaagtggagcaggctagaggccaggtctttgagggtgtggctgtgcctgctgtttagccacagctgtctctcactaggaccttgggaatgagagagtattggggccaagccccaattgccacatgccatagacagatagctgggtggacaacaaataattgtttcctcacagcttggacagaaggtgtgggtggaggggaagtgggtcagtaggccacttgagtggagtttgcccagaacttactcctcctccagagaagaagggctggcctctcagcccaggctctgacacactcatgcacttagtcaacaaatagtttgtttgagggctgggccaggtaccatgggaacagggatgactaggggtgctttgtcagggagatagaccgtaaacaaataccaaactgtgacaatgtcatgcagtgataagtgctaagaaaacaatacaggaggcaaaatgggtaatcagacagctactttattatttatttattttaattgagaccgaatctcactctgtcgcccaggctggagtgcaatggcatgatctcg

SEQ ID NO: 63576 - DNA, 1345 bp, Homo sapiens
gtttctttcttccaacctgagggtgccaggtgggacaaggggatgctgggggacagtagggaacaatgactggtcattgtagtgggatcatctcccctgctcttgcaattcctgagttttatgacctcgagggtagcctcaggccttgagttattccgacccattcccaaagggaacctgaggcacctgccaattcagcatattctgggggtctgagggaccttagcatgggcggctaagttgaccccgtcccaggaccatcggagtccatgctctgggagtgggcagggacctggcgccttctgagtcgagtagggctttaggtggcccagtgcgtggacgcttacttcagccccgtgggactttcctgacctcgcggacacaggggcggggccgccgagggggactggctgcgggaggggtttaggcttccgcccccagcccggaacctttcttctccggccctggcaggttccgggagcctcggctcgtgggtgccggaagtggaggcggttggtggggttggcggggctcagcgacgctgcgcgggtggcggtttgcgaactgcgggtggactgtgtagtgaccggcgtcccgctgtctcgccccgtggcgggtgagcgagggtgcgtggtgcgcggcggcggcggaacgaacgcggtgcgggcggggcgcccgccgcagggcccatggcctcctgcgcgagcatcgacatcgaggacgccacgcagcacctgcgggacatcctcaagctggaccggcccgcgggcggtgagcgggggttgcgggggtgggccccaggcgagctgacaaaagggcggcgcgcgtctgaaccgccattggggcccacagctcccttaggactagctctggatcctcccggcgggtaagggtggacggggattgactgtgcccctcgaagggcgcagacccctgggtgtgacccctccctatcttgtcctcaggctgttctgccttgtccttcagcgtctcggttgaaggtgaggcgccttctctgaatccgctggggccctctggtttcctggccccgaggtctctagtgttcctgggactggcctagctcctcttccctttctccatggttcagaggcctggtctgggctccgtatatggaattctgggcccaggcttaagcgcgatgctgaagagctgccggtccccctccataacttgcccttctctctggaataaagactccaggcctcccgttctgaaactgatttccaggaggaaggtgtccagtctcaattccgtgttctttctgggatgaaggcaaatcacagaccgcaccaccctgactgaattatgctacaaatatctgcaa

SEQ ID NO: 63577 - DNA, 2108 bp, Homo sapiens
gttggcccaagattgacttcacctatctacaaattaaccctttgcatctcttctttgatggaggccaaattcaacacatggagtgttgaaattattctaagtgcagttttaaaaaatagattttgttaatgaaaattaagtctatcctttgcggagttccagaggcacttccagaaacctctgttggaaagcattgtttacccaagctcgcattacagagtcccctttcccccaaccagaaacttgaaactttctccctatttcccgcgatccttcctttttctatcaccgacccgtctcgcaggcagcggtcaagttactttgagcgacaaatagacccaccccttcaggagagtgcccgtccccgccccgaagaggttgattggcaggccacgctcggagatccgccagccgcgtagcccagtttcgggagagtccgcccccgacccgcccccgacccgccccgtaggcttgttttggcgtcagctgcgcgctgtgatgacgccacgacgctaacgcccgagaatggcggcggcggcggcggcggcggcggccgctgccattgcccggagatggccggcagagccgccgagacgccgaagagcccgccgcccgcgcgaggtgaggcggcccggcccaggacgacggcccgacgggcgggaggggcagccgaactgtggtcgtggtcgctttctggcgctccggggcctgcccctggtcagcctgcagcgtcggcccgtgccccgtgcgccagggcctacagggttggagagcaggccgggcgatggctgctcgggttcccggcgtccgagtctggactggcctcggaacgtgctgtcgtgctggatagcccgtctccaggcccgcttgggcctggtggacgtggtcggttgccctgcctgcttgctgttcagccgccccgcgtccagagcgggtcaggttgatccaacctggttgtccttgtccttactgccttctcgcgcccggcgcctactccacacccctcctttgcgtctgccaggggccggcggggcagctgatcgcttccttgtgcaggctgggaaatagcaggtctgagtccagctgggttgcttgcttggcaagcttgtcattcctctacctgcaaggggaagcctagtcccccacacttagtccccctccataaagcggctgaagtgataattcccacctgaaaatctgagtaagtccttcactgcctgaaactagttccttagtgccttcaggacaaaggccgcacttcttagcaaggcattcagggctcttcgtaatctggtgaaggtttaaccagccaatcaacaccggagcacttctgtgctccctttacgtagtttattgttgttaaaacgtgtggcgctcctgttagctctggtttcatacctttgtgttttagtattactaattttgagacaaggcctctattgcccaagctggagtgcaatggctcattcatagctcactgcagccttgaactcctggactcaaatgatcctcccgcctcaacctcccgagtagctgagacaagaggcactcccctccacgcctggctaagtttaaaattttttgtagagccagggagtctggctttgttgccagagctggcttcaagagaccctcctgcctaggctcctaacatattgagattattaatacaagcgtgagccactgtgcttggtccccttgtgctttagataacgcagttttctcagtttgctatacactgccttccaccccaccgaccacctaccagtgttggaaacttacatctgtcctataaaatccacctgagatgtcacttcctaggaaaaaaatctaccttgcttggcatgtaaccattaactcctctatatccatgctgctactattgagtacatcctgttgtgtcacatggtggtcttctgtctgcatatgtctggctctgtgcctggcataaaataggggctagcctccagtagcatttgctgaatgctgacttatgaatggatagattcaactgtatttttgagcacctatcagggctaggatctaagatgagcacagcaaatgccagcgtatgtgtgtggtaggtagtacagcctcttaatcctgga

SEQ ID NO: 63578 - DNA, 2857 bp, Homo sapiens
gaaggaactagaatagggaatggccatagaatgaacccgcattggcagacacatgtgaacacaggccttggcatagagccactgggcctgggcagtctggaacatggactatggtgctcaggtcaggtggttgggccctgaccccacccactccagccatctgtcctatatgtgtaataggtgtttgccattaggaaggccatgtaagtgagcaagcctctgccaggataacctgtgagagagagagtgttccatgatgagggggttgttgctgtgtgaatgaaggacctctgacgcagcagcgtttggaggtatgcattcttcaccagcgagtgtctcgtggtgcttggtgcctttctaggggcacctttcctgttccctgaccccatagagtgctctcccctgtacaccaggccgggtctggtgtgcctatttcctgcaagctctgtccatgcagccccagtcctctgtcaggctcagtggcatccatggacttgaatagaaagcttcctgcagaagatgagttttgagaaggaggaggcccagagaagggagcattgctgagtgctccagaataaacaggagattgggagtgacagagcagaggttgaagaggctggggcaggtctggtgtttgttgttgggagccctctgcactgtgggaggagccctctgggttctgggtaatggaggaggaaggcagcagaaagtgggaatggagcctggcaggaggaaggctagctggaggctactggaataattccatcctgtcctcctggggatgtttggggcagatcagggatcccagggagtgggatccacatggcatatgtaagccacagtataggaggtgaaggagtatggagcagagtcctagctctgcaggagggacatcagcttgtatgggcagacttggagaggattccaggctaccctctgacctggagagcatgtggggtcctgcctaccatcctggcactccagatcccccagcctgaagcccatgccctagaccccaccccactccctgcacaccacaggcctgagccattgcccccattcactctccacaccaagcttctgcctcaactgttcacgctgctcccagtatcggtcttagttgtttcctttagaaataatgctgcctactgccattgtgtggtgcccactaagtagcagacccagggctgaatgttctacaccccccatctccaatctatgacaaccctgccaggtggtacgtaatcccccaccttacagatgaggaaactgaggatggtgaggttacataacttggccatggtctcccgactggagggtggcacatctgggatttgattccaggctgtcttggcttcagagttcttggcctgtctagtgctgcagtctgctctccctggtatgtgtgcctcagcacgttgctggtttcttgtttcagtgctttctggctgctgatcagtggacacatctctcctgtctagcctgtagggtccttgaggacagcatgtacatcaatacatatgctgtccactgtcgtgtccaggcttagtgcacagtggtacctgtatgctgggttgaactgcagtatttataagtgataactggtgggggaattttctcttggcttctcctgagggaagcaccagtggctattggtgatgccctgggaagcgtcccaaatgtgactgctggcaggcagacaggctgtgcagccagtggagtgctcccctcaaggggccagactccaggaggaagcagagagcctgctggcaatgcgcttagggggctgctggccacagctgcctgtgggcacaggcagggggaggatttaaaggcccagggctggtgtgtgcttgtcaacttttagggcaaatacaagactcttggaagaggggtaaatgctgaggaggagatgactggaaaggaaaaatctgaatgtttacccagcacccagaggcactggagtggagagggcacgctggagtggagagggcatgctggaagtggtggggagacacaggttgggagaggtagcgaaggcctgtgtgaatgtgagagcagtttgaggacacagtcaccttgagaggcggcttcctatcacaggaggcctggaggagctgtttctaaaggatgacacagaaggtgagtcatcagctacagactcatgctagagaactgtcagggtcctccaatgcagagagtctgtgattcacttgacatgaaatgtgacatccttgatgtcagtgcttttgtcaagagttctattcctagaggcaggacggatgaaggggctcttgtaggattgatattagagtgatgccattaggagctttgctgtctgctgcattcagcatcctgaattatcaccctcctctgcttggccagtctctgagctgtgggtgagcccaggtgactgtactaggaacaggtgggcttgggtagaatttctcacagagccttgtgagtgctgctgggcaggggacagagtactgttgggagaggaagcccaccttcatagccactctgctgctacctgggtgacaagggctggtgggaggtggcctcccagggttgggtgtctggtctgcaggttgaccatacattgatctggggctaagtatacctgaaggggcaatgagcttgaccacctgtagttctttttttttttttttttgagatggagtcttactctgtcgcccaggctggagtgcagtggtgtgatctcggctcaccaaagcctccaccttttgggttcaagcaattctcctgcctcagcctcccaagtagctgggattataggtgccagccaccacacctggctaatttttgtatttttagtagagacggggttttacca

SEQ ID NO: 63579 - DNA, 2733 bp, Homo sapiens
gcggtgatgggtgtgtgagacctaacgggctctctctgctgttaacttaggctacagcctggggacttgcctgtccacttacccaatctggtcttgccctccaaacccccactgtgtttctccctctgagccttagccacctctgaggcaacatcacctgcttccatcccaccccaaacaaaatctaggctccagacgttgatataagtaggaccctactggtccttctctccgccctcggctcctaaagatcctctgtgagcttcgacttctcccagccgtgcaggctttggtattggacggtgttatgtcgggaccgcacttctctgcccttactccactcacccttcagtggtcacctcctccgacaagccttagccacccgcactgggccagggtcctgtgctcccccagctcccgggtgcacatcccaccagcgaccacaaagtcggggacagaggccgctcaccgtcatgttcggctggaaccggtcttctagcaccgccagggccgcgtcctgaccagagcctgaaggcaggagaagcatctgaagtcaaccgctgcgacgccgtttggagtgaggccaaggtcacaggggcagagttcgaggagaagggacagaagcgctcacccagggctgtgaagggcagacggctgtaggagccatggggatgcacaccgtagagctgcggtccagtcaggtctacgccgcccacgatcagcgatgcacccacgtggccctggtacctgctcgaggatgggcggggtcggccacaagctggggcctaggccccacctctctatgcccagctcctaggtgctatccccgccccttcctgtgggctggcgcccgatgactgacatcgccttttcctgtagcccaggttctcttgggccggcctcttccggtcacctggcccgtcgcggtcccgcccttctttctgtcccgccttccaatggccccaaccccgtaactacccctgccggggtcctgttagccctgcccccgcacctgaagagcgtctggcgcaggatgcgagtgaccgtggccacgcggggctcgcggcccgtagataacgcgtgtagctccatcttggacgccaccatccgtgtggtcatctcggcgtccgcggctactccagccccacagcagctgaggcaaaagggaggatcggtgtgggcagggctgggacgtgcggggaccggagtgggaacgagggggccgttcttttttgcgtacgggaactgggctcgggagtctcactagattttgggggcgatgaagtggatcttctcgcagctcttgtccgccacgaccgaatcgttagtggctcgcgtatcggcgcccagaatgaccccgtcctgaggagagggagggaccgcagcttcagtgcctgctcgatactctcggctcccctccagctccccgtccctccccgctgctcacttggaacaccaggcccgcgatggtggtcccggtcttgcgtgcgtgagggaccttgagccccgggaggacgcgttccaatgatgcatttctggaaacggaggagggcgcccatgtttcggctctgctttcaagacccctgttgcttcccctaacctggtccccgtctccctcatcttccggggtaagcctggaacccaagtcgaccaacacaccctcccccacccccagccaggaaaaaaggccacgagcaagcagaggcggctcaggagtgaccgccccccgcgcccccgcttcacctttggcagttctcgaaggagaagccccctcggggctccagggctggcttcagcatcttggggcaggcagaggggattaggggtcgcgggcggatgagtcggccagacaagcggggccagtgagcagctaaaaagtcctctgctaggcttcacgtctgtacttcctgctttcgctttcgcctttacccttcctcaaaggcccgtggcggttttctgcatcttgtctttcacttttggcttcacttgtggctctgagcatttggggaaccgggtgatgtcccttgctgtgccctctgtgctgctcactgggtactctgttggatagagggacaaatctcttcccttctggacttgttcaggtcctcctccccctccatctgagccccttgctcttaccctagcctcaactctgacctccagtcccagcatagtaaagctctcagagccttggccaagtcagcattgttgctggccacccagtagcatcaggcatagctgacttttgttccttgtcacctttcttccaactcttgcctcttttgttgcctttactcctctgcaaaaacctcaaacagaggctcagtcctcagtcacagggaccctggtctttccatcttccatctcaggtgccatcttccctctctcaagagggcaccatgggtgttgggttccactcatggccaagccttgttatttcacctccccagtgacctcttgtctgcacacatccttttcctagcacttctagtctcagctagcatcctctcccacctggacattgcactggcctccctggttaccttgcaattcttgccccccgccccccgacccccaggctactccttaccctgcagagagcgggtctttctaaattggaaatctggtcacattctttctctggtttaaacccttcagcagtctgggcctggtggctcacacctgtaatcccagcactttggaagcccaggagttcggggctgcagtgagtat

SEQ ID NO: 63580 - DNA, 935 bp, Homo sapiens
caggcctggagccccagccctgccctctgacacaaacctgccagcttgctgctgtccaggtactccacagagtaggtcttgccaaagccagggacgcggatctggacaccaggggcgttggacacgagcccagagctccggttgtagacaaccctgcggggcgggggtgccactcagcagccagtagccaaggggcagcgtgttggggctagggtggagcacatggctgtacctggtgttatcgatccagcagtctaccccaaggggtaggaacatgttgagatccagccagatggtgaagaagtcctctgtcttgcggtagcacatccagttcaccacatctggtttgtccagcttggcttctagctgattccccaggcagccgggcactgtgagcagcagccctcactctggactctggattccccccgtgacccttacccccgtcaccccagatgctgcagtgaccagacccaccccccacctcccataccctcaacccccaggtacaaagcacacttaccctcccctgcttacaccccctctccctgctgtccccccagtagccaaagcccaggcttccctgaggaagggaaggcgctgaggtgctgaggccaaggccgctgacccctgcctctgcagagcaaacacccagtctggcgctcctttattgccaaagtccaaggtgggaacagataggtctgggggcatgggggctgggcctaataggggccgggcatggatgggcctctcctgctcaccgatcctgggctgggcatcttgtccttggtgggtgggggccaaggaaggagtggtggggcttggcccagagtctggtgtggctgtgactgaccacagcttgtgatgccccagccaagacctcaggcacaccccgtcccccactccgccccccctgggttagacaactgagagtc

SEQ ID NO: 63581 - DNA, 889 bp, Homo sapiens
tccaggtatctcctaccctctggatccccaggggcgggcacctgtcaccccatgcctcccgcagctccttgcctcttctcccactggtacggcagttcactggggaatgagaagctgaggctgacagagctcccatggggctcgtggagggagcgccgacctccagcagggttctgtggctgcttaccctgattgaaggacaaggagaaggtggatctgaagtgccctggcacagagccccggaggacacagagctggccagagctcacacaagcccagaaggaagcctacatcaccaccaagatctgtcactgagctgaatacaacagttcctggaacccttgccatggctgcaatggtgcccaggtggatggaacatccagggccgaggtgaaggcagccaggcctctgccttgcctggcccaaactggcatggaggtgaaaggaagaccagcctgagtaaaggtctttgtctctcgaagaggcttcctactttataatacccaggccttggccagacatgtggggatgaacagcctgagccttctgtttggagtccaaagggactgtttggacatggccagagttggccagggctcagcctgactcaccagcaagatctcgatggcccccaggatgtacatggctgctgcgaatgttgttcccaggtagaagcacaggcccacagcacctccaaattctggccccagtgaacgagagatcatgaaataggagcccccagctacagcagagaaatgaaagtgtgcacaggtcaaggctggttcttcttcaaggggtctccctgtgacaagcctgcacaaccacccagagggacagggactgcttttcctgtttgtggatgagtagaggggctgggagacctacccag

SEQ ID NO: 63582 - DNA, 763 bp, Homo sapiens
gggattctcattaggtcacttcttaaagcctcctgagacaaggcattcagtgcccatcctccctgctcactatgcttggcacccacttcccccagtgtgctcaccaccatgtggggaaacagtcaattccatggtgctgtgtctgtcttcccaggtgtggcccctctgccgccccaaccagctcacctcggctgccctccggcgggtgccctccccactctcggcctcctcatgctctttggcgccctgggtgaggttggtgtagctgacgagctttcccagaagagacgatacctttgggcggatgtccagctcttcctgcaaacagagccacagggcaagatggcattgggccaggtgggtgccagctgtgtggagccagctgcctggtccctggccctgttccaagccctgagacaggcctgggcctgatcccagttcctacctggggaagtccaagccatccaactggacaggtgtgcacaccacaccccagcacgtggcactcaaaggcccagccccgcggctgcttctctctaccccgccttggctacaatcactgccagcccatttgtgaaaaccacctgcctcaggggagagagggcagggaagaacacggctggcaggggggcaatggcatacttcatcctgcctgctctgcccagccacctcctggctatggctgcacctctaggactcacgcctaccctccccacaaaaaagccactctagtcacctcagggaaccaaagagggcaaaagag

SEQ ID NO: 63583 - DNA, 1848 bp, Homo sapiens
cagttatacagctcgtcttacttctctttctgctttggctgccaggaatctccaagctaaatttactctttagataaagtcaccatctgtctcacctgagtgcttgcccccttcctctgcatggttttcaatcttcctgagagtaacaatcacttggggagacacttttgttggctatttcttctgattcttttgtggaagtaggctggaaatcaattataatttattctaaactcatgtactacagcctgccccatcactgttgcctggtctttctgggtagactgtattgctatccagaaaatatacagctgagcacacagcagctccccacaaatgcctgtaaatggtcctctaagacctagcctatcccttgtcccttcagctatcactctaggatggctcggggcccttccaaaagttgtctctagttctcacagcaacattccagtagagagcatttactaccttttagggacaaggagagtgaagctcaaagatgttcagaggcaaggtcacccagggagaaggccacatctgggtcccagggtccatcagagccctgtaggggcggagctgcaggttccgttcctactacagactccagtccatctatgcagcacaatctttaaaaatagagaagagtgctgcaatttggccagggtacgcatacctaggcctctgggcattcagactgcggcagactggcttggattcccagaccttcccccgtgtgacccagggagacatgcttactccctgtgcggccttggtttcctcttctatgaagtggagattgtaacacttgtttttccaactgcccagatgcactagaaaagggacagttagtgccagacgcccagtgggcactcctcggagttcccccaaagctcccaagggcttgtgggaatgtaagggtctaagtagtgcctggatgtctgtactgccctcggcttcagacctcctgttctggcctcagccattccaaaaattccagggcaggtctggacatgcctgccaggctgaagctgctcagacaccacctgagatccccagtaaatctgaatatggcctaggcctagggactgcctgtgagctacacaactgtgttcccaccagcaactgtgactgcaccagtggcaggtggggatccaggtgaccctcctgatccctgtgtacacggacatctgcctgaggtgccccctccagcacctccctaccccctgcccacaggccaaggtgggctggatgagcaagcccatctaggcctcccagagcagaggtgtgggcactgaactggggaaggggcaggagatagatctgaggctcactgtgctttgtgccctctgaccctttgcagtccccaccaaggatcaaaatcactcaccggggctcagggtgtcccccatcctgtagacagccaaggtctggctggaaaggagtaagaggaggagaaagaggaagggaggcagtgggaggagctggcctagcttgcggggatctagcaggactcagccaatgtagctccaggtccctccagtcaccctgtaggggccaaggcgtggccaaggtggggccagcagctaggctcagctctgcctgcccactggtccaggctgatcctggggatgcagcccagtctaccctctggggagagaggtcctcccagggttagggaagcaggaatgctggcttttgctttgaccacttgaatcaagctaggggcagacaagggcatggaggctggggcactcacacagctgtcaagcctgtaaaacctctgcaatgtccagcagcccatgccactgtcctgtgctacctctgcacatggcagtcaagtgatacaca

SEQ ID NO: 63584 - DNA, 2219 bp, Homo sapiens
aaccacacacttcctacatatctccatcatgatcggtcacagatatcacaggcatttatcatcagtcaaatcaccatcctcatcactgtcaaccctgcaggaaacaggggctgtgagaatgccctgacctgaaccagccttcaccctgtgatacccacagctacacacttgtacaagcacaattacacatgcatatgccactacgtacacagacacatgtcctcagccgtgttcgtgctccgagggtgggccttaacaagaacagccctctggggggcctcctggggtaggagatagagaaagggctgtggagagacgcgggcacctgggaggaaggaggagggagatggggcttacctctcggccctggcacctaagttaaagagttaaggtgctggaatctcaaacccaggcttgactgcccctgggcaagttatataaccgccacccctcccttcactgcttcctaatgagagtaacagtacttatcccaagggtgatgctggaggattaaacgagttaactcacttcaagtgcctagacacgtccggctccatgtgagtgcttcactgaggcccactgtccctacagatctacaccggcgcactcacgggcagttacccatagaccccccagtaggcacactctggccagagtgcaggtaggcgcagagaggcacacggaggggtttgggcagttggggagcggatcgtctcaaaggcaaagacgctgaatctcaaatgaggaaccgaggcgagaaaaggatgtgggattcaccgaagttgaagggccgggaagggcctgagatggggtctcggccctgtccccaagccgggcggcccggccggctggcctccctgggcggccacgtctgcagcccccgcccggggcccacaggggaggagctggggtggagaaagcggccgggcgcgggcgccgggggccgaggaaaatcgtgtctgcgcgcgcagggcggggagccagtggcagcggcgcggtccaaaaaaagttgagtccgcaccgacgtgtgcgcgcaaggtcccgggataggtgcgggcgcgggcccgggatggcggccccgggtggcaggccccgctgccccgccacggcccctcagaacgcgccctcaccgtccgagtcatccagctcggcgcgctccccgtagtccacccaactgagcccctcgaggttgtcatagtcgccgcgcctcggcccgtccactggcaccacggtgaagtgaggcatcgtgcgggctcggccccgccgcacccgccgtcccagccgcccgccgctgtccccgccgctgtccccgccgccccgggccgacacgccccgcccgctcgcattcctccccgctgcgctcacttcctccgcccgccccccgggccgcccctcgggggcggagagcgggaggggctcggccggctcctcccagagcgggggccctggtggcgggaagacccctgggcgggagcactcctagtggctccacggcctgggggcgggcccgattcctgtgtgacctcgggtgagaggccgccctctctgagccccagatgcaacatttgtaaaatgggggaaacacacttccacctcggggttgttttagggctccgtgagatgggtcgcggagtgtcctggctctgcgccctgggcttacgaagcgctctgttacttagggacggggcagggtaggccggaccggcccaggactgcagaagccacctgcccagggcctcccaccaaccccgtatacctccttcccatttccagcgtctgcatcccatttctccgcgaccctgggaaccagacccccgcgaaggtcccgtcccagccctgggccctctagctgcagcctctcctgttggaggcagctggggattctcggtccctccccaggggctgctgcgtcctccgcaggaagaacacgcacacccacccttccccgccccgcttgcctcgcttgcctttttgggacagtgcactgggtgctgtagccaagtcccttcattttaactttctctatctcgcctcctgggtgttcctctatccaagccgtttacttatttgcttttaacgtttctttcactttcttctccactgcttcagattacttatctagctggctttactatttttttctctatcagaaaaccccagagcccatcttacttgtctatctccactcttctccctcgcgtggctcgggtggcgtcctc

SEQ ID NO: 63585 - DNA, 1073 bp, Homo sapiens
gcgcccagcgtggtgagggctctgggggggcctggcgtggtgtaggcacaggttacaggctggagcagcagcagcaggagcagcagactcagcagaggccaccgaccaaacgtgccgggaccctcgaggccggagggctgcatgttgtgcagggccgggcaggcaggcaggggtggcagtcagagagcctgagaggggcgggcgaggggcagagcgcgacgatggagtcccgaccctcgattcaggccacctggcggcgtggcctcaagaggagggtaacgaagtcacagggccccgcgaaggatgtgcggagagcggcggcaccgcccagtacggccaccagggggcgcccagccctcccgccgtcatccccaagggcgctcccgccggctgggcggatccctgtcctgggcgcccactcgcggcctgtcttagggccctccaccctcccttttactcctcccactgtccccagggggccgacccaggtggctcctctgctgcccctaggctctctctctaagagagagggcctggggtgcttcccccaaacagtggccctctgccctgccctgggagatctgcagaccacgtcatgtccccaaccgcctgcaacgtgtcccggccacacccagggccacatgtgtccctgtgaccacagtgctctgggctctggatttcctggtgctgggttgtgtgggtgggtgtgggggagaagataggctctggaaatgaggggttaaccctgtggactggattcaggaaggggccccctggccctgaccttctctctcccgtaacttaggccctcaagcctatactctggggaatctcccagctactaggacctgtcaggagcactcctccgccccccgccccgaccgcacattctccaatcagccttaggaaagagctccttcctaaggagctgccacacctccccaggaccccagtggagggatgagagcgcagcaagcatctggccactgccagggaacattcactcaacagagcaggaacccacacagccatctgcatggaaggaaatgaagtcttgtctagggcagcagagt

SEQ ID NO: 63586 - DNA, 2502 bp, Homo sapiens
tccacaccagtgctgtccaggccccgagaggctatgtctgtgcagagaagtatgtctcgggagctcttctggaaggactggaagattcctaccctcatcaaggctggcatttgcccctgcaaccttaggtgttggattttgtggtcatccagaatatatcccagccagttcacagtgctggagctattacagaacaccagaacagttcctgagggaccagtcctttctgctctgtcacgatgcttgaggatgtgcaccagctcggccaccttatctgctcccttcagtctcagaaatgtctgtttcacatgaggcatgatacagtggagcttggagctggtgatggtggtgacagcatctgggctggcgactttattcagcaactggcctacaccttcgggaaatgtggctcctaccagcactaactgagctttgggattgaaggggtcttccaagtcagctgggccttctgctatgtggctcttctctaagatgtagtccaccagttccaggaagctttcatccagcagtgtgtctgcctcatccaacaccaagaaggagagttgctccagactgatcagtcgacttttcagggccttccacagagcccctggagtggccacaagcacatctgctgaaggctgtctggacagctgcagcctgatcctacgcatgccgtggcctccctccaggtcccgcaccagcaggcccaaggagcggcccaagggttgggccacagcccgcacctgttgggccaattctcgggaaggaacaaggaccaggcctcggggcgcggggataggaagggagtccaggcttggctggcccaagagccgttgaagcagcggcaggaggtagctgagagtcttgccactgccggtttctgcggcgcaaacgacatggcggccgcgaagtagtgaggggatggtgctagactgcacggttgtgggctgaacgacttcaggcgcagcctcctgtagtgcgtgcagcacacggggctccaggcccaggtcagcaaagctgcccttagacgagagctttcgcaccgctggcgcctcctgttgcgcgcgctcgatggagaagtggtcccgacgcgcgcgtcgactcttccagccttgagaggctagcggcgcgcgctcccaacggcccagtgtgaggcgcgccggctggttcaactccggccgccgcgccgaaaccagcagcggtccgggtcgaaccagcaccggcctcgggaggttccgccgcctgctctgccgctgttccaactgccgctgtagagccactgggatgcgcaccaccggcaggggttcgtcgggactgcggaccgtgaggccccgtcgcggcgccaggagcaaccgagtcacgagggaaaagagccgcaccggccgcgttagagccatgtttcccttagtgcgggagaagcgcacatcagtgacgtcacggacgcgccgcgacctcgcgtacggtggctggcgaggctcagtacggtgtgtggagctggagcaccgtgaggaagaagcgaggttctttttaagagttcagctgcgaggtctgtagctccgaataggggatggcgacatccagacccggccagccttggggaagggcgcgtcgtggaggcaggactggaggctggcgatacgaggcggcagtggggccttgacccaatggaccatgagggcggagggcttctggcgattggttacctggttcctgggattctctttagttgttcctcattgccctgagatagcttgtcccgtgctggtatccgaggttgcagctgttttcccagatgtgttccctgcgcagggtctggtaatccgtgtttattgagagtttgaatgaatgatcaggcctaggggccgagacaggggtctgaagtcatagatctgggctcaacccctcaccctctctgtctgtgagcccagagtgcaagctgatggctttcagcttcttctctctctcaagtgggagataaggtcttcaggttttatttcaagttgggtcatcttttcttcacagttattttccttccttttaagccaaggttcactctctactccctcgtcacgcgtcccaacttctcatccagaacccacccctcttgcagcccgctcagctccactggcttccccgtcagaaacctgaattacctaaaatagtagtaagaagggtgctgcgaccctacaaagtgatcaagtacgtggcttatcatgtagccctggtcaggcagaatattttacctgaattcagatattcgggttgtaaaaacaagaactatacgagtcactttttttttttttttttctgagacacagtctcgttctgtcacccaggctggagtgcagtggcgcaatctcggctcactgcaacctccacctcctgggttcaggtgattctcctgcctctgcctcccaagtagctgagactacagccgtacaccacccacgcccggctaattttttctgtttttagtagagacagggtttcactatgtag

SEQ ID NO: 63587 - DNA, 894 bp, Homo sapiens
gatgagaggtgatatggaatctggaagaaagactagggtaactggtgctgcagtaagggactagtccagtggggtggggagtgttggtctgatccccagagtctccaagcctgacagctgcctggagtctcagacctgatgaggtgcctgctttggacagtggggcactggaggcggctgatgacagcaatttggggcccttatgtttggcagatcacaccacacagtccctcccgtcccccgccttcctcatcccacttggggcggaaggaagtggcagattctctttaatttcctcctggcagtgagaagcaaacaaacggctaccgcatctcatggggcctcccccgcttactgggaggggcgttctgaccaaaggtccctgccctgtcctgcccccgcttcctcagctgtaaacatgctgcttctcctccctttttccaggctccattggggagtggggaggggaggagtcccctctgggtcaaagctgtatttcccacatctcccctgtgtcagagctttactgttttgtggcaactttaacacagggtcaggcacctgtgccagccagcagcctctggccctgctggcctctgagtctagggtttggtgggtgaggcctctgtctcagttccagcaccgcccccctcccccctgccacccacgcttgcttttctgtgtgcagataaggataccgcactacccactgcctcccagagctcattgctgtttgaccttgggcaactcacttctagtcctctctgtcctgagggccctcctcttagaggggatccgctgtcctctgcctgtgtgaggctggctggaggacagtaggctggccctttgataggactctgcatggttaatggggtcattccatgccaggctgcc

SEQ ID NO: 63588 - DNA, 2865 bp, Homo sapiens
ttttttttctctctttttttttaacctattgtagcctctgagagggcagcatttttgggcgcacctgcacccaagcctctgacagtgccctgggttcctccagcaacgcgcatctagggatgctatgccctgtgggccctatgcccggggcacggagctaggggaggcggtcaccctacttctctcacgtccctgtccaccttgcgcctcagcggagccttaggtaaacaagccaggctcccagtccccaaggacggccttcaccccagaccccaggaggaggcgtcttgggccatctcgggaaggctagcttgctcgggaggggcagatcacgaaaacggttctttaggcagtgtcacttcctctccactgccagccacccaatttaggcggctccatccctcccgctttcatggatatgcagcaggatgcagagagcacagagctgtgattggcacgagctcacaacgggctttcccgctcaatctactcaacttccagcaagggacaggccctgcccattggggttcgctgaggcctcaaacgcgcatgctgtcaagggagcagctgcgggggcccgctagtggggacaaaggcgcagccaccggggcgaaagctccgccccgcagagggtgggcctgcggcgaccgcgagctcagagtccggacttgtcgcgcaatctgtctccttcggttccaccccaacctagctggactctcggtccggtccctgccctctggagactcagccattaaagttgaggtggggggatgaggatgtgggcggcgtccaggtaactctgaggggccctgatgccttccctagagccagccatcaggagtaacacgatgcgcccccacatcaccgaacccagaacctcagtgcttcagcaccccttcctcgacatgagctccgcccaatgaggagaagggtcttctgcattggccggtggtggtcccctatccaattagagaggctaacggccttctctcgtctggtttagaaggaatcgccgggggaatacaggccaaactacaattcccgagaggtagctgggctctgcgggggggggggggggggcgcctgcgtgttcacgtgacttccttccttctcgcggagaccgagttacgcgataggcctgtgagggggcggggcccggcgcctgttcgccgtgttagtggccaatcggcagccaggcagggtgggcgcgcgtagggggcggggccgggcgcgcggcagggcgcgagagcgcacccgcggcggcggtggcggcgactgtgggggggcggcggggaacattggctaagccgacagtggaggcttaggcaccggtggcgggcggctgcggttcctggtgctgctcggcgcgcggccagctttcggaacggaacgctcggcgtcgcgggccccgcccggaaagtttgccgtggagtcgcgacctcttggcccgcgcggcccggcatgaagcggcgttgaggagctgctgccgccgcttgccgctgccgccgccgccgcctgaggaggagctgcagcaccctgggccacgccgatgactactgcaaactgtggcgcccacgacgagctcgacttcaaactcgtctttggcgaggacggggcgccggcgccgccgcccccgggctcgcggcctgcaggtgggtgccgggccaggcgggaccgtggagcgaccccgcttctcgctcgcaggatctctcgctccctccctgttcccttggatgaccggagaccgataaccctgtgtgtgtgtgtgcgcgcgcgtgtgtgtggtgagttaaaaacggatttaaatcgctgaggaggcgtgtgggtcgctgcgacgtggaagtggtggcgggcttggctggaagcaaactagtggggaactcgactccgggacgatcggggtttggaggcccagggtccgggctgctgcccaagtggcgtctggttgtcgttgctttgccagtgtgttgcaaggaaaatgttgtccctgtgaattgttagcgcactgggtttttcatctattctaggtcgtttcttgaaattttagtttgaaagatgcttatttttcaacggtaggacccctctaaaaatcaggcacgtgtttttttaagtctactttgctagaagagtaatgctttcgagttaacgtccactcgtgcaagtttatgacccacaattaattcgaagtgtaactgtaacgggacttttctggaaactggatttccttacttgaataaagtgttccggaagattttttttttaatagtgggttgcttttttcataattttcctagaaagttctagaagtcgatttttatttaaagaaaaatctctccttggaagatattttaaaggaaatcttgaattgggaaagctgggcaccatcatgcttgcaggtcagaccaatcaggaaatagaaacaggatgactggggacttagagctcttttgtgacctggtttggaatactgtggttcattaagttcagtttccctgttacatatgcatacgaacttcaaaaaggaaatggataagagtaatccctattttttcttgcctggtatgaggtgaatttcttaatgttcatgtttgatgttcagtagactgttctgtagagttgcattgaaaaaacatacctgaacgtgaggcatgaggattctctaggcggtacttattttatcggtccttttagtcttcatatgctagatgtctttttcactgtagtacataatttataatagttatgtgttggctgcgtttattttcaattccattaacataatttgagcacctattacgtcgaaccactcttacggaccctgtagtgttatgatgaggcagaggactgaggcttttcaaggagttt

SEQ ID NO: 63589 - DNA, 873 bp, Homo sapiens
aaatgtagtattactttttcttcagagaaagtcataaatagtgatatataaaatggggaccttttaagagaagttaatgagttgtatcactgatttccctctcattattgctagttgagtagtagataattcagtatggtaatgttttgttttaaataagaggtgaggttgaagaagccataatatagtgaaggcagtcacattgctcttaaaagataggaaacctgagtaggttgagcctcatttgatagtaagcagtagtttgctcacagcagtaacataaataaggaaggtgttgtgtaaagctgtcctggtgggtcaggggagtagacacagcagacttggcagtaggcctggcttctaaaacaatatccaagtcatcaaatttgcccaggcatgccatatgaggttcaagtaacagtggaatttaagaggagtgagtttgttcagggaggcttgggagagtcacaagcaagagcaagcttttttaagagccatcatttaaactcaaacataatgtgggtctgcatatattttggcatgtctagtaatgtttacgtaattatattgtatgactttcacctgttggcaattggggctctaagatttaagtaacagcctatgaattgctagtttaccaacagctgaaatttaatctttgggacagttctagttaatattagttaatattcatgtgtgaggctgggcgcggtggctctcacctgtgtaatcccagcactttgggaggctgaggcgggtggatcacctgaggtcaggagttcgagactagcctggccaacatgatgaaaccctgtctttactaaaaatacaaaaaattagctggatgtggtggcgggcgctgtaatcccggct

SEQ ID NO: 63590 - DNA, 758 bp, Homo sapiens
tttcaaattgggcagaaatgtcagatttgtagctccatcactctactatactgtgggtaatagattgaagaagacaggaatggaggtggggacacatgtatttgagaaatgataagggtagagcagtgaagacgacaaagtgggaatagtgctcagatagatttacaggaaagaaatcaataggacctggtatccattgagtaaggaaagggaaggaggcaggattatttctatttttctagtttgggtcagttgtggtaggagaattagctttggaggtggggagggagaaaggtgattcattttaataaaatgtgctattacaaaatgtctgtggaaatagtggtgaacaagacatggcccttgccttcatgaagtgcacagtctagtaattattaatgtaactagtgtcatgaaaatacaaagtgcaaagtataaagtgcaatgagagtatatagtaaaaaggagttcagttttgtgtatgtctagtttgaagcatctgtagatttattaggcaattggaaatataagtgtagagctcaaaagagaaacttgcacaaaagagatttgaaagttattggtctatagatattgatgatagttgaagtcatgggcatggatgaagtcactgcaacagagtgtggattataatgtgaaaaggaggctgagaacaggactctggaaacaacagtattgcaaggatggcaaggagagaagtctgagaagatactgtcacagagttaaattagacaatcaag

SEQ ID NO: 63591 - DNA, 4568 bp, Homo sapiens
gtgcaggacctgtcgcaatagctgctgcccatcagtgcagagcatgtaggggcccccgcccagcaaagccacatccccgttcaccagctgtgagaactggggatagggaatggggagagagaaacacacagattcacagctgggcaggcaggaagtgagggtaggaggaaggaggcaggctgcaaagctggttcagccagatgttcagccctatcctgcctgggaataagaggccacgcctgttgagcctagccctatgtcccttcccctcaccccccaaccctgttccagtccactgtcacctcctccaggccaaatgagggcaatcacatataaccgaagccctcaacacacacactccaggagtttggagtggggccagagcaaacacctggagtgggacaagcaggtgggaaggggcggggcaaagcaggttaaacctgtctttgaccgggtaccaccctcagacaggtgggggaggcccaggcctgcctgaggcccagaaggctcatggtcaatggcagccccgcctccaggtctgaccaaccgaggggcagagaaactccaaggacagagctccacacttggacatcaggggcagcatgagctttgacccacatcctattgaccggctggcactgagctgtttgctcatagagggggtggcactcctgaggctgcccagccctcccccagcctccatccttgctggagaagtataaacactaatcagtgacccacgaaccctccctgccaattctgtgacactttacaacttggggctgacagagcaaggcaacccagctctcctccagcaaactccccaagtgaagggccgggagcccttctggaacagacaaggaatcatcatcgtggtgcctcctcatcaggaaccacaagagttgttggaagatgaaagaacgtgagtgtataaaaaggacttacactaattacactcaagagtcagacatagaatgagcgccgtagtgaagataaggaaaagaaaacagcaatggaaaccacctcccacttcagctagggcaggaggcaccccaggcctttgcactcagcaggcagatagtcccccaggccaggccgggacagcgcccacgcctggccagccggccgggacaggcctagacgagcagtttacacctggcggcgtctacctctagggccgacaccgccctacgcctccgctccagcagctcccaagcaggccgaagacgcgggccgcaaggacaggtgacctatatgggcccctcgacccctttcgcttccggctgcggctcagggagacctgacccagcaggtctcccaaaggcgtctcggcctcgctccccgggcgggaactggggatggatcccaaagcctgcgtcccgatcccttcggtaggagtaggttcctgcaatggttgaaaagtaaggagcccaggggaatggctggcacgcgcggatgaaaggggcacgcacacgcgagagtcgctcaaagtttcaaacaagagcccagtcctgccgcctggaccggttggttgcggcacgccaggcctagcctccggccgccaatcccgcccagaaatgtcctcacgtccaggccatgccgccacccaccccggcgctcacctgctgcagcaccttgtccagcggctctgcccgcgccaggctgtcggcgctcaggccgctcgcctcgcggcactgcgtactcagtgcggccgcctcggcacgaaccagcgatttgtgcagcgtccccacctgtgagcggcgggggaaaccgatcagccgcgcccctcgaccccggaagctccctggggacctcaccgcctcttttccaccctacctggcggctccgcggctcaaccacttgccaaactaggaggattaagtcggtctcgtccgagcccaggtcccgtcccagcgcacccgccgtagccccgaagaggacgaccagtgatccgggccaggggcaggggtccgcggcggggtcggccgcggggtcagggcccgggggagggggcggcggcggcggcggagtcatggccgcagaggaagggggctctcggccagacacgcggaccgacgaggcgcacgcacgcaccgaccgaccgcagacgcggatcagcttgggcgggacaccgtgtatcgggggcggcacctgcggcccggctggctcagtgggcgctgccaagacccgcccgtggcgccccgcggggcggggcggctaccggcccacgccctctccaggcgagttacctgccggccccgccggccacgtgaccggggcggctccgggaaccttgggggagggccgccagaactcaacccaggacgcaagagctcacgctcccggcctgggcgcacgcttaggatccggattcctacttccagggctggtcctgcctgattttgggggctaacccattcttccgctctccccccactcttccccaggggtcgtcaggcctctgcaaaggagcgtgcaagacagaggccttctccagtatggaagtcaccaggaggcagtctaggggctgtgggggtcaacacggcaggtctggggttgatggaagtcaaagggtcaagggggcggtgagagttgccgggtatcaccctgtagggggatcaccagaagtcacctgggaaaggggagggcggcgggaacatcagcgttgttagagctgtggggtggtcaccagggatcacagggaagggcttgtccacgcagatgctagggccgagcgctagcctggcactgagaagtgccagagcgcggtcgttgtgggttgggagtgggcaggcctcaatgctggggaaaggaaccccccaaatcgcagagagctgcaccctagacgaggctgagaggggtagaacgggcctggagcctcactcctaccccacgtgtgggggcctgcctgctttcgtccctttctggacggtggagaagctgcctggagattgcgagcgctctggccgatggggggctagcgttgagcgtgtgtgcgcgcatgcgggctgcagatcctcccttttccatcccgcacctacaacccaattgacagccccgcatttggggctcccattcctccctttgcccagtggagcttggtgaggctcctttatggcgcgtttcccggccgttccttactttcccaaactctcccagggaggtgactgagaaactgaataagtgactgagaaactgaataatccagcaggaaggagggggctccagcgtggcgggaactgagtcacgcggttgcctagcccgactcgagactgagacgggagccgcaccacgcgctttcggacaaggagggtgctgcggcccggcccctggacaatggagagagcggggcacccgggcgcatcaccagagctcatgcccgggaaaggggcgaggcccggggggagagagctcagcgtagctccacttggcagctaaagaaacaggcgcccgggacggaaatgactcgcgcccggacacggcgacagggagagcatgggaagtgcttccttcgcccggcgggttcgagcgagtagcactttactttccctacaggtggaggcgggccttggtgcgcggctgtccatctccggaccgcccacccgggcactggcccatgcgtctcctcccccggaagcggtaagcgaatcaggcgcgggggaagggagaacgttgctcctcgggcccctcctcccgataagcctggaatgtcaaatatttgttcgcggggcggggcgcaaccgcgagtaacgctcctccccctcccgcccggtagggcgcctgcgcttggtggaggcggcccttcctccggccacgcccttccagccaactcccctaaaccagtggccctaaccgccgcattcctaaagctccacagaagcacgtcgcttcctccttggctcctgtctgggttccactcttacagcacagggtcacagcgtccccgcccgaaggtctgggcgctactcggtctccttctcgcccctcctggcgacctcatctgtgcagcctctaggccctttttcctcttcagcctgagtctcgacgcccgctcttcccggaagccaccttcgcgaggtgactgctccattgtggcgtctctggcagtcctgagcgctttcccacggaagacgcgcttatgcgtgtccaagtcgccgctgggtcgtgaacctgaggcacgggctggtagcacagtgcggctcccctaaactaccccggatgcccatccggctgcccccatagcaagacaactcctgcaacttagattctttttattttattttatttttttaatttttattattcttttctttgagacggagttttgctcttgttgcccagactggagtgcaatggcgcgatctcggcttactgcaacctccgcctcctgggttcaagcgattctcctgcctcagcctcccaagtagctgggattacaggcgtgcaccaccacgcctgtatttttttagtagagacggggtttcaccatgttgatcaggctggatggtctcgaactcctgacctcaggtgatccacccgcctcggtctcccagtgctgggattacggg

SEQ ID NO: 63592 - DNA, 587 bp, Homo sapiens
ctttctcaaaaccgcgtgccagatatttggaagaaagaactgggttccgtgggcctcatactcgcgaaattttaccctcaccttggccctcaggcctgcctgggctgcactcctaaaggcagccggcgctgttgcctcggggacatgaaagcccgggcagatacagggtgggaggcgggaagcgtggcgggtctcctggaacctccagggcgtctaggagtggtgcgaaaacgccctccctccttcccttcgctaccaagaaagatctcgcagtggaagaggattcgacgctggggatcaccgcggagatccacactcgtctgcccagacccgtccccgctctcagcgaccctccttatgtcccgggccaccccactagccagcgcgttgggccccacctcccgggttgggatccccgcacctgtgcagagtggctgccgagcacccgccagagggcgcgctgactccgttgccagaaccaggggggcaggggcgtgcgcccgaggtcgagcaaagcaccagtacagtggtgaaaagggggtcccctagatgcccccatcaggccaataccctttggctttgttttt

SEQ ID NO: 63593 - DNA, 1477 bp, Homo sapiens
gggtgggtgtgtggaggatcaagacctctatttcccaaatactctcgtccctctatcccacagtgacctatggtgctggcatataaccagctgtcaggtctttgcccactctgttcgcccctgcttcctggcgcagggagtccatgtcctctctggttccccaggtttgcgagagtggagggggaccacgagctcccgatgcctctcctgctctgcaggggaacttgcagatggcccatggcgcagggtcgagactcaagcccactcccaaccccgcgcccgaactgcccggactggcggggtgacgctgcactctgcgcccctaaaacgaacagattaacccctctcttgggaactgaacatgctgacctggcctctcccggttccccccgcatctgtaaccccggggcagagttacaggggctgactggccgcacccaggtgccctcggggcagggtgtgctaagaattggtgtgggggctgcacaaaggtcctggtcagctcctggtcacctgaggcccaagaactgtccgggactcacttcctctcttcttgctttaaccggggtcgctcagcagcggccagcgctgcaccccttatcctctcccggtcttgtccgttccagatcctccaggtcagggggtcgccaagtgagagctgcgcagcgtggatttcgggtacccagggctgggcggggtacagcagcggcgagctgggttcccgggtgggcgactgacagcccggagccaggcgatacctcgatccatcgatgcgctcggcgctcagcgtggtccaggaagcagggggttgggcaagggcggggcggcgacctccgactgggaggggcgtatatggcggcgagtccctattggccagccatttgcgggaggcgggccctgattggccggggggatgcgggggatgcgggcggcggggttaagcgcgtcgccaccgcccccgcctaggcgagagcccagagagctgaacctgcatcccggacctgcggcgaccgtcgtacaccatgggcctccacctccgcccctaccgtgtggggctgctcccggatggcctcctgttcctcttgctgctgctaatgctgctcgcggacccagcgctcccggccggacgtcaccccccagtggtgctgggtgaggcacgggtctcgtggtggatctgtcggtcgggcgggacgggccgcgggcggggctgccttcccggtctgcttctgttccagtcacgaaatgggggagcgtattggtatctgtcttgtcacttaggtgatctagatctgccggctcacctcccgccatgctgggcgcgggtgtggtcagctccccacctcctgtcctggtagaaaatgggggtgagtgggagagttaccatctggttattcatagttccacctgtccgcatcattcccaagccttgcctccccttatcccatttttaagctggaaagacaggtgcttcagcccc

SEQ ID NO: 63594 - DNA, 2682 bp, Homo sapiens
agccgttgtggctggggagaagaaaacgaggtataggccgtgggaggagtggggaggaagggtctgaggtgctacccatctctggctgggtccctgtcactgggtggcagggagcagggtcttgggtatggtctggaaccagaggacgtgtacttgtggtcataaggctgggggaaaagattccagggccctggagaaagtcagtgcttgaggtgtggacaggaaatttcggaggagggctcaggcgcccatgaggtcaggaggctctagacagagagccccagagccaccagaggaaaaggaactcgagagaaagatggaggagcaaacagagggaggggaagggggcaggaggtgcagctcccccaagagggggggcaggaggtgcagctcccccaagaggggtggcagccctcttgggaagatgaggacagagccccagggaggcctggggttggcaaagggagcctgcagtttctttgtgggtgcgggggcctcaagggctacgagtctgagctgtgcgtgtgtttggacaagtccccagagtgtgtgtcttcctggggttcctagactgcgagtggcagtggcccggcggcggaggccgtttggatccctgtgtgagctgtagggggcgccctgggcgtcgggcccaggtcaagtgcgagataggaacggggtgcgggggccgatgagagctccccgcgggaatgtccgctgtggacgccctcggaggccccatctaactccagggcggcgagcgtggccgggcccagttcacgggctgctcgagccctgacgaggcagctgggggctgtctggcgtccacgctcacgttctgggccggcggaccccgtaccggccaggccgtggcggccacgggggcccggaagcgccgccgccagctggccccgcacggaactgtgtcccgacgcggcgcgcgctgtcgcgatccggcggcgggtgacgtggcggggcggggcctgagctgccgcggcggcggcggcgcgaccgagcatcctggcggcgccgggccactgggaggtaacgggctgggccatgggcgggcgcgccgggagcggggccggggctgggccgcgttctgtgggagccgaaccctgtgggtcttcgctgccgccgtcgggagcgggatgcggcccagaaacagcgcggggctggccgatcggggccgcgcgagaggcgctgcgggtgagggggggcgccacgaggagagagggacctcgagcgtgagggccgagtgtgggagaaacgctgtatgggtgcgagccccggaggctgatggtgaccgcgagggagccagtcttggggtgtgctggcgacgcggcgagtgtgagggagaccgggggtgtgtgtggagagggaaaccccaggtgcgagggtgaccgggacgctgagtgcgcgggccgcgccgcgagcgtgagactgtgcgacggtgaccctgagtggggctgtgactgcgcctccgactgcaggacggagaacctgtgctgtgtggcggccgcggtggggcaaagaaagacgcgggctcaggacctcaggagccaggcttcctggggctgtcgcaagaatgacgattatcattttaaaatcagtccttttactttagagaatgccgcaaggttttgtggcgtgctggagcctggagcgttgggctgctggcgctggggaacccgcgtgcccctggtgattatggctcttttgagcgtccctatagcctgtcatcttgtgtgactatctctcctgaatgtggggagatagacgtgaaacattctgaaaattctttgctgggctctaagcaaacatgttgtgtaatggtcagtataaataggaatcagggtgtcggcgaacacgtttttgagtacctcttgtatgccctgggcttggtgacacagttaaaaagaattcagtctctgcccttgataggggaaaaagccagggcagctcatctcgcagggcggctgttcagtgcccagccatccggggcttgtctctcagaactgctcccagatttcagatctgggaggagcagacttgaaaggctgtgagtacttccttatatcagttccacctctttttggtggcggtgaggccttttggggacctgcccaggctgcctgcattactcaggtcccatgtgtgctgcgcagacggcttttgcttcccaactttgatctcagatcgttattcaagtcgttacactggagtttattttcctggcaagtgtgtggaaaaccaccagcctgattttctcctctcttcctctccttgtcctccttccctatttggccgtggatgtatttttattgcatataccggttttatgatccccatctccctggaacttcttagtagaagaaatttcctgacctttgtgcttcctgctgtaatttcttggatgtatattagtttctaaaaaagttatgcaggccgggcgcggtggctcagtcctgtaatcccagcactttgggaggccgaggcaggcggatcacggggtcaggagatcgagaccatcctggctaacatggtgaaatcccgtctctactaaaaatacaaaaattgagccaggtgtggtggtgggcacctgtagtcccacctactcgggaggctgaggcaggagaatggcttgaacccgggaggcggaggttgcagtgagccaagattgcg

SEQ ID NO: 63595 - DNA, 2440 bp, Homo sapiens
gattaaatgtgagaaaacttgcattctagacctaaatctacctcaaacttgatatgctatccaggactattcctttaacctctctttgatcaattttcctacctgctctatctctattttgctccagtgatccccatctcagtcagggtgaaaggcaatgtccttgcaagtacctagcaggcatcctcccctcaaattccttactgctctcctctagctcaccgggctccaggcaccttgcaaggagcaaagaaacggcttaagggcctctttactttcaggttctctgcctagaagtcctctcgatatgtggaataccctgccattcaccttctgcaagtcttcactcaaatgtcatttcctcagtgacactctcactgaagtggcaccactcttcctgctttgtctccccgcctccttacatcccttatcatcatctgacactgaatagacttgtttactgtttctgtctacctgcatgttaggtcctcactgctgtatccacagaatctaaaaaaatacctggcatatcgtaggcacgtagtaaacacatgttggatgaacaaccaaatctgtaaaatgaggccgtcacgccggatggatcatccatccccttaagatgaaactgtgctgcgactgggcccagtcttcttgcattaccatcctgagaagcccagcgaccaccttcaggggcatactcactttgcaggagcctgcagaggcggcttcaggttctccctcctcgtggacaaggtctaacaactgaaagcccgagttcccggcggcttctgggttccccggcgtgtactcggactcctggccgctcgaggtggtccccaaggatcggcggctggaaagcacccggtagcggccctcctgccggacctcccgagccgaggcgcggagattacggcggacacgctgctggctgtcccgtgacgggcgcagaacttcccgcaggagaggctggactggttcctcctagggggcaacaggggacggaggccagcgtaagcaggagttcgcgagcgggtcagggatcgggtttcgtaccggctgcacccgaagatgccctccacaccagctgcaccacgcccaatacctgggagcacacagtggccaccaagtggaagacattattctccgccgctctctccaaaccctccgacgtcttctgtgccgctgactcgaccgcgtcgctccggaggcgtttacaagcgagcacaagagcctccgccggctccgcactgcgcttccgcttcacccggagtacagcggtcctggcggcctccatagtggctgccgctgagcactgtgggagctcgcggggtgtgatgggatagctttccagttctgctttaggacccgccccccagcacgctcctcgacgctgcgaggtcccgccccgcgtgctggccgcggtaaaagtggtagcagcggaggcgagcggagggtttcccgcggcgggtgaggcgctgggtatgctgggaaggtggggtcgctttggggttctgtgtgcagcgagcatggtgtccttggcaccagggtttcggcagaggagcctagcgtgggcctacttggactcctccgcgtggggcagctcgggacacccgggcctgcaggagagcggggttctaggctggccccggctctgcagtgcagccgggtgcctgccactcgcggggctctgtcgcagtactcgtgcctggcgcctcccctcagccacagagaccgcagtagctccaaccatcgcacccctaactgggccacgagttctctgattgccagacctgttgtctttgccactcactgttctgagtaattggagagtcgtgtattcactacacgccaaccagagtggtcctgtaaaagcgtaagcctagtgtagatacgcttctgcttaaaactcttgagtggctcccagtgcttttagaacaaaatccaaacgcctttccgaagtcgacaaggcccagcttgattgagcagaagatgtgataggagatgaggagcggggggcttctgcaaaagtgcttcggtcgctcaggcttttggcacattttgcttatgcaacctagttctttctaccttagggccttttcttgggaaagttggggtaaggattcctgacctgtaaaaactcttccccaacttttatcccggtctgtcttgtagatctcaaatgctagtttcctcagagtccttctgtaaccttggttttctctttctacaacgctctgtgtatttcttgcattcatgtagtctgtaatttgtattactctctcattagagtctaagctcttggagggcaagggtcttctctagcttgtggtggtggctccagtccctaatatagtgcctggcacatagaaggtatttaataaattttgttattttattttttcgagacagagtctcactctgctgcctaggctgagtgcag

SEQ ID NO: 63596 - DNA, 1021 bp, Homo sapiens
ctataagcacatttattttagctttttgaacatccttatcttctgttcccaccatctttgttttttctgggtttgttctcttgactcatttttatccttattctgggtcacattttccttcttcacatgtctaaccatttttgtttggatgctgtggctatttggaattccccattgttgagtgctagacttcgttggttttgctttttaaactttggcatgcagttgggttacttgcagttcagattgatcctttcagggcttgtttaagctttctttggagtggggttagagtagctttaagtcaggccttctcaacagtagtgctgtgacgttttggcattctccaactatgtgacattttgataattctttgttgtggaccctgtcctttgcattgtaggatgtttagcagtgtccctggcctcttcccagtggatgtcagtagcactcccctcctcccaccattcttgccaactaaaaatgtctccagactgccacgtcttccttggtctcgagtgtgtaaaattgccacctgttgagaaccactgctctaaggctgtttagccagacagttactgtaacctttctggagtgtctgctgagagctctaggtgctcagcagggtttcccttgtctggctgatcagaacttgaatgtttcccaggcctctgagagctccggagattgttatcactcatgcaacctttgctcggcttcacagagtattaccctgtgtgtgtgtgaatgtattaacacagaccctagaggaaccctgtgcagcattctgaaggctttttttctgtgtaatttcctctctgattctctgcctggcaagttccagctgcttccacttccctgaactcgtttcctgtctgtttaactcagcaagactgccgtgctctgtgtcacctcttaccctatactgtggtctggaaagggtctcctggctgatagccagagcagggtaagggttacttggtttgtttcccttcttagggagcaaactgtgttgcctctt

SEQ ID NO: 63597 - DNA, 891 bp, Homo sapiens
ctgagctcattctgcccttgtccagcatctccagatctccctctacccccaggatcgatccttctacctggcctggcttgaggaccccagtgaccaggccctgccctcctcagtctcgtttctgcccctctttctcccactgatttgatgtgatggccccgacctctagctttcactgttcctgggacataccatgctctttcacgcctccatgcctttgcacatgctgtaccctgtgtctggaacaccctggtggtccacctgacacccctcctccaaggctcagctctaaagcttccaaccccctcccctcagtctcacaccctggggctttgtactggcagcgtagagccccctgagctccaagcacagggcccagtccctgacaggcattccaggaacctcggtggaatcaataaagtgatttctagccaggcgggcatgtccatcaccagaaggttcgattccctttgtacacaccagggggcacagcaggagctgtgagaaactgctcccaattgtttgaattattgcctcaatgaggctactttgtggtaaaacaaaagaaaacaaaacgaaaatgcaagatggagacttgaaatttaaaagctgtgtgaactcacgtgtgtgttgtgagtgcctatagcttactggaatcatcatcttcatcaacatgattatataaaaaatgttttggggtacccactgtgtgccaggcactgtgttcagagcattccctgcacaacgtcttgtttcatcccctaagcagcctggggagggtaggtattattgatcccgtactcagagatgaaaactgaggcttggaggggcataagtgacttgctcagtcacacagcagagggtggcacagattctgtgagcaagacttat

SEQ ID NO: 63598 - DNA, 879 bp, Homo sapiens
ggatggctggggctagtggtggatgagcagaagtgtccagccctctgaaggccaggatggtgcctggaaagagggaagcctgtcgccctcggtagcggcaggtccagctgaggattgctgctgagccccaaatagctccgtgtccattcatcagactcagcataattgggcatctgccactggcatctccagatgtttgcctttatcagacgccgatgtggttcagagttttcactgagagcctcgtaaaagctctagctggttggggacgcttattgttcattttatttgagttctttatcatgtgcaaaatgttccaggcaccattaggagacacaaaagactcagaaaacacagtttcagggggcggaagctcaccgtagcgtggaggagacacggccacagacatttacaaacatttgctgaacacagtcagctggcaggaatgaaaaatccgctctcagcagcacatcggggcatgggggtagggcagtagagactgaggatttaatgcttgcctgggggaatcttgtaaaatcggatggctgttctgggctgtttgctcattaatgtggtctttagattcctgctcagtaagattgggacgtggggccagaaatagggcagaagcttgatcaggagaatattgaagggagactcgtcttgcttgaggtgaacatttgagggctgtgtccaggcacactgtaattactgcttaaccataagtgtagcttggcaagatgcatggatttatacataggttgctaagggcatttagggaaaaccaaacgtaggcgaggagaactgtctccatcaatttataacattcatgtctgagacagcatcatggaagggcagacaaccctgctcttaggcata

SEQ ID NO: 63599 - DNA, 754 bp, Homo sapiens
agataattgcataaataaaacttcaatctgcaaagggaaaattattttctcaacctcatttcatggaaagacaatgaaaaagctagttaaattcattgtagccacacataaagctgcctatggaattaatgtgactactgttacctttgagctatgaggaatattctgcccatatgggtatttaattatttgtgaatttatacaagagagtcaggggtaacttctgggaaaatgggggagatattttaagaatatttagaaaagaaaagattgatttagaaatttttttggtgagaagtaaagcctgggcaatgctgacagacatgcccactaagatctgggtgactctgggatggctcccattcaatcagcatattgctgaatgaatcatttcaggtcaaggccagggacctggacctaggcatttggcagtgtctcgcctgtccttaggtagaggctgtgttctatttctctggtctgcccagacagtgcctggtacattttgcacataaataactcaaccatggttctgtctctcctgggttgagaactccaggagggcaaaaacacattcccagcatccctgaggtttctgcctggtactggcagctgataccactactgccagtgttggacgataatagctcacaaactaaaaacaggaaaggtgggcagttatgaagtgttggatgagtgggcacaatcctgaagtgggctttgctttagaaggatctgttgtgcacccccactcccc

SEQ ID NO: 63600 - DNA, 669 bp, Homo sapiens
ctaaggcttaatgtagaaccaagccccacggatgtcagacacaggtgtacccacaaggaaatgaatgttgattcaataaccttatttgatctttgacaaccccatttattatgtcattatggggactggagactggaggaagagaaaacaaagagtggtgagctggctcaccctggtcacactgacaaccagttcatgaccatgtcaagaagcttctgtgggtctccccacagtggcctggagctgactcctggctgacctagtagcttgtccctactgcttggcctccataaaagtgactcattgatgaaagttgccagggggagctactgaatatctgaaggagagacatgcttctgaaaactgtgaaacaatgaaaagctcttaacaattgatttaaaatcaatatggtgtggaaatagcacccaaaatagaaatatcctcaagaggccaagggatagatgtacattcgtcattgctgtttctgtcactgcactcattttccaaccctgactgtgtgtacacatgtaaatatttcatacggattcagcctcacactgggctgttcaactttttattaataacaagaataataataacctcatttgtggagtgcttctttctgccagctactttaaatttactcatttaatcctgccatcaatccac

SEQ ID NO: 63601 - DNA, 842 bp, Homo sapiens
ccctcatacccaagagccttctccatgataaaacgaaaactaacccaagctgctccgacctccggcgcccggccacgggaggcccctagtcagtcggcggctgtccgggacccgcggtcctgagagcaacgagaacacgtcccgtcaactccccagcccctcacgcctcggttcgcccgctccccaagaaaacaaaagcgaattcagcagcactgacctctgacggcgggcgggagggcggtcagcgcccggcagcgcaccccgctcctcccggctcctcacagcccgggctcccggccgcagatctggcggcggccgcagcggcggcggctctcgcggctctcgggtccggagcctccctcagactcagcacctggagcggcgaacagctccgcgcttcattcctctgaccccgcctccctcgcgccgccggagccaatggtgacccggaccccgcccaggagtctgcccattgggggcgtcctcccctctccctccggccccgcccgcaggttcctgggtctctccttcaagaccacatcccccagagaccggcggagtttcgcacagccttctgggacttatagttctttaaggacgcggagtgggctcacgccgcgggtaggcaaacagagcgggactgcatttcccagagtgcactgaagacacggaggcgcggagcagggcgggaggaccgtttccatagcaaagacgaccagccgaggatggctggcggaggcgtggggcaggccgcaggaccctcgaaggatcgtgtgagaccccgggcagcctcttgggaggccatttcgaggagaaaaccttgatttctgcctcaggaccct

SEQ ID NO: 63602 - DNA, 1117 bp, Homo sapiens
tgtaatgtagtgaaacatgaagtgagcctgataatcaccagtaaaaataaaggtgatttttgactaatgaaactatactccaatcaaaataataatgtcatattaagaaacagtgtgaagctacttttgaaatatttccagatttgtttttaaaactataagactattttctcaacaaatattattgagagtagaaaaatcaatttcatattgttttatatgagtagaaggcaatctcttcttaaagtgaactgaaattggctttgtgtcagaatggaaaacttgaaaataactccaggatttcctgagattcagcagctaaagattttgtaagagaaatcctgtttagtgtgtgtgtaaatattcttgctgttttaaaatcaatatttgcccaaagaacggcatttctaaaaataaatttggtttcagttttgttttctttttcttttcttcatcttttaaagtaattggggctgacataggttttttttttttttttttgctattcctagccactaaaactttccaaaatgctgcgttctgtgcagttagtggtagcgtttgccagaaaaaaataatagattgtaaaggaagcaacacggaacaaccacgtttttgttattcgaaatgcagctacacgtgtttacagtccttaaccatttcatctgacagcctggggagacagacttctaatttgtgttttgataaactgagagtgacagagcggttgttggccctgcttggaggtggagtgatggtgtggtcagaagggaagccggagggaagttacactcgtggggtgtgtgttatgtgacctttgtttaatacacgttcttatttgatcttcacaaccatgccacttggcaggtggggaaactgaggtgcagggcagggtagtcatttggccatcgccacaaaggggagcagctgcagggcccgtccagcttacaccactctgtcccactcgagaacagcagggaatcgggggctgctgagccttgcggtctgggggaggaagctgcatgttctgtgggggcatgtatgcctctagtctggttctcctttctctgttctcctttcggttgtccttggtcactccacttggtcacatggagag

SEQ ID NO: 63603 - DNA, 669 bp, Homo sapiens
gccttagtgccctgctcattttcacacccttgtgtccccacgtgcagtggccatgagagctcttctgttaagatacaagtgcacttgtactagggagacacgtgctgtggcaatgtgctgtgccctgtgtaggtgctcatcctggagagaggccactttattttgccttgctcactggggtggccattctgggcacatggtttcaattaaaatgcatcagcaggatttgccagattacttggccaagtggtgtcacctgatgtctagtggatgagagatctaaacagcagacctttcccaccatttgaggagctgagcttggttaggagtgcctgggagcatgggaggtgagctcaaagtctacagagccactgtgccaggcttgagagcagggcaaggtctgtggagtcaatggaggtcagcagggcaccgagaatggcctagagaggaagtgcagactctccgccacacatacccttctcctccctctgcagtttggcccctttcaaagtcaggggaatttcctgaggaaatggagccctagcagggcccagaggaaaggaaggctctcgctagacgtatcaccttacttcccaggcacatttgaaaatccccctgcaggcagtttccacaaagcagattattttgtgaatgcccatgagagactgt

SEQ ID NO: 63604 - DNA, 524 bp, Homo sapiens
caaagctccatggaacagggaacaaggcccagctctgtcacacacgaactatgtgatcctgaatccactatcctattttgtgccatttttctctctttttcttgtttatttttcttttgcattattttttttattatcttttttctcctctacaaattgaaagttatacatggtgtttctttttcttttttttttttttttagtggctgccctggaaattaccacatgcatacttatcaaagtctaaagttactcaatcactttaccttcctcttcagtaatgcaagaccttaaagcattttaactgtttcccccccgtcttgactctgtgtactttcattctctcttgttttgttgtaacttcagaaaaccttagaatgattattatattatatagtccacgtttgcctagctctacccacgtatttaccagtttcgtagctcctcacaccttcttgcgtcctagatcttccatctgggatcacttcccttccacctaatgtacatcctttagaatatcattt

SEQ ID NO: 63605 - DNA, 603 bp, Homo sapiens
ccaggaccctggctggaagggatgggtaattagagctgttgtgcctgggtgacaaagccagagaagcctggtccctggaggagaaaccgaaatgtctggagaggtggggcgggtggccaggctcagggtagagagaagcaatacagaggccaggtaagagagccgccccctctctggacagggctgcaggtgaaatacgccgcccgaggtaaaggaaagaactgcaggttccataagtgtccgctagggggctaccgaggatacaccagctgggtcgccttggtaaccgcggagctgcgaatgtgttgtccccacgcggtggcggggaggtaccaagatcgccccaggcgcggcgtatcagacgctggggtgggggcgggggtctgtggccatcagccccaggcaggccgtgagcccaggccaaggtccaggcagagatgaaggacccagcttactttcaccttcgtgttttctcacctctgctcaggtcacaccttcactggttgaactggacttagcagttgtggtaggaaaaattaaaatggtgttttggatcagccaaaacagctcctgcattgtacagatgaaatagcaacccagaga

SEQ ID NO: 63606 - DNA, 593 bp, Homo sapiens
cgggaggcagagcttgcagtgagccgagattgcgccactgcactcccgcctgggccacagagcgagacttcgtctcaaaaaaaaaaaaaaagggttaatatctgtaagggcttggaagggtgcctggcgcacaggatactgtgtgttgtcactactgttgtggtagtgtagggactcacaaggcctgctagcgctcccttggtggaaactgcacttcccagcaggaggaattccctgagattccccaacctgcagggagtgcctgtgtcaggtatgatttccctgaaggctctttccccacgcccagcagagggcaccattcactcaaaccaccaccacagcgcatagaactcccagcccaagcgccaggtctgcagggagggagggagagaggaagggaacagtggcactggctgccacatgccacacagggagtcagctgggtggccggaacggccttggacactgatgaagacagtcaatatggagtcagttacatgttctcccgcctcacaaccctggggagagtttcgatggttcccttttatttaaaggaaattgcagccaggcgtgatggctcacacctgtaatcc

SEQ ID NO: 63607 - DNA, 936 bp, Homo sapiens
cgtttcaactggaggcggtatagccagttcccgcccctccatgctggcaggcagcccagcccagcagaggtttcaggagcctctaggagcagcaggaagggagcctcctctaccctacctagccaggagcctgatcaggctgtaatccctagcaattccagtttctctggggattcctccccagtgggctggcggttggactcttctcagcagaggtctggagaggggcacctcccaccccaatctgaaccctatgactgcaccccttgccaggagatgaaagggacaagactgcctgaaggattaatctttagcctccaggcaggccagtggccaaaacacccaggaagtgaaagtctgtcctctgccataaggaaacctggagtctgtgatcccatcatgcggggtctgttatctgccaggtgacagggtctcttatctatctgcggtgatctgaagggcaaggcctctggccaaacatttcttttccccagtgatgcctgaaattccactgttagcgctggatctcagcaagatctcagagaaagctcaactcctggagtttgggttttccccagttgagatgttaggaaagcaatgggccttatcacctgcacggacaggtttgtgtacagtctcaggggattcagggaccccaccagagcccatccacagacaccaggttaaaagccctggacagcatttacaactcctttgaaagaagaaaagtctttctctagagccctctttaaagtgcaaatggccctgggaggttcgaaatgatgagctggccggcatgaaagaattttctccagtagatgcaagagataacctgaggagctttagtggcgggggtgggggaaggagagcctgggggaggggaggctccaggcagctcacaatttttcctagaactggaaagggaatgtattgggc

SEQ ID NO: 63608 - DNA, 1799 bp, Homo sapiens
gcgctgctgattggctgtggccggcaggtgaaccctcagccaatcagcggtacggggggcggtgcctccggggctcacctggctgcagccacgcaccccctctcagtggcgtcggaactgcaaagcacctgtgagcttgcggaagtcagttcagactccagcccgctccagcccggcccgacccgaccgcacccggcgcctgccctcgctcggcgtccccggccagccatgggcccttggagccgcagcctctcggcgctgctgctgctgctgcaggtaccccggatcccctgacttgcgagggacgcattcgggccgcaagctccgcgccccagccctgcgccccttcctctcccgtcgtcaccgcttcccttcttccaagaaagttcgggtcctgaggagcggagcggcctggaagcctcgcgcgctccggaccccccagtgatgggagtggggggtgggtggtgaggggcgagcgcggctttcctgccccctccagcgcagaccgaggcgggggcgtctggccgcggagtccgcggggtgggctcgcgcgggcggtgggggcgtgaagcggggtgtagggggtggggtgtggagaaggggtgccctggtgcaagtcgagggggagccaggagtcgtggggacgatcttcgagggaaggagaggggcatccgtagaaataaaggcacctgccatgccaagaaaggtcgtaaataggagtgagggtcccggggataagaaagtgaggtcggaggaggtgggagcgcccctcgctctgaggagtggtgcattcccggtctaaggaaagtggggtactggagaataaagacatctccaataaaatgagaaaggagactgaaagggaacggtgggctaggtcttgagggggtgactcggcggccccctcccgggagttcctgggggctcggcggccgtaggtttcggggtgggggagggtgacgtcgctgcccgcccgtcccggggctgcgggctggggtcctcccccaatcccgacgccgggagcgagggaggggcggcgctgttggtttcggtgagcaggagggaaccctccgagtcacccggttccatctacctttcccccaccccaggtctcctcttggctctgccaggagccggagccctgccaccctggctttgacgccgagagctacacgttcacggtgccccggcgccacctggagagaggccgcgtcctgggcagaggtgagggcgcgctgccggtgtccctgggcggagtagggaggggttggaaaggggccgagaaattgcactcccacacccctgggttgcaatgggcaagctccctccttggctcaaacgacaccccttggaatttacgcagatttggggatccaaacgtttacgactgaacactgtggtggagggggtaaccctgcctggttgttgactatgttataaagaagaggaggttgagggcacttactagaagccttcgtatttctcttattgccctcagcactgtagagacagtctctcatttcagactgcaaaaacctggtgggtgggaaggcctggcaggagtattcccgttttacagttgagcaaaccgaggctaagagagtgacgtccacttgctcagggtcagcagagcagatatctgaactgggatctgactcccaggccccattaagcaccatctctgggatgactgaagagcagccctctcttggttactgggctgtggcttttgtttacagatataaaagcttttttttttttttttttttttttttttaaagacagggtcttgctctgtt

SEQ ID NO: 63609 - DNA, 3688 bp, Homo sapiens
acccacctgcctcaatctcccaaagtgctgggattacaggcatgagccagcacgcctggccaggaataatgatctttttttaaaaaaagcatggtagttctgactcaggatgaaaatgcatacacccaatgtacttctaggccttatcgttgtgacaatctagagtttgctttgttccacttgactgttgtccagggagcaagggaaggggctagtttctcttctggtttcactgaatcccaagtgcttcctttatatcaaaccactttctcctctctcatgattttacttgattgggtatcacaataagaggcattttttttttaagagaaatcacccacaattcccctgagggaacacctccactgtgtcattcttccagtctttgaccacatgaatctttagcaatcacgctgttgtctttacattttttttttgaactttggaagtcattcgaagttttttacagagaaactacagctcgactgatgaagtatatttgctctgtgtgctctagagctttctattggatcagaagttatctctaactcctgggctcaagtgattcacccgccttggcctcccagagtgctggggattggatattttgatgtcagtgggcattgaggagtggcttctcggggaaggcaaacttgatccagtcttggagagcaaggcaggggctagaaacaagcttgtatctgagcatgcgtctggggtgtcccagtgctaaggctggtgactttgttttcctgcaccaagatatttggtagcaccaagggtgggttggtctggtttttatttctcccttctaagctcctgtgtttgaccaataatattattacatattaacactaatatgttaataattaatagtgacacgtattcacttttgcctcagactctggggcaagtgcttcacatattttacctcatttagtcttcactagaacgttaggagggtgggcactgttattcttcctactttgcaagtgaggaaactgaggcataaagcaattctgtaatctgaagcatccgcagttggtcttttctcttcctttttctccttgtttttcacctcaataacctgaaaaaacaaaaacaaagaaaaaaggtgtttggggaattagtgtccaatgtgaagtaagctgagaatggaggtgttgacagggtgggacctccgagagggggtggtgatgatggagatgggtcagacccgggggaggtggcgggggaccctgggactggtgatttagtgggaagaggcagccttcacacagaatccgcaggcctctggtgtggttggtttcagttccctttatgttcacagacccccacccccacacaacagatttcctgacatttaatatttgttttggcttttttggactgtggggtctccttgtatcagtccaatgtggagtcgccccaggatggaagtgcccttctggtaaaatcacacgttcaatctgaggaactggcttgtgattttaaaaggccgctaggacttgggatgtggcctgactctctttggacagtgcacggaagtgaagggatggatgtaacattggcaccaggtttagacattggcttcatggagaatttactccatgggaattttgaaacttgaaacctgtcactttttgtgcacaggcagctgtagggtcttaactcaggggactttggagtgtttgctagggtcattcctctgccccatgctgtggctgaccccatgatctcaaccttgtatttattccattggtttatctccagcttctagaatgaagacctttacaaaaaaaaaaaaaaccaaactcaactgtaataaaccagtttttgttttgagacggagttttgctcttgccgcccagcctggagtgcagaggtgcgatctcggctcactgcaacctctgcttcctcagttcaagcaattctcctgtctcagcctcctgagcagctgggattgcaggcacatgccaccatgcctttgtatttttagtagagacaggatttcatcatattggtcaggctggtctcaaactcctgacctcaggtgatccgcctgccttggcctcccaaagtgttgggattacatgtgtgagtcaccatgcctggctaataacccagtcctttagagttgctgcttattttccttcttcatagcacacaccggtctgagaaacccaggctattagacagtttgggatctctgaagtattagcctagtaaccacagctgtaagttgactcaggcgcggaaaaaagaaaagctggcaggctttcccagtgattgttttcttcctttgcttgctctgcaatctggccttggaaacacagggcctatatttcagtgttgaggtttggctgcttgaggggttgacctagttcacaggcacccaaactttgtggattaaatacacccatttcccctccttttttttttttgagacggagtctcgctctgttgcccagactggagtgcagtgacgtgatctcggctcactgcaacctctgcctcccaggttccagtgattctcctgcctcagcctccctagtagctgggactacaggtgtgtgcctccatgcctggctaatttttgtatttttagtagagacagggtttcgactacggccataccaccctgaacgcgcccgatctcgtctgatctcggaagctaagcagggtcgggcctggttagtactagtacttggatgggagacagggtttcaccatgttggttaggctggtctacaatctggagttttgctcttgttgcccaggctgggcaaactcctggcctcaggtgatccgcccaccttggcctcccaaagtgctgggattacaggcgtgagccactgtgcccggccatttcccctcctttctgaaggatgtgctgaacgtttcagaaaacagtatgcagcctccctaatacaattagacttttaaaaagcaaacccagaaaccagctttgggatcaccttacatcatcagatccccaccccctacccctcaaactcataaaagtcacttccccaattactcatgtctgtgacaaaggttgatctgagcttactgggaaagaagaccagtgggccgccctcctggccttgcctttgtgtctctggaggtgcggaggtggaaagtcttgggcccggcaaggccatgtaaagaaggcaggctgctgcttcctcccagtggggccctgcctgcccctctctgccaggtggttatggaaatccctgtttgctctccagggctttttattgggtgaggcttttcttccaaaatgctcaccttgtgtctgttacacattcccttccaaggtagccccagatacgccagaggctgaagctctcgtatctcccagaagctgcccaaaccctaaaatccccgagaggcacctgtcccaatccaatccttgctgggtctctttctttctttctttctttctttctttctttctttctttctttctttctttctttctttctttctttctttctttctttcttttcttttctttcttttgagacggagtgtcactctgtcgctcaggctggagtgtagagaggtaggatctcagctcactgcaacccccgcctgccatgttcaagtgattctccagcctcagcctcctgagtagctgggattataggcacgcagaagcatgcccagctaatttttgtat

SEQ ID NO: 63610 - DNA, 1312 bp, Homo sapiens
ttgagcaaatgaatgaacacatgaataaatcgctatcttggccaatatttttccctctcaaactctatggacttggtccagcccttaaggttgattgtaaatgggcggggaagaatttggtgggttagaaccttccattatgctctgtgtgtgctggggatactgtgttcatagcttccctctgaacagctgtgcagggcaggcagggagatctcaaacctgagtctggaaatgggagggcatatagccatttttaagtgttttccacctttggtcaaataaaaagaaatctgtggtgcatgctcactctttctctctctatccccatctctagccatctccctttctttctctcttcctctttgttaatgtaagtttccctaggccagggatctcagtgtcccagcttgttcttgttactcttgggggactggggtttaggcctcctccctttctgcacttttcatcttcctccttccttcctcttacctgcctccaatcctccacttctgcccaagatttgggtggcatcttccccaaattcagaaggttcttgaatcagactgcctagatttcaatccagacaatgtcacttcccagcctagggatgtcagccaaggacttagtttccctctctgtaaaatgagcataatagcatggagacatcataggatggtatgtcaagcgttcagtgaatatgaaatattagagccccaggaggacttggtgctgtctgtttgaaagtctcccatgttttacgtttggttcaaaagatcccctgcgctccctctcacccagcaaaccagccaaaccagtttcttcaccctgcctgcttctgtgttaagcaaacagtgcactgcaaacagtgactaagcctagtgccttgttaggaagaaactggcgtttttttgcttgccactgtgcagggtgctcagggtggaccggaacgggtttgttgtggcttaggaaaggggacctgctcgtggaggttgtgtagaactggagtgggaggagtggggcaaggcgcagctagggccgggggagtcgggatgatcttgaacttgtcagcttctgcttggcttttaaaagttatccaggccagatagatgctgtggctcacacctgtaatcccagtgctttgggaggccaaggccgcaggattacttgagcccaggagtttgagaccagcctgggcaacgtggcgagacccccatctctacaaagattaaaaaaaaaatttagccaggtatggtggcgtgcacctgtggtactagcatcaaaaaaatgcaaaaatttgctgggcgtggtggca

SEQ ID NO: 63611 - DNA, 1856 bp, Homo sapiens
actggacttctacattcaagtctatattcatgtcattgaaaaagactgttctctagtcaggcatttttcttttaatttttaaattttttgttaaaataaatagagagggtcttgttacgttgcccaggctagtctcgaactcctgagcttaagcaatacccccgccttggcctcccaaagtgctaggattacaggtctgagccaccatgcccggccaggccaggcattttctagagaaggaatcctgagggctcattttcacatctccttcattttttatttatttatctttctcttttgacctgccactttaggaacatctcctttaaagggtatcagattcaaaccaggaaataatgctcattccaagccactccccacccctcagcatgttgcccaagaggaatattgctccagcagagttttctaaattttttttttttttttttttgagacagagtcttgctcttgttgcccaggctagagtgcagtggcctgatctcggctcattgcaacctctgcctcccgggttcaagcgattctcccacctcagcctccggtgtagctgggattacaggcatgtgccaccacacctggctactttttgtatttttcgtagagacggggtttcaccatgttggccaggctggtctccaactcctgaccttaggtgataagccctcctcggcctcccaaagtgctgggattacaggcatgaatgagccactgtgcctagccgagttttctaaagattcttcctgcagagggatgatattttctaaacaggcatcatttagggcatattttttttttttttttgtgcatgtatacgagtgttcctaggacctggtacttactttggaatctcaccttcagtacgaggcttcctccccaacaaattcttcaccacaactatgtgggagtgtttgaaaaagggaacaagatgaccaacttgttggtggggagagttgtggctttcctattggaaaacatcatcccttgaataagcagtgaggcaaacacctgggcacttactttatgaacaggtggggtggggccctgagtcaccgacattgagaggcctctcctggtaaggtttttcaatatcaggttgaatcagcggtgacatcaccctctatagtgacaggtactctaggtgccggctcttactcataagtcccaggagatactagccctagatctcgtctctgttagcttcgtgctaaaaggttttggagaaataacagctgcttggtgacgttcatgtggctggtttcattaccacctaactcccaggcttgtaatcatgactaaattttctggagaaaatagaatttgtggttgtatttcttgtaacttttgccttcttgtctcaagtctgcatttaaaaagaggccgggtgcggtagctcatgcctgtaatccagcacttcgggaggccaaagtgggaggattgcttgagcccagaagttggagaccagattgggcaacaaagggaaaccctgtctctacatacaaaaacaattacccaggcatggtggcgtgtgcctgtgatcccagcttcatgggaggctgaggcaggtagatcccttgagtccaggaggttaaggctgcagtgagctgcgttttgcaccactgcactccagcttgggtgacagagcgagacgctctctcaaaaacaaaaaacaaaacaaaacaaagccctcttctactccttgaggtttttggatgtttcagagctgtattttgagtctctgatttttgttttgttttgttttgagacagagtcttgctctgtcacccaggctggagcgcagtgttggagtctcagctcactgcaacctccacctcccaggt

SEQ ID NO: 63612 - DNA, 2146 bp, Homo sapiens
gcccaacaccacgcccagctaattttttttttttttttttttgcatttttagtagagacggggtttcaccgtgttagccaggatggtctcaatctcctgaccccatgatcctcccccactcagcctcccaaagcactgggattacaggcatgagccaccacgcccagcccttctaaagtattttaaattctagttttccaaagatgggaatgtgaattgtcttgtaaagtataaccgtctcctgcccctcctttataacaggccttggagaattttgcccctcctttataacaggccttggagaatgtttctcccccattctttctctttaatctgggcaaggtgtctttattaataatatcacagaccaccacacacaccttgaggtttagttctcttccgcacagtgtgtgagtgccttctgtgtgctctgtgtcagttaccagccttgtttccaggagtttggagctgacccaggggtgatagaaaacactgggatgccaagtcgtcagacaatgggctcatttagaattcaggtggggtgggactgtgtgggctgggtcagctggtggagcttccccagagtggggaggccagggggagtctgggatgtggggtggtatgtgaacaggaatacggggagactctcagcctctgttgttggctgagagggggatgccccaagcctagagaggtgggggcgggacctcctgtgcagagactgggagacaggaatatgacagatggtatatttggatggtgactcagataggtcaagtgaaactgaacttccggtcctcgagtcacacaggagggtaggggctgtgagaaaactccctcgttggttcttcctacagggcctttgaggcagacagggctcaacagagcctggcaggactgcagaaggacaatagtgtggctggttgggtgaggcccttttggcctgaaggctagcaagctgggagaacttggagaacccggacagcaggtcctctgccctcccgctgcctggggcagcccttggagaggcctgagtggtctaggctgatacatcaggcttggggcagccccgctgggctatcccataccctctcccctgcccccacatgtttatcccaaatccccttctcctcaagcttgcttctaggtgcccatctcacccatcctacccatccatgtgtctatcctccattcgtttgttcagtaatgatggaggggctgttatgcgccaagcactgttgtgaatggcggacacagagacccagacacatatgaatgtcccccatcatggaatttgtattctcaggtattgcagggagcaggcaataaacataatcaatgtgcaaaatatttagagcactgagtggagacaggtgtgtaggaaagatgaatcggaatggagcattgctgggaagtactagggtgatctgagaaggcctcactgaagggggacatttgagcaaagacccaagagaggtgaaggatcaggccatgtgactaggtagggaagggtgttctagacggaggggagggcgttctagatggagggaacagcaaagacacacccctgacactgagcagaagggcaaggtcagtgatcaaggggcaggggctggcagaagggcagagggggtggcagcatgtggagggccttgtacccatcaccaggactttgtctttcacttgggactcctctggtcctttagcccagatccaccggctgcctcctcctgccagttctgcctcccctctccattctgggcagtggagcctgatggttagtagcatgggcactggcctgcctgctcaggttctgagctgagcacagaggtctgggcctcccctgggcttctgctccatttggcccagggtggggccatggactcccatttccaatggcgctgctggctctggcatattctgacccctccactggggacacctcccagtgttccttgcctggctcatttctctctcagggccatcttcgttgttgctacctctaggaagccttctctgatcctcatccccaaggcctgtgtcgggatacgtcctactccttccctttgccagttgggatcccctgggttcctttatgctcccccaccaggctgggtacttgggaagtattcgcagcccccagcat

SEQ ID NO: 63613 - DNA, 2020 bp, Homo sapiens
tccgcctgccttggcctcccaaaatgctgggattacaggtgtgagccaccgtgcccgaccaattgtacactttaaattggtgaattttgtgttgtgttaatgatatctcaatattttttgaaatgccaacagggaacaaatcatcattagtgaaacagctcttgttcagattagtaagtagagctccagtcctgagcttttagtaaacaattgtgagccccagtgattccacgtggtcctgccctatgtgtagagccttggtttgcagccttcccagaaacagaaatgcttctgggaaaccacagctccctacctgctgaaggaaatggacacctgagataagctgaatatattgtgtgtgtaatcagaaggcaggcaggcaggccggttttccagatgagcctaagctaatggcttaaaagggtgtttaaaagagaaagcagtagcctgactggtctgaactcctgccctgtcagcagaaacggtgcagtcacaatgagaagggaaagagtatttaacgctggtatgaacggcaagcctctgcctcctgatttagttaataagcagttttcctatggaattgattgagggggagagaggtttttctcttcctggctcccttggtgtgtgccctctcatgtcagaaggcaggaagttctctgggaattcacaccagaggttttgccattatttaagcaaattaaggcctttgggaacagccaggtggcctttcaggttttgtcagggccaaaaagccctatcacctgccaaggtgttgagtcaacttatttacagtgctcagagccagttcctgtgctgctgaaatccctgaaggcctgctctaaatgggcctggtcagacatcaacaccgcctgcctcatcagcacttttagccttccacctgcagtgcgggcttgactgagatgccccagtggcttgtcctgggaaaactgctcccatctgtaagctgccaccctcctttggtgactttgcctctctctgcctctttactccctgcacagaggggcaaagaggcacatcctccagggaggcagggctaggtggaagttaaggtgatgggctttggggtccggcaggcctgagttcaattcccagctctgctgtgtgctgttatagctacgtggccttgggcaaatcccttaccactgtgagtattgctttattcacctgtgaaatgggagtaacacggtacctaccttctaggctgttgtgaagattaactgcaattctgcatggtgcttctgatagggtcagtaactgaggggttggccgggcacgatggctcacacctgtaatcccagcactttgggaggccgagcaggcaggaggatcacaaagtcaagagatcgagaccatcctggccaacatgatgaaacctcgtctctactaaaaatacaaaaattaattgggcatggtggcacatgcctgtagtcccagctactcgggaggctgagaagaattgcgtgaacctgggaggtggaggtgacagtgagccaagatcacaccactgcactccagcctggcaacagatgagtgctgggggtgttggagggaggctggagaatgaaagggaggcaactgaggccacagtgtctggctgtttccaatccccccatccccagctgaaaccctctcatctgcagataactccaagacactccttacttctcccagaataaaagcccggctctctacaatgaggctccagctacgtctgactttgtcactgactacccttgtgtcactcgctctactcagccaccaccctggattggcttccaaccaagttgtgtttgcttttccctctgcctgaaatgtccttccaaaggggaccgtgtggctcccttcctccctccttccctcccttccagcaagtcttaggtctcagctaaaactgcctttgctctaagtcaccttcattgcctttgacatggcacaccactgcctccagcactccctccttatccttcctccctgtttattttattttattattttt

SEQ ID NO: 63614 - DNA, 948 bp, Homo sapiens
accctacttggaattcttgaagtgagccccccagtctgagatctttctgctttctttttttttttttctttttttttttttttttttggtattcaggaggatgcagcatgggttgtaggcttcatttctcaggagcctgagccaaggcacacatatagtctgagcagttacctttccaggcagccagagtagattcagcaaatgctcttggaagcagctgcctttcccatcaatgcttatttgttcttgataatgaaaaatgatgctagcatccattaaaagagaaaaggcatcctcttgtgagctctattggacaagtgagcacttgttgtacagtcatctgcaagcacatgtgacctggagactgtgggaaatgcctcacttcgcagtgttggctcccagctgttctcttgggctgtttgagttttgttccaaaggtcagaggcagagggtccgagcctttccagcacagcccacatttgaaagtagtgcaagcctcacattcattctttgtagaaggtttccagatcttgttcttgagttattgaatgattcaaaggttctgaattccacaacggctttcctgtgtttttgcagccagattcagcacattttggtgtcagccagtgcttggaaaatgtggccctagattgatgcgtgtttatatctgggttgtgttttttatagagaataaatctgtggttacttttacccatcccacattgctgttaactacccctggaatttctctccctccgcaagcctagtgctgaagaacagaagctttggtgctggctggttctggggcgaatgttccttcagaggctgacctgctctgtgaccttgacaaggccctgaccttgagcaaatgacttaagcctttcgcctcagttgctcatcagcattaagggggttaaaaacccctacctgcctcacagcaacatagga

SEQ ID NO: 63615 - DNA, 1433 bp, Homo sapiens
caaaaaacccaggaaagtctctgtgcagcacattagaccctgaatggaaatgatgttaggaggcattttggtgcatgctttatttcaccagtcggaatgtaagccttaccaatgtctgtgagggcccaggacttgttctcccacatctcaggcctgtcagctgccctttcctgcacggggcatcagggagagagaggaggagggatttagtagctttggaattcagtacatggggtctccctaacctcggggaatccaacagaaagaaaaaggaggaagaaaatgtgatgattttctttttaatcagtaagcaaacagttcctagagttgcccaacctgaccacaggaatgtttcctgggttgcagtccatgaaaatgatcagttacggcctctgtttcggcagacaggctgtgttgttacgcatgcagccacagctgggacaagaaagcccctccaatttgctgtgaacccagagggcctccccattctccttattctttttgagaaaatcaaacgcatttccctccctaagacaggtggggaagcagtccccctccagcctccgcctctgcaggaggcctaatgtcgctgccaactccttgctagaatggagatgagttgtttttctcccctcttcttgaaaacaaattgagatgagattccttgccagttggtgttgactctggaaaattgaaaccaagcagttggttttgacttgagcagagaagcaaccccagcttctccagtcaaggcagcagataccaatccaggcaggaatattgagatgaaactgagtgaggctgttaatcaatgggcacactggctgttgctgtcctctctgggagaggcctggaaagaaaaatgatttaaaactaagttcccttctggccttgttgtcaagaagggtatggggtatggggaggcaatgaggcaatctggcccgcaggagcaagagctaacctttctcataggcctgtgctaaaatcatgttaattccacttgaatgttggcccccgggtgggcaggagtggttatctgttgtgattgtggctggatcttcagtactagaacaggctgcccccatgcaggaggtatgcacacagtaggtgtgcaggctttgagtagaccttggaactgttcccccgcactgccgcctgctctctcccttacttcagcacacagctccaagctggggcagtctctttcacttccctttattccctaatatgccctaatattccctaatgtcctttatttagtgagttgtcctgcctgtcacataaagcccttggaaattccttacctgcttatatttctctattacacttttcattcctgatactttttttcgttttctttctttttggagatagcatctcaatctgtcgcccaggctggagtgcagtggcacagttacagctcactgcagcct

SEQ ID NO: 63616 - DNA, 1903 bp, Homo sapiens
ggtgatccatctgcctcagcctcccaaagtgctgtgattacaggcatgaggcaccacacccggcctaaacactgacttttttttttttttttgagatggagtcttgctctgtcgcccaggctggagggcagtggcgcaatcttgactcactgcaacctccgcctcccaggttcaagcaattctcctgcctcagcctcccgagtagctgggattacaggcatgcgccaccacgcctggctaatttttgtatttttggtagagacagagtttcaccatgtggaccaggctggtcttgaactcctgacctcaagtgttccacccacctcccaaagggctgggattataggcgtgagccagtacgccctgcgacactgacttttaatcaattccagaagcgccattcatgacccttccccccgggctggttctgatcaacacccatggcgtttgccgtcagagaaggaaacagcatttgtccaagcagaaccatggttgggaaagcaaaaagacaccctttgccagtgtgaccaagtcgcttgagtaatcttaaacaaagggaaaaagtcaagggcgatggcttacacctttagccttgtttctcccacttcagaaagtaaagggtaaagggtcctgggctaatttttccttaatcttcaatgtcactgttttctctctccacccccgtctgctttgatggggacagaagccaaggggactttgctccctgcttcccatccaggcagcgttcgttgttgacatctgttttcagggtgtagctcagtgaagacagagacgatacataatttgttctgggcacatatgtttgggggacgttagaaggaacttgataagcttcatgcaaataaacttccagtccctgggaacccatgggggtcgcctgtcaacaggggtgcaggagccgcagctgccaccctgagagcacattgcatggatgttgtgggcacgttaagagtcatgcttgtgcaacgtgatactccaacctgcttatcttccctggaaaaatgttgtggttgacgttggcagtttagaggaactttgacttatttcagcttatgcaaagtggtaacatacagcgagacctttttgaaactggagtatagtgtggctgttggaatatccttaggtttctctgaggcctggaactggatttccaaggctcaattttcatccaagaagagagggagtgtgtataatgatgcttttgccgttattctcattcaagttactctccaactgtcctattcttttgtgagaactaacttctcagatccattcagctagcaggcttgtgaatggctcatcagtactaacagacaggctgcctggtgagtcctggcggctaagtagcatcagactacagcttccgtcacttcatagctatggaacttggttaagttccttctctgtttccccatttataggaaagggatgctggccaggcgcagtggctcatacctgtaatcccagcacttggggaggccaaggcggatggatcacctgaggccaggagtttaggaccagcctgaccaagaggtgaaacctcgtctctagtgaaaaaatacaaaattagctgggcatggtggcgcatgcctgtaatcccaactacttgggaggctgaggcaggagaatccctcgaacccgggaggcaggaggctgaggcagcagaatcccttgaacctgggaggcagaagttgcagtgaactgagattgcaccattgcactccagtgtgggcaacagagcaagactctgtctcaaaaaaaaaaaaaaaaaaaaagtgggaggatgctaaaatccctaccacacaggactgctctatctaataaggacatagactgttgttgttgtccatagttttgtttttgtttttgttttttgatacaa

SEQ ID NO: 63617 - DNA, 1573 bp, Homo sapiens
cctgaatattgtttttcttatccatacttcactgtaagcagatggaagcatctgtctgcttcattatgtctgccagtgttgagtacctgagtattttcatattgaaatatagctttaatgatacattacttctctcttccttctttacatagcggttaatcatattgagcttctgaaattgtgcgcgtgggcagattagccatttttgggttccctcttaccccccggactaagccgggacggaaaaaaaatgtgaagggggcgttcccgatcgatttggccccgccccatagtgtgcccagagccttctgccacacttaacatggcggcggcggcgccctgccgaggcgcctgagcgggtcgcgagcgtggtgttacactccagtcatggcggcccgacaggccgtgggcagcggggctcaggagacatgcggtctggatcggattttggaggcattgaagctgctgctgagcccgggaggtgagaggacgcatctccgcgccgggctggacccgggactctcagggccgcccggcttccggggctgccctgccttccgcagcgtgcgccccttaggcccgcctcgggaccctccgcccgctgctgggggctttgagcattgtctatgcccgtcctcattacgttcttgaggaaactgaggctcaaggagggcgcgggatccgttgactgctgatattagccaacatctcttgagcatttgccttgtgctgggctctgtcaggcggggccgttatttcattcagtgcttactgcagcgctcttgggagggggatatggacccagctccagagagggtagggcgcccgcgacgtagaaatgtgaggtcctagccgcgtgagggcgcaggggccagcatggacccttgagatttgtacgaaatgccaagaagtccagacatcggaagcagtgacgtttgaaatgggtttggggagagtatttaggggttaccaggcgcttttaatctttgtggtgcgtggacagtttcttcccagtctaaaatctgaagggatattgggagtggttgaagctgctactccttttgcgactgaggacacccaaggctcactgaagaaattaagtaacctgtccaagatcacgtggtcaaattaggggcagaacacggacctaggcccgagatctactgaacccccttctcagaatcagacaaattgttcagtataggggctctgatgttatctggagcttttggaaaggacgtggaagatagagctctgcttatcactggggtgtatatttgggggaagggatgggaagggatctgtagaattagcaagggcacatgaaaggccaaaggggatcacctcccagtctcagattttatacttaaaactgcaaaaacttctgcaaacattacaccacaccagcgggaagtgaacacaagttactaatattagtaaatgagtgcctactaagtatcagtccccatagtaggctgttgacatacacatcatttaatcctcattacgatcccctgggatcggtactacttgtattcaatttttacggatgaaggaccaaggttcaggtaca

SEQ ID NO: 63618 - DNA, 866 bp, Homo sapiens
gggattacaggtgtcagccaccgtgcccagccgaggtttagtcatattataatatgaatgaatcagtcctccataaaaattattcctttttatgactgaataataattcctcatgtggatatgcttggtaatttttgactggatgctgaacatttttattctacattgctgagtgccagatttttatattccttagttggactttgttctggaatgcagttaagttacttggaattagtttagtccctttgatcctggcttttcagctctgttagtgtggttctacagcaacctttaaggtaatttaacccctttttgtattatactaagtgtgttgtactaagtgtaacaatacagattgtactaagataatagacttctgagaattctagttgttgccctgtgtattaggagatcctcccaggctggctggtgggaacacaactcttcccagcctttatgaaccgtgggggttgttcccccctactcctttctggtggttattgccccaggctttggtattttcctcacacatacgtgtatcatactctaccaaagacctgagagaggacccttttgcagatctttggaactctctctacatgtaacttcctcccttctggtattttgccctgaaaattccagctgctttggcctccctgaactctgaactatgtttcttccactgaacaagatgccaggcttcatttgggctgctattgttatcgcctgaaaactctctccagtcagtgaacgagggcagtcgtcaagctcagtttgtttgcttccgttctctcagggatcagtgtcctgggctgcctgttgtccactgtctggaaaccattgtttatatattttgtccaatt

SEQ ID NO: 63619 - DNA, 516 bp, Homo sapiens
atttactgaaagccagacactttgccaggttcacaaatacagaaatgattaaaaaccaactgctgccttcaaggcgttcctagtcaagtagacaaagagttacagtagtgtgtgggccatagctaagatcatcctatcgcttattgcagagcagccctctaagcttagatgaagaattgtaaggcttaaccacagacgcctcatatcatagctggctggatctgcgaaagaaagccgaggtgcaattaggaagaaatgtggaaatccccagactgccactggggttgttggtaccagtctgtatccttgcctaatctgttttcattgatccacattggcctctgactttgcccctcagctcttgctacatgtttgtatttgaaaagccacgggtaagtggaggttcagtctttcttttttttttttttttgagacggagtctctgtctgttgcccaggctggagtgcagtggtgtagcatgatctcggctcactgcaacctccgcctcctgggttc

SEQ ID NO: 63620 - DNA, 496 bp, Homo sapiens
ggtggtcacatcttaagagtgatgaaactggagtaagcagtgttttgggtttggtttgattttccaaatccagttttaagtttttccctttggtagtaattacttgttcctaatagcagggccttcagcagtaggacagttatcatatggttacacaataggtaaattaggaaactcagacatagccaaaagtaggaaaggaagaggtcagaaagcggggtagttgacctattctgggcagttctagggactgcacacatgaaatggtgctgctccagttcactgtcttgtttcagcctgtctgccaaactcaaattgtttcattgccatatctgagcacatctttggagctaaaatggtgtgattcggatgagatattgcttaagacgctgagccctgctaggtgtttggtgtgtgattcccgttgctctggccaggcagtcatgggattattcttcaccatttccttttttctaggtgtacgtggttgggaatg

SEQ ID NO: 63621 - DNA, 1347 bp, Homo sapiens
ccagctgttggtcttgctgagagtagatgatttttatccgtgtatactttctttgacagtgcctgatgcaaaggcagtagtacacttggaattaccaaaaaaaaaaaaaaaaaaaatcacgtggggctcatgtggcaaatcagggttgctgccagagccaaggattagtcagtcactcattgaatttcaggatatttgcattctgaaattcacaagaagcatactttccattcctgcatttcagtagtactaggagattgtgccagcatttaaaatgcagtggaacctgacagcctttctttctttttttatgttagcttgttagatgcatggagtaagatgacaagctcattcataactgctttttctgccaggtcactttgccaagaaatcttattatggattctggggaagctggaaaggaagaaggcaattgccagcctgaaaggatttgcagggttggacaaagctgtgccctctctccattctctgtgtcagtttagagttgccactcaaggtggcattatgattaccatcaaagaggccattaggtgagtccacccatccgttactgttctcttcagatttagttccgcccaaaaggccattcagtgattcaaccactaaggggcgctgatagaaaagaaaccagaaactcaagtggctcaggtgcctgctatttatattctctaaatgaaacgtgagccttaaataatcctccaggttttttcctaagatgcctgctaatagttggtgcaatttactggagcctcacagctctgcatcacaacaagcccacttactccaccatctttgccagttaatcagagtaaagggcagacacatgttcacccttaacaccataataatccaattatctttctgactctcaaaatggtatatgtgtgtgtttatagtcagacttattcctgagggaaattgtctaatagctatcttttatggtaattttatgatggaaatttgtttctcatagggattgattagaaagtgcttaataaatattagtggaatggatcatttatttctccagcatctcacaattgcatattttaaattatttccactttctggatgatctaatgttattacctcagaacgtaaattcctgttggtcatagtccatgtaacattcatgggtgactgctatcctgtttggatttcacatcacattcaaagtgctgctgtttgttgaagtgttgaaatataattatatattcatggttaacttggtaaagttgtaaaacaccccttcagtttgatggacttgaggaaaatagaaaaacacatagattgcaaacagaattatcagtacaaacgcaagctgct

SEQ ID NO: 63622 - DNA, 798 bp, Homo sapiens
ggtatcatactgtacatattattctgcaacttagatttttcactcagtagtgtttttgagatctatctatattgatacccatataaatctaattcatttattttaactgctgtgatacaataaatacatcataattttttcttattgctggacatttagcttgtctccaagttttggctattataaataatgttgcaacaaacacagactatttatttaaacatgcagttcaaacagagttttctgcttatgtttgagaaggccttagttgtactggctttatcttcactttttctttcctgccatgcttgtaggagttgactcatgtggcctcggaaaatgaaacagagttaaaaactgagcccttctccagcaagagcctcttggaattagagcaacatcagactcttcttgtggaaggccaagagcggaagctgcttgtcctgcagctgatggctgttctgtgcgagagaatgtctgagcagatattcacaaacgtcactcaggtcagtagttgccacattctggaccgcagcctttttttctttccaaaaaataaagtttaaaaatgttgctgagagtgtgatttgatgacacctggatcatgaggtgtttcctggaatgctggttaaatatggaaactacacagcccacaccaggccactgaatccaaaacgttccagtgtcctgagactccacacgtttaacaagctcccgaggtgattctcatgcaagtaaaattttgtcttaaatgtttatatattatgttatagtagttttcaactttgggtgcaaaac

SEQ ID NO: 63623 - DNA, 613 bp, Homo sapiens
ttttaactatttctttcatagatcatgcctttgctgttgtatttaaaaggtcattgcttttaagaggtcatctcaattttctactatgttaacttgtaggagttttatagttttgtatttgacagttaggtttatgatccatttcaagttaatttttgtgcaaggtgcaaggtctgtgtctagattcattttttcacatgtgcatgccagttgttccagcaccatttgttgaaaaaactgtcttttctactgacacttgttccaattaaaaaaaaaaaaaagaaaaaagaaactgtatttttttttccatttaaagcctttgctcctttgtcaaagttcagttgactctatttatctgggtctatttctggcctttctgttctgtcccattgatctatttgtcttggctggtttttttttttagaagaaattgttatatagaagagaaattaaaaaagaggccaaatagactgtaggtaaattattctcattttagatgctttaaaaaagtccatgatacaaccgaggcactgaatgaagtttagcataatgataatactagtataattatttgaaaatgtctcggccgggcaccgtggctcatgcctgtaat

SEQ ID NO: 63624 - DNA, 826 bp, Homo sapiens
tagccagattatttctatactgtagatctgttcatatgtcctctcagtcactttcaattatttaaagggtattttgaaaacaacagatgcattttggggatccaagtggtccctctcagtgtcaaaaggatctttggataaaactaccagccttcttttaaaagagaaaaaaataaaaaaaaaaaaccacctgggctctgggccaaccatgggaggtgaaagcatgccagtgtgtagagtgaagagatctagccatcttgacatgcccaaacaaatcacacaagctcttccaccctcttcctttcagagaagagctttcatttctggcaaaagagctgagtggagggaaggcaaaagcccggaagggggaaggtagatacaagatgaaattgttttcacagagtttcaaattgagcaggattacaagtcttaacttgtcagggcctgaatctctatctcattctcagatttctacctcaaataaaataagttgagaaaccactaactgaaaataattctgtcccttgaaggatcatctaattggacctggcatggaaatttggaatgcagtcctgcgaagtttatcatctccatttatgtcctggaaaagggaagatttcttttacatcctgacctggtttctgtaccacttacttaacaaataagcatttagagaatgtctctcatatatggtctctcagtaaattctctaagtagttctgggaagtagacattatctccatttttaaaacttcttatttgagatgtaatttacatacctaaaattcacccaattaaaacatgcaagtcagtggtttctagtgtc

SEQ ID NO: 63625 - DNA, 634 bp, Homo sapiens
aagagaaatgacagtaagtaactattgtcatttattatgacaagttagcatttattgagtatctatgtgctagtcacagcaaccctgcaggttaggaattattctccccattttacagatgagggaactgaggcttaaggatgttaagtaactggcccacagtgactcagatacctcatgacaacatcaggatttggatttgtgcctctggctctgaagtctacatttttgccacagggaaaaataatcaatcatagtgccctcattctttttgttcccaagatgcaagggctgagtttcctagtggtcttaagtataggagaaccaggcctacctttggaaaattgtttcactatatatcaaccctgtttataacttaatagtatgctgacctcatgcttgatttttgttttatttttgctaacatggcaatgtgtcaagtgttaatttttaagcaatctctgtgtgtatctttgaaactcatctttcacatggactgtgagtacgtattacctcacacactgcccacccttcttcctgcagacaatcattagtgtttcagcattgaaagtatcagcattgttttaggagcattaggaaagaggcttcagaaatcaatcctgggtggctgggt

SEQ ID NO: 63626 - DNA, 4003 bp, Homo sapiens
aggcagaagaatcacttgaacccgattaaagggaggcagaggttgcagtgagccaagatcgtgccactgcactccagcccgggtgacagagcaagactgtctcgcaaaataaaaatacaaaagaaaggagagcctggagccggagagaaagctgggaggtggttgtggtattccttgacacaaagagatgaggattttggttagaggaatggctgtgaaaatggtgagaaaatgtgaatactataggcaattcagaggaataaatgagagaccatcatccttttttttttaaacatttagtgaaaacggggttataatccacccagcaactattctcacagaactattgagaggctcaaataaagtaatatatatgaaatcgcttataaatatatgagtatcatcacagagatctatttatcactatatttagtcttctagtagggttgccagatatcaaagtggggaggtgggaccatctacagtggcagccactgggcaggtaaataagaattcgacatatggacttaactttgaatgcattttagttttctttaacagaagtgctatctgtgaccctggagtcataactaactgggttttgatctcgactctaacctttagtagcatggacaagttatataacttctttgttccttatctgtaaagtggggataattctattaaatatctgataggatggtaatgaaattaaataagataatttatgttaagtgttcagaaccagtgtctttcatggtaaggggtgaataaatgttggttgctatttttttgttgttatttttgaatgaatacctcatattgctgcattatgccaaggcaaaagccaaccctagtaagtagcccttcagttgagtaaaatgtgcgatcatcctgttctactccagagaaaaatccaagtacatgtatttgtttctgtgacagccgttccttgtttgcttttcaacagagattctttggaaattactcatctttccaagtcattcttatgtcctttttccctctcaaatcaagctttgtattctatgttaaaaaagcagaaatctggccgggcacggtggctcacacctgtaatcccagcactttaggaggccaaggcaggtggaccacctgaggtcaggagttcaagaccagtttgaccaatatagtgaaaccccgtctctactagaaatacaaaaattagctgggcgtggtggctcgcgcctgtagtcccaactactctggaggctgaggcaggagaatcgcttgaatccggaaggcgtaggttgcagtgagccaagatgcgccattgcactccagcccgggtgacagagggagactctgtctcaaaaaaaaaagaaaagaaaaaagaaaaatcttatcttttataattagatctctttaaatagattcaagtggatattgcagttcttttctaaaaatcaccagctgcaggaatcactggcttaggagacacaagatgtcattggcaaggggttctttctttaaagataacaacataattatgcttagatgtttcagcattttattctgctgttatttttattttcagtgtcttcatacttttgtcttctcatctcactattctaattcagaataaattaaagcattcatttggattctaattcaatatatgtatgagaaagaacacagaataatgaagcacctgattttctctctgcaagttttgaaatagatttttgcattcattttgacttacggacttgcaagagagtaaaccaacagtgtaactgaaatacagtgttccttgtaggaagacaatgttacttaattttcctctccatggcttgatatagtaggaattgattcatagcacttgagggatggatgatctgttaataatttaaacatgaagttatagtctcaatccacaggcttcctgatttgtgtttgtcaatattacgaggctaaccaactcttggtcatgctttaatgagtttgaacttttatatatctaattaaattaattaaatcactggaatagttttaatactttcatgattacagaattgtaaagacagtctccgtcatttaaaatatctaggatttttttcttctttcagtttttaaaataagttaccacaaacctagaatttttccttcctgattattacatttctggactttgttttaatttcacccttcaaggaagtttctggaggcacttactgtctggagcacacttttcaggagaaccaatctgtttgtcttgttggtaacacactagggtagagtcagttattgtagattttcctcatagggtaactttgtgtaaactgaaagcttatgcactgattaagccaatcttggagttcaatgagctgttgagatggaatgagtaatctagttaatacgtaactatagaagtcctggcatctcctgtttcaaattgtctatgtttctgtgttattttagttcattgagttgccaaaaatccagtaatacaaagcatttcctgtacattgttttactctgaaagatatttatttatggattttatttgcacatcactctgttttctgaagaaacagaaagaaaacatccttttgcaagtctaagtgtaaagtagggcctctgtgccttttttcagtgcccctcacttacctctttttttcttcccctctcccatttaaaacttccctctacaggtccttacccaggtttgaccatctctagaaagtaatcaaatttcagacattgccctaccttcaaatctttctcttattctttcccagcctataagaagcaggtagcagatatactaatatttgctaagaggtgatggcagcctcctattgtgtggccattcctgggatttttttttttttttaaagactggttcttgctctgttacccaggctggagtgcagtggcactatcatggctcactgcagtctctacctcctgggctcaaacaatcctcccacttgagcctcccaagtagctgggaccataggcgcacaccaccacgtccagctaatttaaaaaaaaaaattttttttttgtagagatggggtttcaccatgttgcccacgctgatctcaaactcctgggctcaagcaattctcccgcctcagcctcccaaaatgttgggattacaggaataagccacggcacccagcttattttgtattttcaataaggagactatttaatgcaaaggaataaagtttgaatgattaaatataatctgaggcaatacaatttgctaatagaagaagaatttgaagataagaagatctctctgtctctttaaaacattcttggtaggttacttacaccaacaatagttccactatcaagtttctttttgtttaataagttgtcccacagggatcttctcatggtcccaatctaagcctgtcaaagtctatttacttataatttgcatctaaatcattcctacttgtgtggtctgtgtgtgactggaaagggaaagcttaagagcccctgaaatcttttctaacccactcctagttcagggtcacctcttggttatattaccttacagaggaaatgaatgaagaaagcagcagatcaacaattagccttagggagaaaaatgggtcctgacatgtagacaccagtagggggaaatctatccagggactacccagcatttttgcccagtgactattgtgacctgtgtgcctggcaagcctcatcaagaccagaagatggctttggctccaacactctgcagtgctctaatatgtgcatccatatagggctttaacagctttcacaaggccattatcagtcatcctttatggttaggaaatcggaagtgttccgttctttccacttttgaaagtgggaaagaagaggggaattttttctcctctccagactagaatgaataggattccagcccttaaccaagactactcagtgccaattctggtgtttgcccatgctggaacttatttccattgtaccctgttatttatgcaccatttta

SEQ ID NO: 63627 - DNA, 976 bp, Homo sapiens
gtgctgggattacaggtgtaagccaccatacccagcctaaaatgtttattttaatgacacatggtttcaacgttatttattgtaagttgcttcagatcctgtgtggaagtaaacgaagactgaataataagtgaactaattgaagggtaacagggagtagtgaaaaaaaaatgaacacactttagagtctgagcaaataagataatactggagctgttgttaatagaatagaaaccagatcaaacattactcataaaagtccctctctgtcaccattttggcacatctcactccattgttattgcttggtcagtatttttcctcttccccattaggttttgccatgagggtaaggactgtatctttcttgcttatgattagtcccccagggcccagcacagtggcagacacatagtacacacttaatcattatttgataagttaatatgccttttctttatcatttatttttaactataagccactatattagtaaacattaaaatgtttctcctgtgttcttacccttttcaacctgcaatttcccctgcttgtagattccaaacttccttcattttttatgtgccttccttcctgacaaggaaccttcttcctttaaccacaacagcctcccactccagggctcatgaatgtgtgccttttcttccttccccagtctcctaaatctcattttcctaatgactaaactgaaagtgactcaccaactcacacacttagaagtggaaggggcctgagaggtcatcttgtctcactggctcatctccacttccagggaagcgaagtgaattgcccaggggtcactctgctggttggcagcagggccaaccctagaacacagatctctaactctggatcctcatctcccactgcagagtgagcaagcccccttcctaactccagaaagagaaagcactgcaacaaaggtagaaaagtatattttagtcttagttggaaa

SEQ ID NO: 63628 - DNA, 617 bp, Homo sapiens
gctcactgcaacctccacctcccgggttcaagcaattctcttgcctcagcctcccaagtagctgggactacaggtgtgtgccaccacacccagctaattttttttgtattgttttagtagagatggggtttcaccatgttgcctaggctggtctcaaactcctgagttcatgcaacctgcccgcctcagcctgccaaagtgctgggattacaggaatgagtcactccgcccagctgacaagtgacctttgagcaaagatataaggaagcaaggggttgatccagaaacctagggagggagcattccaggtggagggagatgtgagtgcagaggccctgcgacaggtgcaggcttcacgtgctggagaacagtaaggccagtgtggcttcagagaagaacaggagttggcaccagaaaggcagtggccagtcccagtggagccttgtgtggactttggctttccctgtgaatgagatgggaagccagggcggaagaatgaaatgatctaacttcattcgttcattcattcattcatttattcattcattcatttatggagacagagcctcgcgctgtcgcccaggctgtagtacagtggcacaatctcaactcactgc

SEQ ID NO: 63629 - DNA, 1739 bp, Homo sapiens
aaagtaattgagcacagaaagtcctattccatattcaggaagtctctgaaagtgacccctgctgactcacatccggtgtacactacatttgtaggactggaatatctggacatgctgaagaagatcagttagaatatttctgtaactctttattccctaggctgaaactttcatcaatggtacattcacattcatgccaggctgtgaactctgaagtctccttagctaaatccccatgatcctcagtctctagaagcagctatggttgggaccatcttttttcctttgatttgatgttcttaaagggggacaattaacagttctcacttttgtggaaatattagcatttgaccttaccttttacaaaatgcatataatatacagtacacatattccttcccactctctaatctcgttcttgaattccaaactggattttgccctctaccagaaaagtcagactgcatcaagatctctcccactagatctcaccctctttgttgaggattaagcaactatccagccctctctaagccagattgctcttgatgaatgtgtagtaagtggaacacagttgaaaggttataggtaattgtgcaactctgattcttatcaacttcatcttccttcatcctcctaggtaacagcttgcctgattgctgtggccaaaacagatggtgaagttcaagtacgcagagctgccatacatgtggttgtgctgctgcttcggggactcagccagaaagctactgaggtcagtccgtctctcgccctttgcaatttctccacctcttttatttgtctatttctcaatcttccttttaccagggaaggcctcaaacctctttcctcgatggattcatccaaatgaatccatcaacagggattttgtagcaggaaaatgaccttgtttgtatcttcggtgtatgtctctattacctcagtaacatattggccaaactatatactaagaaaaaccagagcacaaggttgtagattgaggccctgaatcctggcattgtcctcattgttccaaggtgagctagctagaacacattcaccctgcctctgcaccctgaacttcagtgacttgcctttctgactcatttgattgttcatgctgaattactaaagggcctcattgaagatgtttcctttctagctgagttcaatctatgacatgttaggtgctgcataaattaaattttcttcctccttcaagtgggtttggctggatttctccccagcgtatggccaatacaggaagaaagtatatatttacatatatatatatataaaaaaccatatgtgtgctgagaatgagcgacctctaaattaattttcgtcttgattttaatggaaacacattcccagttgacttcctatggaaaatttgcattaataattcaccacccagtatccacaatgctcatctgtggctaacacatcagtatttaaccaagtgtcagtgaagccattataaaagtgactgttttaggccaggctcggtggctcatgcctgtaatcccagcactttaggaggccgaggcaggcggatcacctgaggtcaggagttcgagaccagcctgaccaacatggagaaaccccatctctactaaaaatacaaaattagccaggtgtggtggcgcatgcctgtaatcccatctactcgggaggctgagacaggagaattgcttgaacccgggaggcggaggttgcagtgagccgagatcttgcca

SEQ ID NO: 63630 - DNA, 2164 bp, Homo sapiens
gatctcctgacctcttgatccgcctgcccaggcctcccaaagtgctgggattacaggcatgagccaccaagcccagccttgaatggcctgattttctttttttttttttttttttttttttttttgagatggagtcttgctctgttgcccaggctggagtgcagaggcatgatctggctcactgcaagctcatgggttcacgtcccaggttcacgtcattctcctgcctcagcctcccgattagctggaactacaagttcccgtgaatggcctgattttcaaaaatggtaaattgctctttgtaaaatcccaaagaaataaaaatactctctcagtttatatggtagttgtgtttctgaaaaatagagtataaattaaaactacacaaaacacttttatttaggcatttactacatgacagcacttatatctgtgtgctttacattaattaattcaccagatccttatagtaaccccatttcagtatgattactatcactcttttttcttttatttacggccagcttcctaagccaaataggctcacagaattctgctatccctattttaaacatgaggagactaagacgaagaagctaagtaacttgttcaacaactattaaatggcaggccaatagatgaacccaggcagtgcagctccagagctcacacaccattttctatgtccctgtcacctgaagaactccaattctgagtcacctgggcattccctacacagatcatggccaacagaaggctgcttccaatcccagaaaccatgaaatccaaaaggaaaagaggccagaccacatccctttggcgtatttactgctagcccaggagaatgatgagacagtgatgggaaagtgttcaggcacccgggtttcctgacctcccgggacctgccaacaggagctctgtaagagagcaaaagcaggaaacaaccttggcttctttctttacccttcctcatgctcccctacctcttgccaaaagcacagtccaaccacagactacgcgattcagcaacttcccacaatgtacacagaactgaaaaaagcatggggtagagaaaaactgaaagagaccagacaccttcagggctgccaagctggggagtcagtcctgggacttttcctccttgtctacaacctgattcggggattatttcttcccagagagtgattattctgataatcagatgggcctacaggttgcaaaacccatttatctttgctccatcctctgaaagggaggagttctgactaagtgtaccctccttggggtgacgcgaaatgacagcctggattgatgctctggggtttgttccagctcattgctcatcaccccatggattgtttgctcatagcaaatctgcgccaaataaattccatgtcctccaaggtttgatacttaatagtaatataactaatcctgtttaagggtttattgtatgccaggcagagtgctaaattctttacattattatctcactgagtccccctaacaaccttgtgagagacatatgcttattaactctatttacagataagaaaattcaggtccagaaggtttacattcggatgccacacagccagtaagcaggagaactgaatgcaaacccaggctatcttattgccagcttggctgttctgaaggaactaattagaactggcttgagatcatacttgaggaagaggtgaagtattacaagtgtattaggacaaacctgggttcctgagacttctgcttccttaaccattggacttttctcttttttttgagacggagtctcgctctgtcacccaggctggagtgcagtggcgcaatctcggctcactgcaagctctgcttcccgtgttcacaccattctcctgccttagcctctcgagtagctgggactacaggcgcccgccaccacacctggctaatttttttgtatttttagtagagatagggtttcaccgtgttagccagaatggtctttaaccactggacttttctactctttttttttttttttgagacatagttttgctcttgtcacccaggctggaatacaatgctgcgatctcggctcactgcaacctctgcctcccaggtctaagtgattctccttcctcagcctcctaagtagctgggattacaggcacccattaccatg

SEQ ID NO: 63631 - DNA, 366 bp, Homo sapiens
cgtttctctcttagaacggagatcactccatgtggggtgtgtgtactgcctccccacagggctgtagctgccacctgggagggttcgtgccttattcatcttttttatcgccagcacagtgcctgggcatgacagaggcccatagtactgattattgaatgagtgagtaatcatgaggcaatagcggtggagagtcatcctctgccgggaattagctcattttcatgcggccagcctcaggaaaaataagacttccttgcccaaagacaggttagaaagggcactcgaagccaggcctggtggctcacgcctgtaatcccagcattttgggaggccgaggccggcagatcacaaggtcaggtgttt

SEQ ID NO: 63632 - DNA, 1026 bp, Homo sapiens
tttcatgccaccccccaacttggcctcggtggctctgttgtttcagctcctcttctctggtagcagcagtttctcctctttggctcaaaaaggagagcaagcgtgttgatctaccctgggtccatccacctgttttgtctctttgtctgcgagggtgactgaatgaagtgctgcctgccacctgactgtgcctctcacccaactgtttgccgcattggagggctggctacaacatgtgaaagtggatcaattgataagtcgagagatgagtcatctgacctgtgcaaaaccagataagcttctgcagtctttgcacagaaatctaaaatctcggccagaatttctgtggcaaagggagagagtcagaaaccggagctgtgagaggtgccacatttccctgactatgaggggtcttcttccccaatacgccccttcccccagcagcagctttgacctcagagggcctggctgtgtcctcagcaagctctgcagctacagacatgctgcagtcacatgcagcagccacactgcagtgcgcggcacctctgcctgccatgctccactctgttggaactgaatcaccgcttgggggttgggaacctgtgttgctccttacaatacccggtgctgcctctttcctgcaggcagagctcagggctgtgctcagcgccctctgcacaggctggcaaggtgagaggggaatgcagaccccaccttcggccctggaaagctgaaacatcattagggaggtcatcccctgttgtcctccccagttcttcatagggagtccgtagctccacgctaccaggcctcagtttttgtgcccctcctccagagtgccctctgcggttctttgtaacacagtgttgcaagatcagtgtttgcatttcctttattttggaaagtcattttccatccataagcttgtctgattctcacaacaatcttgaagaacagggaggcaggctcttgacatcctcccttggtgggatttggctccaagtctgctgggtcgcagccaggagc

SEQ ID NO: 63633 - DNA, 1701 bp, Homo sapiens
cttgagccacggcgcccggccactcattttttaaaaactagttattaattataatttctcttcaagttttcctgagatgtaaaaactcatcgccttcagctggttctaaacttcttgtctctgctaacaactctcccccctcctcgatctcaccccaccccagtgcaccccaactcacttcatctcactttactcgagtctagcactatcttttagggacctgaaaactactgtcgataaggtcagttgggaatttaggaggtcatggatgtcggaaataaaggtgtgaaaaagaagaggaggaattgttttggctttaagacaccggaacctccaaggttcctacaaaaccgtttgcagcttttgcaaaccgccttaaagtcatcagcgccccactgcggaattcaaagctaagctgtcacaattgttaacaccttctttgaccagcctttttacatttgacaattctcttcagcgcctctttcctgccagcaggaaggttttgctgccttggctttcgggagccccctagacagcgaactgccccttcgcgtgcagaagtcggggaagagtgctctcagctcgccttccttgcagggtgagtaggttttgcgggttagagagcggggcgtgggggcggggagggagagtaacaattttggaagtccctgcgtggtatctggaaagttaacgacgcttcaggttctaggttgagcccaatgaccgtcttgccttggcagctggtcccagggcgattgcagagccgcgtggccttcggccccactcgggggacccagcttcggagagggcgcaggggctgcgagtcttgcgagccggagccgcgtccacccgggactaggcgtccccgccgagcgctggcttgtggcgctccctgggaccgcgcggggtcgggggtgcgcccgcgggggccctcccactctggtcaactttcccggccccagggccgggggaggcgcctctcctggcgggcacgcgccgggtacttaagggcggctcggctgggcaggcggcagtcggagcgcgcggcggcgcggagcggagcgggaggaggggcatggagccgccgcgggcctgctgagctccggagcgcggcagccggcggcacggtgagcgcgggccggccggcacccaggaggggagggccgcgcggggctgcgccgaggccggggcgcgccgggtggcaggggtgcctctcgccgagccccccgcacccggccagctcccagccctgcgggcgccgcgtccggcgcggggaggcgggttgggggcggcggcagccccgggcttcccggcggccgttcctgcagccccctccccactgacccctcctccctttcttcctgcatcctctcctcttccagcctcgcctccctcctccccggcggctcctgttttgtgaatgaattaggaggcggacgccggtgcggggctccaggctggctggggtacccctcccccgcaccttctacgacctcccgggggtttgcacctgtccgggcaccaaggtaccaggcgcccacgttcctgcgggttagccgggccgcggcagcacgtgtccgggggagtgggctcccctcccctggccggcctggaggggcccggagggcggccgggcacaagaggaggagccccgttgggcgcacaagtttccatgccgctgcgtgtggccctgccgcgggg

SEQ ID NO: 63634 - DNA, 1991 bp, Homo sapiens
tctccacccactccctctcggccccctcccaccctttctgctagagctacaaacacttcctatttctagtcccacccactttctgggacttctcaatccgcttcccccctcttctccacccccctccaaattacaagctgttttaaccccttttcctgcctcccagggaaactattctttaaaccgccttcctccacaccacccactggagtggtcttccaaaccgttcaccctcttcccaaagattactctttaaacgtcctttctctaccaccctcgttctccaaattgttcccggttctcaagtactccactcctccaggaccccaccccactcgtctctcggcttccctcccacaaaagaacctggaatgactctccaaccacccttccaattacctctcccagaagcctcccccctccacgattacaaatgttacctggaacaaaacctcacggtcctaacccccaccccgaactcccctttctgctcttcccgctacttcctaggttccagttctactccgctcccgcaagcatagcgggctgggctccctcccaaccccgggaagagccccttcccgcacgtacctcgagattccggccctcgccgcccccttctccgtcctccgcccgcgctcggccaccctttccgcccttctcccgctccgccccgctcgctcccttccttccctccgccttccgtctccacaccgctcccttcccccacactcctggccctcccaccccggaggcccctccgggcttgcccccacctccgcgccgccctcccgccgccctcccccttcccggccacccctcccccgcccgcgctccccgcccctcggctcgccattcttctctccgagccgcgcgccccgcccggccccggctccctagcttcccgctccctcgcgccctcgcccccaatcccggctcggccctcgctccccgcagcctcccgtgccccccgcccgcggcctgacctgcaatggcggccgccgagcgcggcgccgcgcggccaacgggcgacaaccgaacctcccgccgccgtcgccgccgccgcgagcactgcctgcgcacttccgactatgcgccaggagcacttccggggcagagcctgagagcgcgcgcgcacgtggggccggggcggagagaggcgagcaccgggaaggggagcgtggggccgctggtgagttggggaaggggcgtgggaagcggctgcgagagctgggggggtcttacaaggtggccggcccagggtcggcgtccggctgagctccttgtcccgagggtctccttgtcccgaggcggggtgggggctactctgtagactcggggagagggaaggggaggcgaagaccgcgcgcgcctcagacgccccggcccgaccgaacgcgcttgctctgtctgcgggttcctaaccttgaagctaggccagtgaggggcgaacaagacctggtctctactctcggccagtatatatgttggcgggcgtcggggggacggggtagggtaagtgacagacgtcagaccaggcagccagattaagtcaaaccctgtcgtttcttcctcaagaggagctcggttctgcctgccccatcagcctcactgtcactacctcagtttaggtctgttgtttgcaaacttagcaatagagttgaggagagatgcttgctaaaatgcggattcctaggcgccccgagataggaactctggagctatggagtaggaccctttttgattttttgctgaagcctccttattattcaagccattctgagcttttgaagattgagtaattcttgtggggggcattgttagcagccatttggaaatgaacttcagggagatgttgttggagccttccagccagaacagtgatattaaggaactgaatactatatgtgacatactgcagttaacatatagcaataatgactctcttttcgccccctaggaatgggtgaatttaaggtccatcgagtacg

SEQ ID NO: 63635 - DNA, 499 bp, Homo sapiens
ttgcctcaccctcccaaagttttgggattataggcatgagccactgtgcccagcttggacccttatttttgaggtctgaagggtactgtatagtgaaaataaccctggatccagaggctggtagtcctgagttgtctctgcctccttcctatggactttgggccatggtctttggtctttggctctctggccctcagttttcttagctcttctagtccatgaagctggaggaggtgggtgggttgtatcattcatgtctgaataaaagccactgcaggctctgcaatgtgcacagcagtggctcatggcctttggtcagggaaacttcctgccaattggatgaatcacaggcttcaaaaaaataccttagagaccaaattttgcatacaatttttgggaatgcccacgtacacttgccccaacaaaaggccatggcctccaggctaagaaagtcagatctgcggccaggcacggtggctcacgcctgtaatcccagcac

SEQ ID NO: 63636 - DNA, 1998 bp, Homo sapiens
acatggttccctcttgaattacaggcaagtaaacgagattacaaaacattgacaaaggcttggatcatgctgttggacctttgcttgagctgttcaccgtccgttgttacctctgtgaagctgaccccaggcctaaccaaatgttccttttatgctgttctggggacgtcttctgcatgtcacttaaccacatagtatcacacctagttggttggttctgcattttccttccccactagaccgcaaactctcagctgttgttggtactattgagcttaagtacagggcctcaaaaggagccggagtacagggctaagcgctcagtacacagggtacgaaccaatcaatgcaagaatgaacgtgccaccgggtcttgcaggcttgagaagtgtttctccaagctgattttgctttccgtgcccgggcagctcccgtgaattgcacggtagaggtcaggagtttctggggggtccgtggggagccaatggaaggatgaggagaaatgcagtcccaccgcattcgggttgcccacgtccggcgagaggcgagtgatcggacaacttctgcacctcccggaagcggctgcgccggccccgcccctccagaggcaggcgtggcctcatgaataatgaatcgtgcgggggaggggccgggcccgcccctccgggcgggaagagggaagcgccgaggctgcctgactggaatgagggtagctgcggcgactgcggcggctggagcggggccggccatggcggtgtggacgcgggccaccaaagcggggctggtggagctgctcctgagggagcgctgggtccgagtggtggccgagctgagcggggagagcctgagcctgacgggcgacgccgccgcggccgagctggagcccgctctgggacccgcggccgccgccttcaacggcctcccaaacggcggcggcgcgggcgactcgctgcccgggagcccaagccgcggcctggggcccccgagcccgccggcgccgcctcggggccccgcgggtgaggcgggcgcgtcgccgcccgtgcgccgggtgcgggtggtgaagcaagaggcgggcggcctgggcatcagcatcaagggcggccgcgagaaccggatgccgatcctcatctccaagatcttccccgggctggctgccgaccagagccgggcgctgcggctgggcgacgccatcctgtcggtgaacggcaccgacctgcgccaggccacccacgaccaggccgtgcaggcgctgaagcgcgcgggcaaggaggtgctgctggagggtgagcggggccgggcgggagggtgggcaggccgcggcggcctgggctcgcgggagctcactttgttcctgccccgccggcggggcgagccggttctctccccgtctctctccaaacccgggtttctggagctttcagtgtggaaaaacggatgcttcttgcaggaaaagttgggcagccgccgaagtgtggcttgcagcccctagggaagactcggctgagattgagtaaaaagcagctgcctatgaagccccacctcggcccgataagctgacactaagaacttgagggagagcgaacggctcgagtgggtctgtctccgtttgcccgctgagaagtgccgggttggcgcttaactcactcacctctggctcctcggggcgggcgggtctattaaaaaaaaaaaaaagtccatcttcaccgatgccagcggtatgctcgggcaaaccaccaaagcgctggttaatttatgggaatttaacccatcattggctctcaacaataaccaaaggagatcatagcatttcattgaagccagaaagctgaaacagcaagtctgtgtggttaacgaaccttgtttaacagtggaggctcacgtgtttgaacatttactgccaactagagttttgccccttttgcaagtctgctgccagcttcctaccactcacaggcgcgctgcttcaagactcttggggtttttgtaagaaacttgaaa

SEQ ID NO: 63637 - DNA, 891 bp, Homo sapiens
ctgaggtggaaggattgcttgaacccaggacattgaggctgtagtgactgtgattgagccactgcactccagcctggataatagagcaagaccctgtctcaaaaaaataaaattaaaaattttaaaatgctcacttactctcataactggtgagacttttgtgttaatcttagataaaagctgactacttcagtttttaactataaagacccagtgagcaagcttgagttctgactcatttgtactggctgctgagtaatctatacaaatagtgctttatgattttatgctatcttaaaaaaacaaatggaagattggagataaattcaggagcagatgacaagggtttttagccatggctttgccgtaggctggctgtgacttagaagaagttttctgatttctttaggcctcagatttcttaggtttcagtttaaatatctttataaataagcatgttgtaggagtctctcaacttatcctggttgagagagctgcctgaaaaaaaattttttttaggtaaaaatgaacatgttggactgaattattactgaggtctcctgtagctctgaaattctgttatctattgtctttgtgcacaggacactttgtgtgtgtggtggcaggtggtaaacacaatacacttggagttaatagttatttcattaatcttctctaagtatggtaatttaactaggctatatttgggtatagctctataattcatgtatatgtattatagtggtgaatctttcttctttcctagaataatctccaggagagagaggaggatttagcatgcataaagataaatataatcacaggataagcatgcttactgattataggaagctaatattaacacatattggctgtcagttgcaagggcaa

SEQ ID NO: 63638 - DNA, 692 bp, Homo sapiens
cacaaagcttgagtctttgttgacactgcatacttgacatttaaactcaaatgtttaggtattatttgccatgaacaacattgttttaaaacttccaaaagatcttttcctagatagtccagaaaagcaaactggtttttaaatcacaattatttatggcatcgttttaaattaattatctcataccgcaagttccttgcaatagttattttctattatttctgcttttccttgacgtacaacataaaaaatatcaactgtaaattttttaatatttgtcttttaaatgataagtatagcttttacaaagcacaatcaagtaatatttaaaaggctaccagcctggtgcggtgactcatgcctggaattccatcacttagggaggccaaggtgggtagatcatctgaggtcaggcattcgacatcagcctggccaacatggtgaaaccccgtctctactaaaaatacaaaaattggttgggcgtggtggtgtgtgcctgtaatcccagctacttgggaagcagaggtaggagaatcacttgaacctgggaggtggaggttgcagtaagctgagatcatgccactgcactccagcccaggccacagagtgagacttcatctcaaaaaaaaaaaaaaaagattttataagatgtgttaaaaagcaagataaaaattctatgtatgattatagct

SEQ ID NO: 63639 - DNA, 520 bp, Homo sapiens
tagagacggggtttcgccatgttggccaggctagtctctaactcctgacctcaagtgatccgcccacctcgacctcccaaagtgctgggattacaggtgtgagccaccgtacccggccagtattaccaattctttagggcctatctgaaggcccatctcctccaggaaaccttttcttgactttggcctcattcactttggtgtttgctcatgttctgtacattctgccttacacaattggggatttcctgtctatgccaatgagtttacaaagtccttgagagcagggactgtgcctcttacttctctagtgccttgcacagcctacacacacttgccagtatgagtgttcagtgggtactcgaggaattaaatcgaacagatgtcaaggagtgttatggtcatttctgcctcatctcagtgaccaaaacaaaacacacttcttttttttttttttttgagacagtcttgctctgtcgcccagggtggagtgcagtggtgcaatcttggctcactgcaa

SEQ ID NO: 63640 - DNA, 1966 bp, Homo sapiens
acgctgcacacagtaggtgtgcatgcctgtaatcccagctactcgggaggctgaagcaggagaatcgcttgaacccgggaggcggaggtcgcaatgagccgagatcatgccactgcactccagcctaggcgacagagcaagactccgtatcaatcaatcagtcaatcaatccaagcaaaacaaaactggctttgaacagtcagcggcatcccaccagggattgagccccagtgtggggcacactctgtttacattagctagctcatttattccccacaaaagccagacaaggcaggtactaattatgatcgtgcgatattaaacatggagaaaccaacgctctgataagttcgttttattgtgagaataaaactgctcaatgggcgctgttattccaagcgaggtcaggatttccggattctaccccgctccgcccctggccccgccccgagaatgtacgtcccgccaggccccgccccggccttgtcccacccaccccgtccccgccccctgtccgtctcgccctagtcccacctcctcgtccccagtcagtcctgcctctcgaaccgccccctgccttcgccgaggcagggagaggtgcctgcagtgcgagccgtggacgctagggggcagccgctcggctcgggcccgaccgctctgggctgcgctcctcgcttgccctcggactcggctcccgctgcgagcggccgccctgcccgcgcaccgcgctcagcgcccaccgccgggcttcccgcgccggacccagtacctcggctccccggggccggaccgaggccgcaagcagcgccgcggggtgtggggcggacccaggagatgaaatgacaacgtcaaccctccaggtacttcgtgcggcccggcccgacttcggaggccgaaggcagcggggcctgcgggccgcagagccgggcggcgggcgggtggtcaggtgggcgcctcccagccccggcctcgcgaccccgctccggccgccccctcgccgcttccgcccgtgtctgtttccacgcgctcggagccgggtggcatctccaccctcaggccttccggccctgcccggctggcccagccccagggccgcttcgtgtagccggcgccccggtaccgccgtggggatcagcctcacccgagccgcacaggcaccctcaggaagctcggcccggggtccggctgggcgttcagacagcgatgctcgctccctcctctcctgtctcgctccctcctctcctgtcccgggtcctggaagtccctcgacctcacttcgaacaagccccggccccttccccaatcttcgacttcctcttctcggccagcgacccttcattcattccctagatcctgcagggtggtgctgggatggcgccacctgggtgaacaactgacccaccctctaggtgctgtcagtcctgcggggccagaagagatcaacatgctcaggcctcattccggggtttgaatctcagctctgccactcaccagcaagtgaccttgggctagtttttttttttcatcttcgggtctcgagtttcctggtctgtaaaatggggtaatgccctctaggttgttgtgatgatagctttaaattgaataattacggtaaagcattcttgtatgtctggcacatagtaggtgtccattaagtgacagccaacaaagtgcctgggagagttaggcaagacttcatggaagaagggacatcagagttccagtagcattcagagacctggaggtggaggagggcagaagtaggagcagacatggaatgagttggggtaccaggttaggaattaagagtccatagccagatcccaccgtaccaccagcagaagccgcagatcccgtctgcccaggcaggttttttatggcccgtgaaccgagaatgtttttcagtttcaaacacaggtgtatttatttatttttaaattttatttatttatttttttgagatgga

SEQ ID NO: 63641 - DNA, 1729 bp, Homo sapiens
cccaaagacactcattctcacagagctcttagaaggttccagagggacacagttctcttctgttggcagcagggagcaagcaagtacttttcttactggagctactggtatgtggagcattgtgtgtaagcgtcccttcccagggtgtcactttagacagcgaaggaaactgtcttctctctgcagcctggagaagcaagctgcatggagccaggaggaggaggagagaggcctttcagtgtatcctgtgcaaacttgcagtccgggcaggactttccttctggctggctcttctctggccctgaggccgggtgcaatttctggtctccttgctaaacaaaccagcagtcacttgctcccgcgtgtcccttctgccaggctctcagctcgggtctgtttctctttcccttgaggcagcagaatagaaagtcccatgaacttgccccttgagccctgacctgagatattaggtcaggtttccacttgctgaaatccagagcgtggcttttaaccgtctgagcttattgtgaagatggccggctggttttcaaagccttctttgaaggcctttctagccgatgttgaaaaagtaggccaatgaaatggcccgcaagcaataaatccacaggcccagcggcatccctcgtcacgtttcatccccatgcctgtgaccccagggactttccacctctccgaggaagcactgagccatttgctttgcctttccagaaagccattgatctggtgacgaaagccacagaggaggacaaagccaagaactacgaggaggcgctgcggctgtaccagcatgcggtggagtacttcctccacgctatcaagtgtgagtcacacgaggggtcctcaggctgccgcactccagaggggagcggaggagagggggtggcgcacgagcctcacaggggcccctctgtgttccctttcacagatgaggcccacagcgacaaggccaaggagagcattcgagccaagtgcgtgcagtacctagaccgggccgagaagctgaaggattatttacgaagcaaagagaaacacggcaagaagccagtcaaagagaaccagagtgagggcaaggggtgagtgtctgcagcgtccgcccaggaacctgggccctcctcacggctccctatcattcctggcgctcatgctgccttggacttccctgtgggaatggtcctcatagtgcagggatgacagtgccagcagctgctttcagggagcatggcctggagcacttccatgttcaccgtctcattggatctgacccacaagccatggggagagggggagcttggtgcagatggtagagcctctcaggacgggaccccagctctgtcacctcccagcctagtgccaggaccccgtgtgcctaccatctccacatcttggaagtggggaggtcgtggaactcacctccgagcgttgccacagggagcagtgagatgacgtgggcagtgcccttggagcttggcacacgagagcatgcaatgagtgccagctgctgtgactgtcaaagagtcacctgcctccaacaggtggggcggccggctcgggttaggagccctgccgaggtggcacaggatggaacttggacccccaaagcagggcgggtggccccgattccccagccagggtcctctccacagcctctcacctcaggtactgggttcgcccaccacggtgatcccagtcatatgaacacaaatgctgg

SEQ ID NO: 63642 - DNA, 1182 bp, Homo sapiens
caacagaccaaggacccagagctggcagccctggacccacgtccggcaggcagtgaagctgcagaggctgtcccacgtttaccccatgcatataaacagaccaaagtcaaagcacattcacacagaaagacctggcctagtaaatgaagcttatagcctgcaaagggctttgttccaaccttccctctccaaaacccagtactgctcctctacctttcaaacctggttgggccagaactgattacatggccaactcttggctcacactgggcttgcactgggccatttctttgctctggttcagagcctctgcagaagtgagctaactttggatcagtagctccaacacttggctccagtgctggcaggttacccctcaaccatagcagctgggatctttgtggcttgggggtgcttgtgtaagttcttggttatgtgccctcagccaccaggatatgaaccgtgtctgcagagcttcactttagtgagcttacaagtttttaaatttttacttctagttacatttacttgaatcagaacgttgtttcctcattcctactgcttaaacaccttgacaagtcctaggggttaacaaaggttagcatggctatggtccatccctgtgctctagttagagcgtgaagacacctgactttccagttgtctctctccatgaccagcaacaggaaccactgacgctgaactttggacagtggcctcagactctggctgccagcacacaacctgccatcatcgatgttaaacatgctgacatgtgcagaggagtttcctccctgaaatgctctgaaattcacttctctgcctggggattctgttataaaccttctgcctacattggctttcactgtggaagttgatttctaaaactctgatgagctcacaacgttgacatgtatatgcgttttttgtgagtgcttcctgctcaaagtgggagagattttactggaaatgcaataaagtttgcattttattgctaccgatgcccaccacaaaagcgttaacctcagaaagctataagaagcatcaaaagattgccatagccccctgtaagagcttctgaacattgtccaaatgaaaggaggctcagctgaattctaattttcctaaagacccatgtttttagcatctatgagctttctacaaatctccccattggctgca

SEQ ID NO: 63643 - DNA, 2682 bp, Homo sapiens
ccttcctccatacagaattgttaggaaatgtccactcctttgggggtgatttttctcctcaagttgtagccaacattttgtccgtaactgatttcagggcaaacatttctgacatcttcctccagctcagtctgccatgccttggcaatccagtttcctgtcatatgcgagccatccaagttgatgccaagtaagatttgcccagctcaaagtgaaagtgtttgcgtcttggtatccggaatcctcagccccagtagcaaagctttagtcattcaccttcatccaatagacgtttgtgaacgtcctgctgtccattttgtcaataaacaggcagccctgcaggtggtccatctcgtgctggatgatgcgggctgcccacccgctcgcctgccacaccacctgttctccattggggtccagccctgcaaaggaagttacagccctggtgagtgggaacagctgaactgcatcatcctcaacctccctacccctgcccccggtcctggctgttcccattgacaagaggcaacagcagatggcaaatgtagacagcagctcctcttctaactggaaaacgtccctcatctcggtccattaccaagcgttcaacctggttcccaactctggtaattaggttatcgagctcactgtagagctgagatgagaaatcatctttctacggtgcgacccttccgaacactcctcccacttctgaggtacctgtgggctcccaactcctaacagaggttctgcagcttgagaccccacttgtttttctgaccatcttgaaccgacgggcttgctgtgcaggaacaatcaccccgaccccagcagagcccgcattccgcgaggcatcctgtggtaccacgggggaatggcctagccccctgggctgggtcaggctggcgggggctaacccccacttctccaactccaccgtggcggatctaactggggccgaagagcgtgtttgcctcagagagcaagggagcagaaagcagacgccaggctgtcaggtaacagcggaactaggggacctctcctcgcccctgcgtcctatctgagcgggctctaccccacaggagcttctatccgtcctgaggcctctccgctcccgcatcccacttcgctcctgcgggaggtccggcgtatgaaccgcgaccacttctgcgctctcgcggagtcgggcagaagagacgcgcgcgctgctccagcagccccggtccccgccgcccgcacctgagatctgcaccgcctggaagcggggcacgcaggccaggaagccggcgacgctctcgcagccctcgggaaaggtgaccaggcggctgtcaagcactcgcaggctggggttcacgaacacgcgcagggggaagggctccatttggcggagcgcgcgctggcggggcgggcactcccgacacagcgcctcggggagctccagcgccagcacctgccgcggcacccccagctgcggcgcgcttaggcccacgcagcgccgccgccgcatcacctggaccagccgttgcgtcagccgctgcagctcgggcccgcctagctgcgcccgctccaccggggccgccacgccgcgcagcaccgggtccccgacttggcacacgtgcgagaacggcggttcgggaggacccagcaccagacgcctcaggtggcgccaataggagcgccgcagcgccgggccctcgacgccgtccggggcggccgtggagctgcaagcccggacaccgacggctgccgccccgccccacggcacggccgcccacagtggccaaagactcagcgcgccccacagccgggccatggcggcccccttaacagtgacccggcccgccccttccggccgcagcgcggggcacgccgggaagcgccgtcggccagcacacagcgaagccgcgactggatccccgccttcctgcttagactggcagtgagcaccgcccccttccgctctcctcccgggagcgccttcccgcctcccgaacccgccccggaccttccagggcgaggcagtcctggccaccccgcgccgggaacctcacgcaccgcgttctggaggcaggggacgccggctagggccccacgctgggcggttcggcctgcgtctccgctcgccctccctccgggcaggctgggcccgcgggctccaggcgtggctcctcggcgggaggctctggtgctggagctgtgagctcgggccccagcgcctggtcatccagggtgaaaagcgtctctctctttggcaggataaaggcgaggggctcctgaatggcgccgatgttcacatgccctaggttaccgtacttggagagctgagtgggaggaatgcctaacccagacgtggggaaagcaaaatggaaaacagttactaataaaactcaatatagaaatttaagggaggccgggcgcggtggctcacgcctgtaatcccagcactttgggaggccggggaggggggggcggatcacctgaggtcaggaattcgagaccagcctgacccacacggagaaatcccatctctcttaaaaatacaacattagccgggcttggtggcgcaggcctgtaatcccagctacttgggaaggctaaggcaggagaatcgcttgaacctaggaggtggagattgcagttagccgagatcgcgccattgcactccagcctgggccacaagag

SEQ ID NO: 63644 - DNA, 2133 bp, Homo sapiens
agatcgagaccatcccagccaacatgctgaaaccccgtctctactaaaaatccaaaaaaattagctgggcgtggtggcgcgcgcctatggtccctgctactcaggaggctgaggcaggagaatcgcttgaacccaggaggcagaggtaggttgcagcgagccgagatctcgccactgcactccagcctggcgacagggcgagactccgtctcaaaaaagataaaaaaggaataacagtacctatctcgaaggctgttgtgaggtttaaatggattaataaagcgctcagcagagaacctggaacgtggtaaacgctttatgtgttagttatttctaccatcgtaaatgtcagcttttacagttataaaacccctttagcgccaggcgcgtcgcacctgcagctctgctggaagctgggcaaacggtcgagcaggcggccgagcgacgcctccacgtcgccaaacaggcggtggatgcgctcggtgcactcggcgccgcggatgaaggtcttgtagttagcgaaggccaagtcgcgcgtctgctgcagcagctgcgcccgctcctccgccaggcgctcgggctcgcgccgcagccgctccagccccgagccgctcaactcccggaggtagcggcccacatcgggccgctcgcgccactgggcctcggggaagcggtcccggaacagcgacgccaggagcccttcatcctccacctcgccgagagccgctgctgtggccgtggctaccgatgggatagtcgccgcggtcgccatcttcccagcaacaacgtcacttcccttccggaccacaaggggcgctgactccgaacttaggacaggaagaaacaggcacatttccggtctctatgctttctcatccggccggcttgctttcccctgcggtcgtccagactattgggcgctagcgagacgaactattggtacggggctagagaggaaggctttgggattgccggggagcagcgagcgaccgacttccgtttccagttaccaaggcacgaggatccggtgttccaacccagggggaaaaatgcggcctttgactgaagaggagacccgtgtcatgtttgagaagatagcgaaatagtaggagcgcgcggggcggacgcgggagtgtgtgggtgtggtggccaagggtggagtgggggcgcggtgccggagaccggttcgttcgggcgcggtctccagtcctctttttgccctcagcattggggagaatcttcaactgctggtggaccggcccgatggcacctactgtttccgtctgcacaacgaccgggtgtactatgtgaggtgaggcggggccgggcaggcagcatggacccaggggagaggggtcctgggtcccacgagcctccttcatccgcaaccttgctccccctttacccttttagtgagaagattatgaagctggccgccaatatttccggggacaagctggtgtcgctggggacctgctttggaaaattcactaaaacccacaagtttcggttgcacgtcacagctctggattaccttgcaccttatgccaaggtttgtggggcggtttccaattctgccacgggcgatgaagtcaaggattaggcagattgtccggcagcttctctcccacagagtccctgacagtgtgcttggaggagtttcagcacatggagatgtgtagaggtcttgcagcttgagcatggtcagggctatgggataggaatgctatgtggctgcgtagggttagttttctccagcgaagtagaagagcctagggagacccagctagagatcagaaagcaaataagtggcagcaatgaagacaccggggtccagaaaaagagctgttaacctggccatggaggatgatccttgtagagttgagaaaataactttttctatttttttctttttctttcttgctctgttttttcttttcatttctctttctctttcttcctgacacagtttcactctgtcgcccaggctagagtgcagtggtgcgatctcactgcagcctccactttccagtttccagtgattcttgtgcctcagtagctgggattacaggcatgtgccaccacacctggctgatttttttgtgtgtttttagtagagacagtgtttcactg

SEQ ID NO: 63645 - DNA, 909 bp, Homo sapiens
ccttctttgaaatctctggatcagtctccaaagcaccattatccaattttgttttaatatattaaaaatgtattctctcccctctcatccccaaatccgagtacatgtaatgattacctcttcagggagaggcaccccgtctgccccatggctttgagcatggcccctgatgtaagaagccaaaccatatgttttagctcctgttggtgattattcacccagctggagtttccctctaactgcaggtccatttcattaacaggtggggaatcacagcataataaagacaaccagaccttgttttggcctaaaacctgacccactttatgagtaaaggagaaaaaaaaaagccccccagtatggccagtcacccacatacctcgtaactgaaatagaagtatccagtctggtgggcaaattgccaaaagcattccgtgcctcctggaggtatcatgatggcaaagtcatatcgatcagctccacggaagagtggctggtccccagagccacttagaggttctgtcttctggctcctggcagacgtcactagattcagaacgaccagcccagccccaaagagcaaaggggacatgccgctttctggagcctcctctgcaggtgaactgctcgcagcccagggaaatcaagtcgttcagacaaccgctgggctaatgattaactccacaagtcacattacggcccatttcagggccacacatagatattcatcatagaactgccatgatactcccatgtttggctcgcaggaggaaattttgctttcacctcaaaaactcagtggcttaccaaacctacttcatgggtgctacatagaatctaccacctcagaagaggtctttccacccttcattagggctgtcattttttagttcctgcttcttggggata

SEQ ID NO: 63646 - DNA, 1498 bp, Homo sapiens
tggagcatgcaaatatggtaagatttgcatttaattttttgacatatttgctacaggttgacatacacgataagggtccaaattcaaatcaatgaatttaacgtgaccattttttaacacctgtcaagacaggcaaaaaaattatttttaaatacctgcatttgcctctcaaattcagaatatacccatcctcctcagatacgagtggcaagaaactgacaacagctaaatagctttcaagttaaattcagaggggaaaaatgtcagagtacttccactctgaaaaactctctaccatgggggaaaaaagatgtccatatgaacataactcactttagacaggagcaaagttggggtgagcaattaacaggtgggagaagatttaaaaaaaacacagaaaagcagccaagacaaccttaaccggagaaaactagagccagtcgagccagaaaacagacccatcgtagaatgaaaaagaccactctgatggaaactatcgcactttaacctggaatccttcagttctagatataagttttaaaacaaaaccctacgcaagtaagcccagagaagaacacaaaaatagccatacctaaattttccccttcttcaatccgcgacagacactgcataacccgcagcaatcgggacacggtgtgctccttccccaagggcctgacaagcaaagctgggagagaagacatcgttggctgggcgacccccagtcccgactcccggtcccccggacccccttccccggcgctccaacccccctcccccggcccggccctcaccctgcatgatgtcccggatctgtctgaagtccccgtaccggctaccccgaaaggcccgcagcgcctcgtggaagtagaacttgagcacccagcgattgactgcctcttccagccgtgcctcccccgcgccgcgctccgccgggccccccagccccggctcgtggcgcccccgccgggcccgcccgctactgcgggacgcccgcctgccagctgcccgcccgctgccgtcgctactcccgcctcctcccgccatcgtgtccgatcgccgcgcgccctccccgccctcccggccgggccgcttcctcggctgtgacgccgctgggtcacgcacgacgcccgggccggaagcggggcccgccgtcccggctcccgcggccatgatagaaacagcgttccgagccgcccgcgggcttctgggagggaaaggaccggagggcccggcccccttctcagacgccgtagttcccgatgtgccggccgcaatgcctcctggggcttgaagtccacaccgcccaggccggtgaacccggcgggttttgcagtcaacttcgctccgaatttacagaaaacagctactatgctagggacgcggaacagtgtattagagactgaaaaacaggccgggatcggtggctctacgcctgtaatcccagcactttgggaggctgaggcgggtggatcacctgaggtcgggagttcgagac

SEQ ID NO: 63647 - DNA, 1275 bp, Homo sapiens
aatagaactagaaaatggaactaggaagggaagatttttcttttctctttatactctttcatgctggttcaaaattttattttattttatttttatgtattttttgtagagagggggtcttgctatattgccctgactggtctcaaactcctggcctcaatggatcctcccacctcagcctcccaaactgttgggattacaggcatgagccactacacctggcctaaaaattttgaccaaaggaaagcttacttttccaattttttaaaccattacaaaaattccatataatcttgagagaccatgaaatcttaaacttccagcagggggcagcaacgattctcaaatatctctgacgtcagcacaaagctgaggattagcgtccccaggtttccatttccaggcccaaatactgtccttgcatcaccagatcataaaggaaacaaaacgcaataaccacagaaggcttaaaatgccgcaggaattgttgtgtaacaaaacatttctgtatggctctttgttaacacatctgcgagttaaactgccttttctctctctggagctcacagttttctcatccattaaattgagggggtttgatgagatcatgttaaaagttctctttccatttctgtaatgctaagcctttatgacttaaaacccagtatcaggaagaaacaagccccagtgccctctgaaattaactggcttatcaaagaatctgctttaaaaccctcagctggtcagtgaattactgccagtttatctttagtgtagatcaaagaatactttttttcaggggggaggatgttggtatttacttaactcactgatggagaaaaagaacgctcccactctataaatgtttagcatgtgtgtaaaggtcgtaggtctggtgttcagaaattacatacaggcttacgaaagaatctgcactgggttggccaaattaaacaacaggcagttgtagagaaataaacacaagttaacatttaaccacaacaagtctctgttcttgctgctcagtctttctcactaggaggagccttgagaaggtcagagagctctggctattctagcgagagggctcttctgagaatgcactaatctattacttttataatatatatatatcggccgggcgtggtggctcatgcatgtaatcccagtactttgggattcctcatctgtaagatggggataccaaagacctctaagactgttaattgctgtgagggttaaatgatataatacattatcaaattgcttagcatg

SEQ ID NO: 63648 - DNA, 1360 bp, Homo sapiens
ctcaaaaaaaaaaaaaaaaaaaaaaaaggcaaacccctctgtaagagagtgctttatcaagcccattttactgatggggaaattgaggagagacgggattggccagatcacgacctggaggcagcaaagatgtaaaatcagggttgggatacaggctgcgccggtagtgtaggggataggaactttctgagactcaggagaaagccacagcgatgggaagggaagcagaacactggagaccctaaaggcccacaggctgagagaagtggtacctctcctgaagtgacacctgtcagcacgcctcttttgggcgccagtccaaaaatcgcggtatctgattggcgaggttggagggggctgaacgaccctaattggttagttggacctcgaaccagactttcatctggaggatcgggcgaggagtgggcgggatttcgaactgagccactcccttcattggtgaaaagaaaacgaaccaggaactattcggaagtgtgattggctgttgctaggaaccgtctcaaggccttatgggccctggttacggaagccgaggaaggctgagcgcgggctctcaaggaaagtagtcgcggaatctcagttagcggtggagaggcagtatgtccggttcaatggcgactgcggaagctagcggcagcgatgggaaagggcaggaagtcgagacctcagtcacctattaccggttggaggaggtggcaaagcgcaactccttgaaggaactgtggcttgtgatccatgggcgagtctacgatgtcacccgcttcctcaacgaggtggggcctgggaggtgggaggcctctgaagctgctggggcgaggggtgaaaaggctgtgtggagtgtatgtgggaaggaagggaggcttggctgggggcgataaggcgtaagaaagggatcacgaccctcagagggaaactggggtgggattgggggagggctttagtttgcatgcatttccagtcagctccgagttctggtgccttatgtaatatcatgtattacttatgtgtcgagcatttgctgtgtgctcagctaaactctaagccatcattatctttattttacagaaagggaaactgaggctcacaggttgaggactctcagggccatagagttagcagcttagatccgttgaacctaggtctgaagtgcacccacatctgtgcttttccagtgtgccttctgaagtaataccggttttggttttcgtcttctagagtagaagctgagatttctctccacacgcttccccatcttgattatgcctccactgtttttttttccccctaatctgagttgaccttgaggccagaaactcataaatcaaccctttttttttgt

SEQ ID NO: 63649 - DNA, 901 bp, Homo sapiens
aattgcaaagttgttttgtttcttataggttatcttctttatctgtaatacagaggcctttctgtacttattttccaaatttaattcttttttcctgtaggctcaaacaggcccacacccttcccggttacttagtaatacagcgaaaacaaaagactaagtatttgagtgtttgaaaactttaatgtgtactacattgcataccaggaagaaaatatggaaccattttctgcctcccacatgctaggtggttcatttcccttattccctaacaattttccttaatttctgtccttcagatagctggtacacagcactctaatttaaagggacagcagtttaggtgccacctagaacataggaaagtgatgctgcctcccttccattttcctcctccttgctgcttgcttcccattcctcattgagccgaaattactgaataggtttgacacagcaattaaagttggcctagacacaagaattctattaactcaagagattgcttgcttaacagtgtctgccatctgttgccctgcaatccagagtgtttgtgtaaattaactcttccatgttgctagactgctactctgaactattgaattgtttctgaaaggggaatgaaatggttcttaaaacactttgtaacaactgttggttgtttgtcctctcctcctaacacatgtactatccattcttgaatccttaaaaaaaaaaaattaaatagttcaaaacagtattctgtaaaaagtttcttcctgtctcaagctctcagtgtcttagttccccttccctggaggtaaccagccatcattttttgttgttgcttactcttaataacttgtgttattatggtaaaatttgaacgaagcgtggccttgatttgtatattgaacatgtccag

SEQ ID NO: 63650 - DNA, 651 bp, Homo sapiens
caggacccagtctgttcctacctgtgagcccttggccaagtatttctcctctctctgtctcgttttctcatctgtgaaatgggaatgctaataacacctttgccggatgagttgacatgagagtaagaggcgagcttgtgggtgaccgcaggcagtgccatgaatgacccactttaggtgctgagcacccaggagcccttcttagtgcgatttgcctgggctgccttgagaccacacatgtgatgcgggggtgggggggaaagggtaacagagaggagcagtgacatggaacaatcccaagaatgaaagcagggcggcggggctgactcaccggatgactcacttccttgcccagggatgttctgagcatccacggagctgcttctcatagttctcatacccttggttccttctctgtggggaaggcaggaggaagatgcccctcctcgcccagagcagggatcagaatgtgggaccttctccgtcatacccagaaccatggagactagctggcaccccattttttaattcacaaaataacagtccccataagatgtaatctttttaaggaagaatagtttttgccccaggagtacaggagagattctagactccttttgcccttttccaaattatcacagggagatctgg

SEQ ID NO: 63651 - DNA, 490 bp, Homo sapiens
ggaaattttcctttcagattttgtgtttgtttagtaggttccttacaatatatgtgtgactaaaattattttaacagccttaattgtattacaatgacaaagatttgtagatcttgtgacagcaagattaaataaactctgttctgtatgagtttatttaattccttttcagtggctgatatttgaacctctttcatttagagtcaatccagctacacaattcacaaagtgcctaaacaagtccaggaggggttaaagtacacaccaccaatataaaaagtgccattctattgcataatctacagtcttgtagttgaatctgggttcttgtgaaattttaatcaagtgactagggaaggtaatatatgattgggaagtaatataaaggaattctataaactactaaatctgctgtatgttttgctccatggtcccattataattttcaataagaggaaatttccaaattttaccttttgttgtgtacaga

SEQ ID NO: 63652 - DNA, 2973 bp, Homo sapiens
gtatatatgtgtgtatatatgtatgtatatatatgtgtgcatatatatacacatacacatattacaacagactgattttcatgagttgtaactatccttgtagataaaaaacgaaaccattcgaatagcttaaaaaccatgcccacgtggctactggcatcaatattccacacaagattaaaattacttcccaagatgcacaccctgcactccaggtaatatttcaataacttgattaaaaatttctcagaagtctattagaatcagaaaacgctctgcggtgtgggtgaggattttaaatttttgcaacggaaacttttggctccacgaacagaaaagcaagagcaaaaactcagttaaatgcgttcttcctccatctttgcctagtccaaaaggaaaaaaaaagaaacagaaaaaagaaaaactgtttggaagagtagcgttgaggtttgctttttacctgtttttcctctagaacagccaggtggattcacatgatccaattttttaattgtcttctatgtcccactccgaataacccggatgccccagcacaatcagagagatcgttttttttaaaaaaaatttcagcctccaaaggtaggaggggagtgttaggggagaaagtactttaattaaaaatcaataactcgaggtttttgggatacggtttgccatttcctaattaagaaatgggtttgacagtccctttgtacacactgctatgcaaaccccaaagggttggcggctgtccgggcgatgacactccggtcccctgcgagaccccgggccagccaggcccgtccgccgccggcctctggggtccgtccccggctcgcgcagacctctcgcttctctcggctctgtctcctgcgctcagctctgctcggggccggccgcctcaggctcgccgccaccaggtcgttgcaaataccttttccctccccggggccccagcgcgcggccacctcccagcctccccccctcccaccctggcagcggggccctttcccggctcaggaacagcagcagcccgggccgcgccggcaggaagcgaggcccatgttgctgctgttccctggcgcgcctccccgccctccgggggccgccacggctcttccgcgctcccgggcacccccctccgcgcctgcgctgtgccccacgggggcggggctcagattcctgtcagcggcggcggcggtggcggcgaccgtcagttttcgctgaggagaaacacgaaacggaccctttggctctcccccttccccttccccgtcctgaacccctctcctggtcaccgagaatcagtccccgtggagttccccctccacctcgccatcgtttcctcggtcctcggcccagtggaagtcactaccctcgaggaggaggcagcggcagccgccctcgcgtcgccgcccccggttcggtgcccgcggtcccggagaggaggtgccgccgccaccgccgctccccccctcccgctgccctcgggccgggctgggtcgagctgcgatgccctcggacttcatctcattgctcagcgcggacctagacctggaatcgcccaagtccctctactcgcgaggtgagtcaggctgtggggggtggggcgtgggggcggggagacagggagacagggagacagggccaggggaggcgaggggtccccgtcccgccgggggcggctgagccgcgacccccatggcttctttggccggagcgggcagaggccgaagggatcggggtgacggtggagggggcgggcggagcagtggcggcccctcccccgcggagccgccggccgctcggggcccagattccgtcggcccccggggctctgcggcaccggtcgcttctagccgctctcagcccgtccggccccgccaggctccgcgagccgccggccccggcctcccgggctcggggatggccccagactgggccccgcgctggggccaccgcgatcggggcgccgcgtcttctcttaccgggaccctcctccccagcaaagttgcccccaagcgggcggcgtggcctggagccggttctgagtgcagggtcaccattttcctccctttccagcttgtttttgcgccgtcgttccaccccctctccctccggcctagtccactccctccccatgttgggacagcccccctcgaccaggcgttcttcctttcctcgtcatcttcttgctggaaagggcccgatggaaagggcccgaattttcttttctttttttttctcttcccacctccgtggcattctaattacttctcccttctcctttacaaagatgggggtgccctctctggattggttttattcctctcctctcccaggaggaccagcccaggcacagacgctgtcctttgagaattttctctgcttttccgttcaagggctggttgcagggagggagctcaggcagagacttttcatttaagaactcttttggctaaggcctgcaggggattcccagcatctgaaatattagcactggagctgatccctactcaggtgaaattcctttactggacaccacaagaatgtgtcagaacaggttccctgtgcaaggggcttcaaaaccaaaatattcccactgcgctctttacgctttttaaaccaccgggagggggcaaaagacataactgggttgttaactattcatttcaccgtgtaaaaaaaaatgtaggtgtttcttctgcttttggtttgatgtatccatccatttgcttattccaccccctccaaaaaagggacttcaccttcctactagtgtatctaaattgtttaagtgaatcagagtgagatggtttactctgaaaggtgctggactttacagactgaccattgattttgtacacagagtcctacttagtaattgtagccactgtctgttgctccaatgactttagttggcagccaccatcctgtaggatgtttttcgggcaacattacctgaggtacttt

SEQ ID NO: 63653 - DNA, 1290 bp, Homo sapiens
attacaggccgtaagccaccgcgcccagcttaattttctttcacatttaatacaatgcaaagcattccctttttaaagctctgccaggtgcagatctttgtatccagtcatcagcccaatctactgaaaagaaatggacgagagtaatagcaagagatccaaactcttattttaaatccaaataaatttattgcttgtctgcaaagtgcttgacactgagctgactgccatattcctcagttcatgctcacagcaaccttggagacagatacaattattattcccattttgcggatgaggtaaacgaggcccaaatttgaatgctatgcccgagagcatacagctagttactggaggactccagacccaggaagcctctctcctaccacaatctcctagaaagtgctggctctaaatctactgctctgataaggcagctagaccccaactcgcacccaactgggtgccatctgcgccctggaccccagcttcccgtcaacgctagggcagaggcactcacccagccgcacgtattccggtaagggctccttgaaccgcagctcgtagggcaggacagcgagccgcctgcgtgtggccttgtcccgaatctcagtgaccacctcccggatggtgtaaatgttcttcccgatgtcctgcggacagaacgccccagctcagacccacccgcaccaagcaacgctccgcgcgactccacgcactccgggaggggcggccagcccagatctctctcgtcccggagggagctccccgtacctgcagagccgcatgccgcaggaaagccccagcatccgccacaacgtgctccactggagccatgttggctgcgtgagaggggagcgcgcatgcgcacggagcttgcgccggctcctatgtccaagtctgggcctctgggaaccaggaagagcagccgcgacttagctgcgcctcctggcggccgcgccagcacctccctgctctactcgcgcgcatgcgcagcgacgccgcccgcatagccagagaagtgtgggcggggtcaaaccttgggggacacctgggaaatcggcttcagcatctagaccttagtgccttcttcacctttgaagataaaacctgccaggtgtagtggtgcgcgcctagagtcccagctattaaggaggctgaggcgaaaggattgcctgagccctggaatgtgaaaccagcctgggcaacatagagagacccccatctcttcaataaataaataaatttaaaacctgtatatattcttatggttaaaagtcaatcaataca

SEQ ID NO: 63654 - DNA, 1918 bp, Homo sapiens
tatctatccacctacctacctacctacctacctggattataattcattaagttctctgtgccctgtagttgtagattaagggaatgcgattggattagtgtggaggggctttttatggagccaagcaggagtttttaagcttttgtacttttgcttcatgtcacaaggacagatgccccacaaaggctgagatgtttgtggtcctggatcttagaacagtgcctggcacataataggcataaggttgccaggaaatagaaatacagatactcaattcaatttgatcttcagataatcaaaaaatactttttttagtataaatatgtcccattctgtatttgggacatacatattacactgttgtttatctgaaattcaaatttaagtgggtgtcctgtactttatctggcaaccctactaaaggagctcaattaagtatttgctgacttaacagtctgaaggtctcgtttcacctgtaaaatggggctagtacctgtccctgcctctataaggttgatgggcagagtaggtggcattcagtgagccctcaatttatttgattgcctgggaccatccggtgagcagaaacccttccactttcaactacagagacgataaaaaggcctcctcgaggccagaggtgcccaggccaggcctaggtggcccgcacctgcgagcctggccagcctcttccgggtcaggtgaccgcgcgcggtcacgtgacccggcccgagtgcgggcggtggaaggcggaagtaggagaggagttcggcgccgcttctgtggccacggcaggtagcgagcgctggcgcggggggcgcggtgggctggctgcctgcacggggcgggccgggggcggcgggcggcgcggggtgggccgggggcggcgcggcccgggcgtcggggggcggcggcttcctgtgggaggggcctggcgcggcggttccggcctccgaggaggggtgtcccggctcccgcccgagtggggtgggcgcgccgcggcccgcgcgggggttgctccgaaatgggtgccccggccgccaagggtgcagctggagcgagtcctcccggaaggggagaggagcttaggttcccaggcatggagaggagcgatctttgtggagggatcgggaccaggggaaggggcgacttggaactgagctggaagggggtgcctgaaaatgggtttatggcgtggagccagagggaaaaagatgctgcctggaccccctctgagagtctctcccttccttcctgtttggaaatgattgttacccgagactttgatgacggtcccattcagtttttaaacttcaggagggatcacagaatcttgatcgtcttgcttccctcgcgcccacttagtcctgcgtgggtagggtttccacttcttgggagcctagcccttcagctcatttttctttgagattttccctgaacgggccatcatcgaggctttaaaaaacaaaaaaagaaaataaattaaaaaaataagtgtgggcactttgcctgtaaaatggcttttagcttacactgttgacctagcccagcgttacctcagcaacatagtgactgctgaaatcttggacagagaagtgtctacctagactgctttatgacttttctctttcttccgtttaaattattcagtttcccttagcttatcttgtgactgcttatcttgacgaactgtaactaggtagggtgcctgagaggtctgtgttatgttccttagaactgtgacctggatcatgattttgagattgaatacttgtgttaaagcctgttcatcttcctgtttctcatgtttactaaaatttgcagaagcaaaaggagtttcatgagtgcagtgtaactggaacgaatgttcaaactggacattcacagcagccagcatcgttttgggttacaagtagga

SEQ ID NO: 63655 - DNA, 575 bp, Homo sapiens
cttttctttccttcttagacttaagagtttcttcgtgttgggtcagggttttgtgtgagagtttctttcttctctgtagggcattttcttaggatcatgagccttgcttgtagcaggggcagggcctgacgctgatttatcagctttcgtgcagtaagcacctttgaattccgagctagaggctggcgctgaagtggtgaacagcagacagcatccctgtcctcctggaatttagactctagagaggaaaacagaaagtcgaacaaatggtgcaaactattccagttgtgacagatgcgatggagcaaagtacaggatgatctgggaatgcatcatgggagactttgcctggcctgggtggggtgtgtgtgtgtgtgtgtttgtgtgtgtgtgttcatgcatgtgtgtttatcaaggaaggcttcctggaggaagtgacacctggacaccagaaagagaaaaaggaatcgtctagaggaacaagagaaaatcattttaggtggagggaacagcatgtgggaagctttgaggcaggaacaagctggttgctgtcaagtcacacaggaggccaacgg

SEQ ID NO: 63656 - DNA, 790 bp, Homo sapiens
ctgttggcctagctgggtagaagagactttctgttgttaggctctggctaaggttggaagccgaagagccatcgtaacagtaaatcctggaatcatctggcttcctttactgcaaaggaaatgtgaaagagccttctctctagacctggggtggactccagcctgtgtgtgtctgagtttcagggaactggggaatggaaaggagactgtttactctctgcccttctggaatttcccccggttcccttcctctgtgtaccagtgtttgcagttatgtgtagaatgaacacgggcctgttaatgaagtgctgcttactctcacccgcttttgatgggcctatgggattgagggcagagggaggcaggaagaaggaggcttgtttcactaagcaggtcttatgttaatggccaaatcagtcacatcttcatcgggcttcagagactcttaatcctggcgtccttggcctccctttaaaaaattctcctttctttcttgtttcatgtttctcaaatttccaggtaaatcctatcatttgtattctgaattaggaaccaaaagaaaacagaactatttttcctttgacatgcacatacatttcggtggtatggggtggggagggacaataatgagaaaataccccaaactagaaagttctttcgtacatttgctgtgaaactctccaggcaagagttctggattttgtaacggaattgcattatagtagcatggtctggcagttacagtttatgtagttttttttcttttgttggaataaggacggcaatttcc

SEQ ID NO: 63657 - DNA, 749 bp, Homo sapiens
ataaataagtcttgtttgggaaaagaaggtgtaaagtccgtgtacttcaactctgccagaaaagaatgttacttaccctctaagaataggtaatatctcatttatactaggtgttcaaattcccaagtgattattgaatcttaggattgagtgtctccttgaggacattaggatcactggaatgctgctccttcgacatgggcactggatcccacagagtgatgccataactgtatgagggctgctgaactagaccagcaagaactgggtcaaggctgttccctagtcatgcatgtatttgagagttccatcttctactgtggaaattgaattgtcatttatttgcattcattttctattgctctgtaacaaatcaccacaaactcagggcttaaaacaacaccatttattagctcacagttctgtaggtcataagtccaggatcacacggctgacttttcccttcagggtctcacaaggccaaaatcaaggctctggcaggacaacattcttatctgcatacactggggaagaattcatatcaaaggtcattcagggctgggcacagtggctcacgcctgtaattccagcactttggcaggctgaggtgggcagatggcttgagtacaggagtttgagaccagcctaagcaacatagccaaaccccatctcaacaaaaaaaatacagaaattagctaggcatggtggcgcatgcctgtcatcccggttactcaggaggctgaggcggg

SEQ ID NO: 63658 - DNA, 803 bp, Homo sapiens
gcagcctcttctgtccctttcagtcatttgctgtacttccctgtggcacgttaccatggaagccgctccagggtgggtcagggtgcaagctgctggtgaggtttggaagcatcaggctcacgggtgttcatgtgtgttcgtgcgtgtgtgtgcgtacgtgtatataactgaagtgtctgtacggaatgccctttgctagccatgggctggtcaccagattgttttgtaatgcccgccccttgcctcgatattgccagtttcttgtgcaataaacaatcagcagctgtgggtggtgttgttgtggatgtttacaaagccacagtcctccagtcaagaggactccgggcctcacagaccctccaggcctggataggggtggaaattccctgacctcgctggttttgagaagcatgtgtgtcatggaccgaggcagcccccgacttctgggctgggcagctgagtcctggcccaggggtcaccggcttcagcccttggtcagctgcctcaccgtaccctttcggcaccctctgcctccgcctgctggacccgggggtctccaagcagttgctgtggggtgcagaacaataacagctacagactgggtgggcttccgaaactggcttgcagggagagtgttccaggcagtcattcatttgggaaatactcaggtttcacaagttccacgacggtcgagggactctgtgatcttgacctcagggtcacgtaagggcttgccacccacttttttttgtttttgacagatcaccatgctggcgggtcttgatgcatttgacaaggaagtg

SEQ ID NO: 63659 - DNA, 1758 bp, Homo sapiens
gaagaggtcttccaaaacatgggggcagatggcagattctcgttttgttcacactaaatctctggtattttgtgagaaaaacgagtaaatggtggggaactactctttgagtaaatggtggggacccactcttctctttgattttcccagcattagtcacgtagttggatctggcccaacactagtcacctggttacatcgttcttccttggtcatcctcttacctaaaggaccgggcattgagcttgaggtgggagagtaccacattccctggagatgccagctgtgtattctcctcgtcctgccgcattctgtgggtctcctgcacccaccttggctgattcaggtgtttcccttacacacataccacaggcgagtgttgcatgcaatagcttggattccttttttccacatttaaagttgtcttcccggcacggtggctcatgtctgtaatcccagcaatttgggaggccaaggtgagtgaatcatctgaggtcaggagttcgagagcagcctggtcaacatggcgaaacctcgtctctactaaaaatacaaaaattagctgggtgtggcggcagccacctatagtaccagctactcgggaggctgaggcaggagattcacttgaacccgggagtggagatggcagtgagccgagatcgcgccacttcactctagcctgggcaaaagagcaaaactctgtctcaaaaataaataagtaaataaagttgtcttgatcatagtggtctgtttggtagatgcctgttcagctacagtggtgcagttcatagaaacatactgtgctaggataaagaactgcagtaccactgaagctggttctttgctacgtcttgctttggatttcattttacagttttaaaagcaaacagtgtagtctcatttttgttggactttaaacttaacagcgtatgttcagacagggattgaatatttgctttcagtttggaaaaccttctgttcactgatctgataacgtacatgtttctgaaaccaagaaaagagcagcttgagagcctgaatgctgtgggacatgagcaggcgagccctgccttcctggctcccccgccgtcatccgatgtgtgcacacgtctcgagtaacgtgtgagagctgggcctcacagcttgggccagtacgtgagggagtaacagtggttgggaaattggagcaaaagaacaaagccagaatcagatgaagaccatggagggttggtgggctgttttagaaatgatgatgagattggccatttaccaaatggtgagagagcttctataaattattatttaagaattgctgtaagctagaatcaccacacaagacattttagagaggtgaaaagacatggatcctgttgtcatggagcttaagtccaggctggggtgaccccagctcatcactcctgggctgtgccctgagcgtgtcaaggatgagacatcctgggagttttatacgcctcctctcttgtccatgttaatagtgtgagccatcagcgcttccagacatgctccatgcttaattctgaaggtctgctgcttatgaactttctgtctcttcctatagtacgccctgcatgtatacaatgaagtgatgagtgttggccagaaatacggaatccggaatgctgggtattacgctcttcgcagtctccgaattgagaagttttttgccttctggggtcaggatataaataacctcaccacgcccctggaatgtggacgagagtctcgggtgaaattaga

SEQ ID NO: 63660 - DNA, 1382 bp, Homo sapiens
gtagtccctgctccagaccaagtcccaccatctggcagtcaggtcagtccaaccacagtcatatcagggcccttccaggaattctcgacgcaaactggaggccgatggcgcgggtcttttcgtggacggcggcagcacggtcctcggcttgcgtccgtagttgctcaggcttctggttcagggctgggcggcggcgcccctgcggcgggcggcccgcaccaggctctgctgcagcacggggtagaggcgctggcagccctcgaggcccaggcgtacggcctccgcccagctctctgtcaggccgccctcgccgctgcccagcagcccggccacctgattcagcacaggcatgagcgccacggtgaggccggcggcggcgcgctcttcctcgagccgcgtggggtccaggagccaggtgggcgcgggccccggcgcgaggctgaggccgcagcccaccaccaggtcgtacatctccacgcccgcgtcggccagggcgagcgcggcggcggtgagcgcggcggccagggccgagccaccgtcctccagcagcagcgccgacacctcgagctgcgcgcgcgggtagcggcccaggcgcacagccggctccagcgcctcctgcagcgccagcgccagctcacgctcctcgcagccgcccgggggagcgcggcgccggcggcccgcgaagggtgcgcggcggaagtcgcagagcaggcgaccgcgcagcgcggccggggcctcgccgcctgctccggccgggccgccgccgcgctcgccgccctcggcctgtcgcgggcccgacacggcacacagcaccttggtgcctcccgcctccaggtaggccgagcccttggcctggctcagcagcccggcgcgcgcgtacacgggccgtagccgcgttgggtcgcgggtgccgggcgcctcctcctcgtcggccgcgtacagctgcggcggctgcgattcttcagggccgcggatgcggcggtgatccccaggcatggcggttcttggcgtgcgaaccccttccgcccaacgccctgccgcatccactggttcttccgttgtttaaagacgcgcggctgcgcatgggctgtcgagagagcggcgggaggcactacagcgcccctggaggcccggagggagaacggcccggtcccagttgtgcagggtagccggatccatccatcttgctggaagggaggggggagagcagctccaagaaaggcttctctgcttccaactacctccacccctcatctactgaattatgaacgccttgctccaagtcaccccacctatttggcctccacctccacagacgtttgaggcagccctaggggctgttcccaaaattttgggttctggggctggactaggtgaacacc

SEQ ID NO: 63661 - DNA, 2289 bp, Homo sapiens
ctgggactactgggactacgggcgccagtcaccacgcccggctatttttgtatatttggtagagatggggtttcaccgtgttagccaggatggtctcaatctcctgacctcgtgatctgcccacctcggcctccccaagtgctgggattacaggcgtgagccaccgcgcccggccgccttccccttcttgataaggctccccctcttttactgtctcacagcctcaagtgtttcccttcataatttccatacgcgcttcatggattgtttaatgtgcgcctcccccatcaggctgtcagttccatcccagcagcaacgactgttctgggctctttttttttttttttttttgaaacggagtctccctctgtcacccaggctggagtgcaatggtgtgatctcagctcactgcaacctccgcctgccgggttcaagcgattctcatgcctcagcctccggagtggctgagagtacaggcgcgcgccgccacgctcggctaatttttgtatttttagtaaagacggggtttcaccatgttggccaggctagtctcgaacccctgacctcaggtgatccgcccgcctcgacctcccaaagcgctgggattacaggcgtgagcctccgcgcctggccctgggctattacagcacatcctcagcatctagtacagtggctgctaaatacgtatttcgtgatcaggtatactaatcctttaacaccaagttcggaattaactcacatgcttcaaagcacaccgagaaatacaaactgttttacagaacagcttaagatgacggtctcggtgcgcctggaccggcatcagctgtttagttaattttaagaaatcaaggaatggctggcttacagcaggattgcacccagctggcccatccttcctcccgtgcccccacccgcccctaggggattaaaaccaagggagctaaaaccccaggttggcaaccgtgaggtattggtgctcagcaaatccacccgaggccgcgacactcgcagcgctcccgggggcgaacgcaaggccacactgtccagctcccgctccagcccagactgggcttctccaggccacgcggggcctgatcctggggcccactgcggctgcggagctttccccccagtctgcgggcccagccgctctcctagcaccgcagagctctccgagggcggcctacctctcctagggtcgccgtccccagctcctccctcagagtcccccgccaagggcccgctgcacctattcccgcagacgcgcagctgtaccggcctcagaccacgacctaccacaacccgccacgctccgtccaatcagagcgcgccgacggaaagtgccccgccgcgccttacctcatgagatattattggtcaaccaacatgccagtcaaactgaggacgaatccgttcattagtggattcctgggaaggcggctctaacttggctgatgcaactgcgagaaaaggtgggatggggtgcgtcacatgatcgagttagacccccccccgccccccccgcccccccccgcccccggctcccggaggtcgacattttggtttccataggcaaagtcctaacaccacaattgacatagttaaaaaggggagacggtaacgtgtttggtagaggttacatatcttgctatagttgtttattttagttgctgagtgatacacagccctcaaagagtctgacattgtgcccatggttacacttgtccgggggagaccttgaatttggtgtggaagaaataacatcagtagttcaggtacgattggatcagcatctggtcctcgatttgcctttggaaaaaaaaaagttaatatttataggcctgggggaggagggtgaatatatatatatacatatacatatatacatgccaggtgcggtggctcacgcctataattgcaacactttgggaggccaaggtgggaagatcacctgaacccaggagttggagaccagcctggtcaacataactagaccctgtctctacgaaaaattttttaaaaggccgggcgcggtggcccacacctgtaatcctagcactttgggaggctgaggccaacggatgacgaggtcaggagaccgagagcatcctggccaacatggtgaaaccccgtctctactaaaaacacaaaattagccgggcgcgcatctgtagtcccagccactcgggaggctgaggcaagggaatcccttgacctcgggaggcggaagttgcggtgagccgagatggcgccactgcactccagcctggctacggagcaagactccgt

SEQ ID NO: 63662 - DNA, 1673 bp, Homo sapiens
tcactgcagcctagacctcctgggctcaagtgatccttccgcctcggcctccagaagtgctgggattacatgcatgagccaccgcaccgtctgttttcttcctttttaacattctcctgattctacaacgcttacataggagagctgcaattcctcctcttggggtacaaatttatgagtgcaggtgcagttttgttacatgcctaacaagattgcatagtggtcaagtggacttttaaccaaatgggttgtcagggctgattgccaacatctggacattttaaattaccaatctgaaaagggaaacagctctgtgcttgttttgcattttggtgactattggtaatggttttctgttttgatatattcaatctgttcaatctgtattagtgcctactctgccactgtgttgggcgggaatctgattttgttctttggttggagatccaagttaaccagagcttaggcattttaagataactacctcagcttgataggaaagcttgctctgcccggggttgaggggtacgggtctgagggcaacagaatcgacagcctcaagtgggcaaagggtggccaaacaggagtggcctccgacgtcactgtggcgcgccgcttccggtctgcagccttgtagtggggctggagcagagcctgccgcgaacccccggagcccacgatccctcgtgccatccctcgaatccaccagcacgagcgtcccacccgcgcctgggaccatggccactgactcatgggccctggcggtggacgagcaggaagctgcggctgagtcggtgagttggcttcagccctaaaagggtcaggggactagttctggtcggagacttggtccctgggaaagaatgtttcccaggttgattagaggctggatggggtggcggggaggatagggatggagcctggaccctgagctggctttgtttacgcagccgcctccgcgttacgtaagcgcaggtgagtgctcctatcggtaaagcgctcagctgcctgtctgtcttcctggaaccaggaagaatcatagattgcacccatcaccctagattgtgttttgtttgtttttaattgaaatagagacatggtcttgctaggttgcccaggctagtctggaactcctggtctcaagctatcttcctgcctcggcctttcaaagcaccaggattacaggctgagccattgttcctggccgccccggtttgtaatagttattttaggtgtcattctccacctctacattcagagcttctttggctcagggaccatgtctttgctcatatttgtgtgcttcctcagtgataaatgatggacccagtaggtgtggcagtcagcaaatcctttcctcatcggcttcactttgttctttttttctggacctgacacatggtaagcaagagatgtgttaaacactactgcgtagaattaatttctcccaccgaaacactttaaatcctagtaggctttgaacctacttctgttagtacttattgctatgacttcctcaagaataagaaccttgtcttttattttttatagctcataaaaaataagttgtatatacacattgtttaaagagtgaagttattttaaaaacaacggttcccgccaatttttttcctccccagaggcaactccttttttttttttggagacagggt

SEQ ID NO: 63663 - DNA, 2120 bp, Homo sapiens
gtggtggctcatgcctgtaatcccaacactttgagaggccaaggcaggaggatctctggagttagcaggagatcaaaagcagcctgagcaatataatgaagacttccgtctctgcaaaaagtttaaaaactagccaggagtggtggtgcgggcctgtgggcccagctacctgggaggctgaggtgggaggtcaagggtgcagtgagccgagatcacaccactgcattccagcctgggcgacacaatgagaccctgactcaaaaaagaaacgaaaaaacgcattgtgtgttgtgtttattggatggtggaattatggggtttacgggtcttctgttgcgttttggtttttgttttcttacctgttatcgcgttcctaacagtagaaattggcatcatatagtattctcatggaactttcctttgttcaaagccctacagttcagagacttacacatttaatgtgagatatgacaggcttaaaaagaaacgttgggggccgggcgcggtggctcacgcctgtaatcccaacactttgggaggctgaggcgggaggatcacaaggtcagcagttcgagatcagcctggccaacatggtgaaaccccatctctactaaaaatacaaaaattagccgggcgtggtggcgggcacctgtaatcccagctactcgggaggctgaggtagaatagcttgaacacggaggcggaggttgcagtgagtcgagatcccgccacggcactccagcctgggacagagcgagactccgtctcgaaaaaaaataataaaataaataataaaataaataaaataaaataaacgttggcttatttcagtgtgaagtaaggcaataaacggagggctaacagttccacttcgtagagctcagacattttaagaagcgaggaggccgcgtcctggaagggtgagcaaaaagcgcgaggtttgcgcacgaagggaaaggcgaggcccgaggagagacctggcgccgcgcagaatgatgatgtcgcacgctgggtgggaactgacgtcacctgtgctcaccgccgcttccggtccgcgtgaggtgcattctcgcgccggtggcgaggttagggcccgcgttgcgacgtggtgcagcgcatattttcacaagtgggtctcccttgtccgggactatggccaccgactcgtgggccctggcggtggacgagcaggaagcggctgtcaagtcggtcagtagctcagctcctggcgaggaggacgtagcaggggcccaagcgaaacctcccaaaagcacagggagctccccgggttggggaggcccctgggcaacgcgctcctgcagtttgctagggcagtcacttgcccttgatttgctcttagagctaaagagaccaatgtcgagctttttatctccatctgggctggttaaggacttcatcctttggtaaatccgccccactatgcatgctgtcattcctctattgacctcctcggtgacgattataaggaaagccaagtttagattctgattctctttttcattacgcgactgttcttcgcatgtttctgtactactctgtatttaacatttcttagatccatgcttaacgtggttggtagtttgtagctctttgcagaataacagattgacttttggatttaatacctcaatctactgcagatgttggaaggaggcactacaaattgtttcattgatgtgtaaagtaacggtttcatgtacttgttctttcagtaatgaatattcattcaactggaatgtaattacagcatacactgtggctttctgttcttatatctaagacctaaactttaggtttgtttagtgataatggactgtctttttttttgttgtagttgtttctcttttgaggcagagttttgctcttgttgcccaggctggagtgcaatggcgccatctcggctcaccgcaacctccgcctcccgggttcaagcgattctcctgcctcagtctcccgagtagctgggattacaggcatgcgccaccacgcccggctaattttgtattttttgtagagacggggtttctccatgttggtcaggctggtctcgaactcccgacctcaagtgatccgcccacctcggcctcccaaagtgctgg

SEQ ID NO: 63664 - DNA, 2438 bp, Homo sapiens
gagccaccgtacctggcgggattcatgatttaaagcaaaagaaaaaaaagaaataaattattctgctcaatactgtttggcataattgcattgcttttcatcaacactcaaaacagcctcttcaggaagcactgagatgggagtggcaagactggctgaggcctagctctctaaaacggtgggggaggggggagcgccctgagagaggcattctactaaccccaccccaatcacccctatttttactctttctactttcggaattggaaagaacgacactcgagctaggttccaatatattaactttcaggggcccactgcccatcccaaccctcccctaacaaagtcccctgccggtccctgttccctcagccagctgcaggaacctaccaacggccaggaagctgcctggtggtgtcaactaagaaaagggggagcatctgcgccgtcactgttggggagggggctctattagtggtttgagagcttcacagaagccttccccctcctaaacctccccagcttcgaagggggagaattccaccagcagccccgtcagggacctaagctgggttcagccatgcaagcagcttccaggtggaaccccggccgcgagcttcccagcccttctagagcgggagatggagagcagggtggaggcaggcggcttgcggcgcgcaagtctcctcttccccggccggctcccggctgcgagctctgccagctcagaatttgcaaagaatctgcggtttggccacccacggcagcttcagcttaaccaaagaatgagccccaggcaaagttacccccaggcaagaggcgatgggtggaggaggaggtacatgcagcgggcagccgggcccatagccagcctccttccgccgtgcagccccctccccaggggccagagccggccgaagactgggggtagggacggagtcgggggacgggatttttttccagagcaacaggtaggctggtgaggaggcctccggcccagggagaggcgctgagaaggctgcgggtgaacgggagggtcgagggcacacgtgagtgacagcaccttgcactgaaggggacagggcttcctcgagctctgccctgtcccctccacctgtccggagttcggcccgggagcaccccaccccgcagagggcgccactcccggcttcctggagacgcaggaagccctgggggcgcagccatcccacagcgcggccgaggtgggactgggggtcccgcagcgaccgcttttctttggtgggtctgcacgcacctatccgggcaggcggggaaaggggccgggcggccacctatctcctgaggcccgcaaagaccgcccgctctcctccaggtctggccagctactaagacgatcctccgcccgaggctgacggaagtgcttcgccgaggcccgcgccatgctctcctcctcagaaagcgtgaaagaaaaccctaacccaaagcatgagggagtggggattgagcggccgctggcccgcccccgaaggccattgattggaggagactggacacagcgccggaagttttccttgagtcacatgattggctgggagaaacagaagctccgcccgaccgcagcgcagattggtgccaggcccggccggtcccccagtctcgtgattggcggggcacagcagacgcccctgggctgcagcatgattggtcgcgggttgctggtcctgggtcccgggccggagccccggtgcccgatagatgggccggaagggtcgcggcgaggcccggctcagttgccccggtagacttcgatcttgctggccttggccagcatgtcgatgatgtgggcctcgaagtccgcgtcgtgcacgccagtcttccggaactcgcccgcgtaccggttgttctcccagtagtggtgccagttgccccggctgtcggccccgaacccgtacacgttcacctgcggggaagcgcagcggagcgtcaccccaggcggggacctggaggatggcgcggggcgggctcgggatgacagggaggagaggggacgggaggccccggggagatgcaggagcccccaggcctggcctaaggacatggactcacatggggacaccaccttccctttgcagcccttgcaaattcctccttttttttttttttttttttaatggagtactttgatcagcaccactcagtgaagcacttgccgggcctcagccctgctcttcattgcaaggcagccctggccactggtggaacgggttctctgaacgactgagttccatttttacacgaagtaggcctggggctcagagctggtgggggcagtcgtccagctgaaattcaactacatacactctccattctatttatgtttttttttcttttctttttcaagacagcgtctcattctgtcgcccaggctggagtgcaatgccgctatctcggctcac

SEQ ID NO: 63665 - DNA, 550 bp, Homo sapiens
tcaccactttttttccccctcctggtctggaaattatattactttttttttagtgattaatcttatattgttagcttatgtacattttcttgatgaagtcttcagtttttcagtaatgccattctcttaacaaggcagaaatttggtgtggcttaacaataaaattctctattcttattcttccttggtaatgtggtcaacaattctagttttctcttaaaaaaaaaaattaaaagcccatttagatcctgttttttttttttttttttgtctctgtgttttgccgtctgtagcagacactgttggctgtctaccagcggccactctctttttcgcttgccaacagaatcctgatttgtttgggcagctaaggacccagtcctggcagatgatgcaagactggccaaagccaaccagcgccaaccacagcaagcctgtccctttttcaccaggaattggtttgaggatggaccagctcaggtcaatgagacccaagggagtatgtgttagggccatcttggaaagattttcctttccaaataagcagccg

SEQ ID NO: 63666 - DNA, 2254 bp, Homo sapiens
ggagtgcagtggtgcgatctcggctcactgcaacctccacctcctgggttcaagccattctcctgcctcagcctcccaagtagctgggactacaggcccccgccaccatgcctggctaatttttgtatttttagtagagatggggtttcaccgtgttagccaggatggtctcgatctcctgacctcgtgatccgcccgcctcagcctcccaaagtgctgggattacaggcgtgagccactgcgcctggccaaacccagtattctttctgtattcccaatttctgggaaaggaacccccatccatctaagcctgaaatgtaagagtcatatgtgagccctccttcctcaacctctcacagccaatctattacaaatctcaactaatttttaccactgaaatgtctctcagatctatttctcgctctgtctacaaccatcactccatccaaggaaatgtcattcttcacctccagcagtcctaaccacttaagccccagatctactaaacggacccccttcaactccttcttcatagggtagccaaagtggtcttcacataagcaaatctcattagatccccatctctaattcctctcatcacaacagccagacctcccaatgctctggggtaaaggcggaactccccaaaggccccaggtctggctggctgggctgcaggataaccctgacaccaaaatggaacggaaaggtctggaagtcactgctctgtccacagccctggcaccactcctggggaggcttcaaactcctgagtcaggctcagaatgagctcagtcttgccaggtttgtcccctcccccagtgcacagctgaccgcagatgggaaagggagctggtggccaggcaggggaaacccagctgggccgaagccaggggctgtgtatttcaggaggaggtgacagagcggcagcagcaccaactcaactgtcagtatctgtggggccagctaagagaaggcagctatctgggattacaaaactcaaggagtctatctcttccctcttatcagactgacctttggcagccttgcagcctgtgaacaaactgccattaacaacccctcccccgcttcctgtaagcacaattctttgtgaccagcccaggacagccagaggctgccagaaagcctgccccttcctccctgctagggtggggcttggggcccatctctccccagacccctctatcctatccctccctcttggacacaatccaggaaaccttatgctctgctcaaactggacttctcaaggtccccacacgtcccctgccttctcagttcaggcctttgtatcttggtatgtgtggccttttcctcactaccttcctcctcttctctacagtgagatcctacccagccccttccaagcgggttctcaactcctcacagatctgccacgtggctgtgcggctgacccagcgcctcccagatcagtctgattccacctcccaccctggctttggggaaaaacctggctagagcagagcacaggatgtaaaagggtgggggagaacttggcaaataaaaaaatgggaatcctattaacagtcaccccagggcctaaatggtggccagagtaagaagggaggaaagagaccagatggagttttctgcctgaatccaggacagagcaggagttggaagtgggggtgaggaactactggatgcaggggaactgagcacagccccctcagctgcaggagcctgagttgtccagggagatgccagagcaggctggctgctgcttaacgcatccaaacaggttaggagaaagttcaagccaattcccacagacatctggcccttatgatggcctcctgggcccccagtactacctccccactcaggctgtggcgggcttctgtcaatcaggttgaccagatggctgaagaatgaatccctgaggccgggtaaggtggctcaagcctgtaatcccagcactttgggaggctgaggtgggcagatcacgaggtcaggagatcgagaccatcctggctaacacggtgaaacaccgtctctactaaaaatacaaaaaattagccgggcgtagtggcagatgcctgtagtcccagctagcaggctgaggcaggagaatggcatgaacccgggaggcggagcttgcagtgagccgagatcgcgccactgcactccagcctgggcaacagagcaagactctgtctcaaaaaaaaaaaaaaaaaaaagagtgaatccctgagcagggctttaaattctt

SEQ ID NO: 63667 - DNA, 1935 bp, Homo sapiens
tgagcaagcaagcaattggtgctgactcctctacaggcagagggaacccggagtgggttatgcgaaggagggaaggccaacaggagcggcaggaagctaaggggagactcaagtgagctcagcccagagctgtagcagggggtgggaagtttggtccagtcacaggggaatgactgggggtaagaaatgacttccattccaaggcagagaaggaacaggagagaggagagacgaggttcagaccagcctccacgggactggcgctttggccaagtttctggcttcagccgtgcctcagtttccccaaagtaggaaggtcgagccgtgagaactgggccactgaggatggttagggggcagtgccaggtaggggaaagatcacaggggagagaggaaagaggagctgatggggcagacaggctctggccaagagtggggccggggtctcccaggtggagcagaggccgggagacccagggttagcggtacgaactagggagtggactggaagtcgggaccagggcagagagctcttccgagggctggggctggggctggggttggggttgggggctgccggcaaaggagcggagcgggagccctgggaggctgggagcggctggacgtgcaaagcagaaggcggggatccggaatgaggccaacgcgcgcggacccccgcccacacgagggagcccggcgccccgacccgggggaagttgccgggctggaacgggccggtctgggccgctgggccgcgccagctgcccgcgcaggggaggtctgggcagccgggggcccggggcgctctgcatcccgcccgccctcatcccacccgcgcacctcagtcagcgcccggcgccgcgcgggccatgctcgccgctccggccgccgccgccgcccgcgcagaaagccgtcgccgccgccgccgccgccgccgccgtcgtccggacccgttagctcgcagctctctcgtccgcccgccgtgggctagtcccgcccttgcctggcccaaccctccccgagcgccgccgccgccgccgcctcagcccggcccctccccccacccctgcccggcttgaagggaagggtgggggacaggggcgactgcccccaccccattcacatcctccccgtctctccctccctccgccccccgcacgcgcgccggcatgctgggatatggagtccagcgggcgctgggtcgctaggggcgccccgcatccaggactacatctcccagaagacagcgcgcgcatcccagggattgtgggctttgtagtttcgctagggctcagggggtccgccgtgcaggaggggagacggagggggatgggaagtcttcattctcagaaggccgggctccagcggctggagcagacggccccgagccgggttggatacgtgggttcctagggaggtgcacactagccgaggacgcctctcagatgctgctgtggccagctgctgacgagcccggccggagggcactgttcccactcgcgctctcaaagagccgcgacctgaggccagcttggcttcacgcccgggctctgaaagcccgagctgcggtggggccgctgcgccctggcctgaggggagagagaccccatcagcggtgcgagcgggggtttggcctcgctggactttgtgttccccacctaggaaaagaggaaaagggggcagagtgtctattggttcctcatccaccggggcatctcccccttgcaggctctctcttagatgcccgtagcttcctgctgttgagggtaaagtgaatgcattttaaatatttgccatgtcttttattagcccatcctttccctaacttccgcacctatttcaaaacctttatgaaactccaggtagactgcagtttcgccctccaacaggctgaagtgaggctgaagtggttctgaatttttggtgtgtatggga

SEQ ID NO: 63668 - DNA, 1410 bp, Homo sapiens
gactttggggtcctgagatttattttcctttcacatagtaacctagagagagacactcagagtatttccaattgtcatctatgacaatcaatgctgccattcacaactttcccaaaaggtccgcagatcccctccccattacggagttggaaagtttcttcccaaaggatccacgtgatgaaaccagcgcaaacctttccaactgcaaatcgaatggcagctgcttccgcttgggcaaagcgtgatttttttttttcctccatcagtggatttttctccagaggaaagcggaagctcctggtgccgtccagaaggtgttaaaaaaaaaaaaaaaaaaaaacccaaacgagaaaacaaacaaaaaagctacacattaacctattaacctggatcccggagtcccagaaaacgggcctctgtctttaaggcgcttcggtcctctgggagttgtagtttcgtgggtcctggagcggcccccttcccatctcccttctggattgcagccccgctgcccttcaggaaagcgctgccccggccacccacgctggcctatgcggtggctccgaccgtgttttttgccggacgggggctcggccttgggggggcgcggaggtgaaactacacttcccggagtgcaccgcgagggtcgcgcagcctcgcgttaaagagcccgctccgccgagcgccgggcgacggcaggtacgtcagtccgcgagggtcgccgcagcgccccttgcgccccttgcgccccttgcgccccctcagctttccggtgcaccctccctgactgggagcaccgagtcgacccgcgggccgcccgggtcctgacagggaagagtccccgggagctctgcggtgccccgggagcccacaggtgtttctacgctcccgcgtccatttggcctgggtcttccaaggggagccccgcgacccggctggtgcggccggacctgctggcagctgggaccgggagggatgcgggcctcagaggatcctcaccctgaggcaggtggggccctggatgccggcgctgctctgattttactttgaggccgcttctcctctctcagtttacccggccagggctcagtattatgcacaaatctcaatgatgtgctcttgggtaatttacaaaacgattttactcccaagtaacttctttcggtctgttatttagaaggcagcaagtcagagtcctccgtgagcctttttttcctctttaaagttctaaaatgtgcagtccctgacccacctgtcttcaaaaggttcatatgaagagttcttagtactttattctatctctggctccccaaccctatcccagtcttggacagcgtggggctgaggacactaaaaaatatttcaacttgatctcagcagatgaggctgtattgaaagtgggtagaggct

SEQ ID NO: 63669 - DNA, 1353 bp, Homo sapiens
gtcatatccagaagagagaaagtatccacagaaactggatccatccagtgccccaatctgcaggcagacagccacacaattatcctgccaagcaatcagggtccatacctgcttgcaaaggtactccgagaactttcttaatccctcctcatgcaaacccagcagtgggaagatcttgaagaagcgctccacctggggcagatcaccttccttggtggcaatggcaaacttctctgccacaatggctttgagacgttgctcagcttcctgcagcaatttcaggttggcatcaatcatgctccctgctcaacagggagaaaatgaaaattcaagtaaagaatagtactgtggcaggtccatgccactttgtgtaatactattcatccagcaaatacgtattaagcacttaccatgtgcaagatgctgtgctagtaatatgcatgattacaagatgaatcagccctgatcctaccatcacagaagttaggatcaggtagaagagatagtttgtgcacaaatcaagatgatgaaatacagtacatgatgtgtcataagaaaggtgccaaagtccgggcacggtggctcatgcctgtaatcccagcactttggaaggccgagatggctgaatcacaaggtcaagggattgagaccatcctggccaacatggtgaaaccctgcctctactaaaaatagaaaaattagctgggcatggtggcatgcgcctgtagtcccagttactcaggaggctgaggcagaagaatcccttgaacctgggaggcagaggttgcagtgagccaagatcatgccactgcactccagccggcaaaagagtgagactccgtctcaaaaaaaagaaaggtgtcaaaaagtcacatttctggttaaagtaatcagaaaaggcttcctagagaaggtgacatcccacctctcaaagatgggcaggattctgatacctgcacaggagaacaaacattccaggcaaagggaatgaaagacatgaatagaagcagaaagatgaaaagaatatttgcagagtattccaagtagcatattccttggcatatggaggagcttgagaaatacttgcacaatgagtggatgcataagtgaataacattaaacaagtctagaaaaacagagtgtgtaaagatcatggaagatctaaaatatcaggctaagaatttcattttatgagtaggcaatatggccaagtgcaaagaacccgctggccagagaatcagtagatctggattcagtttccttttccataaaatgggaatacagtagtctcttcttatctgtaggggatccattccaagaccgttatggatgcctgaaaccatcgacagtact

SEQ ID NO: 63670 - DNA, 1873 bp, Homo sapiens
ttaaaagctaaacctctacaaagatgtgcatttgaccaaaacgctaaaatcacacccccaaatcactccccacaagaggaagtcttaaaacgcttcaagaagttaatctgcaaaggcttccctcttaaataacaggatgagagcgtttcataatttgtaaattaagccaatgcaaaagggcgcttattattttgagaaccaagcaatttggcaaatactctcagactaactttactcccgtggagaaactggtgatcatggatcagggaaatcaacgggggtctagggaggagaggctgcagatcgcccaggtatcagggaagacaagctcggcgcgtccgacagcgtgaaaagagttgacaggactactcatatacccgactagcttccgcttctttgttttcccgcttttttgtatcccccagcaaggagagtttcccacagcccggatttcccgactgaaggctcccactctccctagatcctccatgaaaaagaagaggctcgaccccgcacctcctcgccgcagagccgttcgtatacagcctccagctcctgcagctctgtcagggagcgaatgagctcagcggagatttcggagcagcggccacctcccaccccctcagacggctgctgcacccctgacagcttcggaggcgaatcaaggtccgccatcttggtccccattcggcacttccggtcccgcgaggccccctcttcgttggcgcctatttggggctgcccacagaagtgcccaatgaactctaatggttttttttttttaaagtctacttctaaaaacgtattaattttctattctcctggaaaaagcaaagcaataaagcatgtttaaataatttgtaatgccgtgtggaagcaagacggaagcattttttaaaaattatatatattcttcaggcgcggattgggtgcctttttccgccgcgcgccaccagaatgtccctgtcttgaggtctaatggcggacgccagtatgttggagttggtggtggcttaagttttgaagggaggtagcatccgttggatatccacaccatccttctcgctgcagggtaaaaaaacagcctggagacttccccgggcccggggaggcggagaccggccatatggaagggggacccgagactttggcgggggtcacgggcagtctaggcccgagaggctggggaccaggaggaggtaccgagggatggttgaggcgccaaaacggcttcctgcagttatctctcgcttccatccacagtgtgggaacatattctatctcaaaatagggctcgtggagattgcttttaacttctggggactctgagacgggggaggtgtgacaagcagcgggaggcatggatgtctccctctgggtagagtaaatggtacaccgaggggaagatagaaagatggagcgtgttaaaagcgtaaataacggaaacagtctttagagccaagactccggtttgaatttgtattttggtagttgggcaacttgtctcctcctctgaacctctattttctcgtttgcgtaatggaggacagagtttaaatgcgatgatgtttccttggaggatggagaagatgcagtgagcaatcatacaagctttttgtaataatggtaaacagacgtgggggaagttttttttgttttgttttgttttgtttttgtgacggagtcacagtctgtcgcccagactggagagcagtggcgcgatctcggctcactgccatctctgcctcccgggttccagcgattctcttacctcagcctcccgagtagactagctgggattacgggcgcgtgccaccacgcccggctaatttttctttttttgagacggtgtctcgctttgtcgcccaggctg

SEQ ID NO: 63671 - DNA, 2430 bp, Homo sapiens
ggcagggctgaaggcacaccaggtgtagactggggcctccggggcccctgccctgtgtcctggaagctgccatcccaggccagcagcagtggctcccagggccgaggaggctgtggctgctgcagggcccagctagcctgcctgggacaaccaggccctgggctgaatggggccttgtgcggccaacagagccacctttctccaccccctgctcccctcccctcctggggaaacagtgtggcctttatcccagcctggcccaaggctccaagttgggagggggtttcccaatagggaggtcgggctcctggccaccgagttgtccaatctgattttggggcttttctggttaacgcatgccccggggtcctggagaaacctcagccctggcccaagggccctgtggaggttttgccccttgacgggcagccctgggccagccaagccccagcccacaggggcttctgaccctcccttccatgtaggatggggcgatggaggctggggctcttcctgaggaaaggggaatgcggagaccctggccctcagggcctcagagggaggctctgcctggctgcaacccaggagcaggctagggcttgccctgccagactaggagagcttgcaggggtgggaaggagacagggcggcttagggggcctcagaatctccctcccctcccagcccaaccaaaccagtgtccagagaaagcaaatatttgcaaagtccacagaggctgaagcaagagtgggtaagctgtgggtgggctgttcccaaatgggcacagctcagggtgaaggggcctgggaagctgttcctagccgtcccaaggagtggactcatgccacctatgcctggagtaccccttgggggtcttctaaaagggggcgctctcccaccgcctggacccccacccccactcagccttgaaaccttgctaagatctccctttagggagcagagaagttgctaggggtggaggggggtccagagccagctgccctggcacccaggaaccttcttagcccctgagcagccctggggcagtctcagagattaaaggctctccccatggggaggggacaagatggggcgcaggggaggccaggccatttcccctcagcagatggacctagatgcctcagtctctaaggacctggacccgcccccctccccacggtaaccacataaaggaccccagagacaaagagcttatgtcttatttgtttatatccgcctcttcatggataggtcaatttcactgattaaaaataagagatagggctccagcagccagtgccccaggaacagcatcctcagccttcacctgggacaggcccaggtaaaccttccccacagccccatttcaccaacaaggaaacagaagcccgtagaggttagctcatttgcccacggccacagggtggcggggtcaggacctgatcccatgtctgcctggtcactgcacgccaggtagagggactcccttacaaagcagggagacaagcactgaacgtcaaggctggggaggcggcagggactgctgggatgtgagagacacccagttctgccccaagcacagtggctgctctggagtggggaggtgaggggcttctcattagaggcgcccaagtggacagggatgaggggactctgtctctgtcccggcagtggctgtggttcagatgtggagtgtgggtgagcaatccagcctccaatcccagggagtgggctttccaggtgcccctgggcaagggccccctgtctgagcctcagtttcttcacctgtaaaatcaggagaggaggagcacctgccccactgggtcagtgtggaaattgaagcaggtgctgctcagccagcactcctcgcagcgcccagcacgcagtaagtgctcagttaacaccagctaacagtacgcaagccctgccctctgcaggggcccctagcagaggcctggccaggcctatgtgtccaggtgacattccccactcttgaggggtgggtgaagagtatgaccccattttctggctgggccagcactgggtggaggccccattcaccttgctgaaggtgccgtgcccagaactatgacctttggcaagtctctgcccctctctgggtttcaatgggcagcctgacaccagtgggcatctgaccttggcccccgctcagcccaaggtcagggcctcccagaggcccaggggagggcttctgtggggcctgtggactcactgtggggtggcctcacggggcaagctcagtctcctcaacctggctgctgatggccgcccttcctctacggaggccctgctgctcaggccaccgaggggaaaatccagaagctgcccccgcaaatccaggtggtcagcttccaggtggcctcatccccttctctgcccctggtcatggcccctgaacacatgcctgtg

SEQ ID NO: 63672 - DNA, 1712 bp, Homo sapiens
ttcatcctaggctaaggaaagggggcacggcaggagggcaggaatactggttcctggcccccaccctatcactggagctgggccctctctgcctagtcagcgtagggcagccctgccaaaccctggcctcatttggggagaggaacccactaattttcccaggaggaaaaatgggggctgaggtcaggggaagggtccaatagtctccttagtgaccttgagccatttccaggcctcagtttccccacctggtggggtgaggaatgaatgggtggttggatccagcctgaccttaagcaatcctgggagacaaggagggctcggagctgagagcccagggtggtaatggggtaggaaaagcgcttccttggggttgctccaccgaccccaaccttcatcccgcctcctcccaaggtgatgatcaaggcctatccttgggatgcagggacattcagcctggagaccttggagtcctggagcttcctggggctgtgggggtggggcggggctgggggacgcagtctcacggtcgggtgcagaggcctaggtcggcggggaaggagttaacggttctccgctttattattttttcctgctttggcggtgacagcattgtctgggctccggggccgtgggggaacatggtggtggaagggggcggaggccggtaagaccccggactcgttaaagggccctagagtcggtcctggatccaaaccccattcatggtttggcggtctggggcgcagggagcctgcgtgtgcacaggctcgggtcaggaccccacggggccaccgcgggcaccgcacggacaccccgacacacgagcacccacacccccagacgggcacccggagacacgggcgcccagcagacgcaggcaggacgcgctcagacaaggacacacagacaccgcggcgcgcggccacacgaggctcggccacccgccgccacgcgtccccggggggtcccgcacccgtcgccgcgcgcccggccccgccgcgccccggttaccttcatgtcgttgactatggcctggaagagcccgcccagggcgccgcactccttctccgccgtctccatgctctggctgggccgggccgcggcggcggctaggcgcacggagcgcggggagcagcgcaagggagggggccaggccgcgcgggcgctcgctccgaggccgggccgggcctcccgcctccaggctgcgctcagcggccggccgcgccgcgctccggggtcgcgggcctccggcgggcggcgcgggccatgtcgcagcggggctggcgggcggcgcggggggcgcggcgcgggcagctcgcggcgcagcctcggcgcggggactgacggcggcggtaatccgagccgccgaggatcgggcgtcacgtgggcgcggcggaggggggaccgcgaggagggagggaaggagggcgggccgcgcgggagggggctgtgggaacggccgcgcgggcgcaggcccattcacggccagaaaccagggctttgaaatccgagcccgggcgctgccagactggtccggcgagcggggccgacgggcgcgggcgccaccgagggtcggggggcggcgctgggcggggcccgccctgcccacgcaggagcgggactggcggttgggcctcggcccccgggcaggggctccacgatatcttctggcctttggtctggggcggggggcttctcgcgcttctaaa

SEQ ID NO: 63673 - DNA, 1637 bp, Homo sapiens
gtgtgctggagagaaagacggtagattaggacagctttaagagagggcaggatggaaaaacgcctttgtgtgtagcgagacacacaccaaagccccggagcgtctgggaggtgcttctggggctccggctcacatgccagccctgccaccaccctggcgggggaaagagatgcacccggggggctgcccagcactcattccagcccaagctgcagcacggaccccgctggtggctggctgtaccacaaggcagtcccagcttccccaaggcgcacaggggaggtgggattggaaacgggctcacttttcttctgcgagcctctccaggagaatcactggcttctacttccttgtgtccctaggcccagtccaggcattgtttgtggaggatatgccatgtgctttgggagagggactatgtcacccctggagcggccacacagggggtcccgctgacaaagggaacctgagcaccaggccttagggccagggtgttggtgcgcagggagcagaggaatggaggcctgctggcgccctccagaagagacccccaccaccactgtcctaggcctggctgcccagcagaagcgcgagcctgtttccagtcctttcttccctttgggcctttgggaagcaggcactgccggtggccacaccagccacctctaggatccaggcgactcagggctgggacggtgttgggcgagaccagggtgtgtctctcctgttaccctgccccagcaaagccctgggcttgaggagaaggtgcttggagttcctccagggtcagggagggagggcagtcatcctagggatgcttctggaatgccaagaatgtacaactggagagatgagtcaggacagaccagcagcaggagcagggtctttttaggatctgacctcaggcggccgtgtgggtgcctgtgtccctgggaggccctcggggaagtgtcacgctgggcacacctgggacaggctttagcgcactctgcggagagcagggtctcccccctgctcttctgtctccagggcatcagttcctacggcaccctgctgcttgatgaggctgccctttgaagggggctcaggaggggatgggaacgggtgttcttcagcccctgcattcaattcaggctccagggctcaggctgatgggcttaggccgggcgggtcagagacgctgccagagagtgggagaggccgggtggccagcttggcagggaaggtggccaccagcagagtggcctcctggcttctctgcacattataagcacataagcgtcattcaaagtgtgtatgttgaggtgctgagagctgtgctcgccccagccagctgccacttttgcacattcagcctgggtgttactaagcaggcagctcctgcccactggctcccagcaaatgccaactcttctttcagagaggtacaggcatggctcttgggccaacaggagcacctgcagagggactcgggacccacaacttcagagagccagagcagaggcagcagacccggaggggtggctggggacagcccaggggcctggtatcagccttcaagggggttctgctgtcagcgctggctcatgtccaggagactcactgtgagggatacaggcaggatccaggttctgatg

SEQ ID NO: 63674 - DNA, 903 bp, Homo sapiens
gtggtgactataggcatgcactctcatgcctggctaatttttaaaaaattttgtgcagatgagatctcactatggtgcccaggctggtctcgaactcctgccgttaagagatgctccagcctcagcctccaaagtgctgggattataagtctcacattctcaacattccagaagcttccctggggtgactgctcttcctccctccccagccaaaagagaccaactggagcttgacttcacccaccccactccagggcagccttggactcatggcgcgaggtgtggtgggaggtggttcttacatgtgaagatggggcactcaatcagctgcaccagcttgtccacctctgcgaggaagtccacggtgacctccaggtccccactgggtgtgcagtcaaggaaagtctgtctgctgggccagcacagccgcagctcacagcaccacacgccctccccccctgcacctggcttcctgtgcacagagcctggttgtggtgaagcaggatttggcgcacaaaggacaccaggctcttccctgttcctcgcctttctgtcctaaatggaactcccctgttcaggagttccaggttccactctagcagctgtctcctctgcaccctcccgggctgggagaggctcttatcacagcgctgcagcccgttgggggagggctgggcaggaagggttctctcctttcctgccagcagggctgcagcaagcttgcggcactgggcagtggcctgccagtctctgggtgacagaagtggctgagaggagcaaatccaggttgtagaagggaagcaggcacactgtggggagccaggcagggccacacctagccctccactgaggcacctcctggtcccttcttccttactcccaactcctggctggtcatgttgc

SEQ ID NO: 63675 - DNA, 818 bp, Homo sapiens
ggatttgctagcggcttccgcctggatctgaaacaaacccagcccctcacctcggcctatagggtctcacacctctcgctggttcctctccagcctccctcttgctgtccctcctccactcacggcattctagcctcttgggttttttggttcctgacctcgccaagcccacgtggccctagaggctctgcctgctctgccctggccagatggcttggccaggaatggcacgtggcaggctcctcccagacatcgaggcctgggctccaacctcaggtcctgatgaagcctcagtctgaaatgcaggcccctcctaccagccccttctaagagaaagttctagttctttcagggcactcatccccaagaagcaagggtctcccgaacagaacggtaggtgcactgaccctccaccccctccgccaggccagcgcattctctctgttcatgcccaggcaggcctttttgtgctgtgcaaacaccagtgtgtggaaaacggcagtctgatgttacatttttgcccttgtcacccatcaggccaagccctgcccagatcttgcactctcttgctggccgaagaggcctgggaagccagctcatcccaggagactctggagcacaagcctcctcacgaggtgtctccctctgagtgaggtgtctccctctgagcatcgctaattaaagcaccacaagagggaaagggagaggagaggccgggagcaggcaccacagagagcagtgctgaggccatgtcatgctccagccgctcgctcaaccacccttgctccaggaggaagagcctggagaggctgctctgg

SEQ ID NO: 63676 - DNA, 1177 bp, Homo sapiens
tcagcatgggccacttgtgatttcagcccagagccctttctagcagagaatgccatgtgcggcacagatgagaggccttgccaaagacccccttggtcagcctaaccccagcaccaagtactcactgctgcccacccacccctttgtcccccaacaagctccagggcctacacagcacagagccttagacacacttttccgggaagacagtttggacctcctgagctgcagagatcactggggccttctggtgtggactggagcgagtttctccagaagcttcctgtggctccggggcagcatatctgtagccagctccttttaccccactctcccgctggagccacctctgtgggtggatggcactgaccacacctggctgggatggtgttggcctgtgatccacacttagttctaccctcctagggcaatggtttgtctccaagggtacgagagggaagcagggccttgaaactgcagccatagttctgtagcctggacccaaactctgacccagcggagaaagtccacggggctgactccaacagcaggttcccggaaaccagttgggagcagcagctcctgagtatgggagtcaggccagctactgcctgaggtccaggctggggagattttaatataaagattcctggtgcccagggagacatggccaaggctggtgctctgaactggctgatacattccctggctgacactgccagggaaatggccagggaaatggcatccctgaaccctacctgccctggggcctcctgggctctgctggagaactgcagctgtaacctttctctccctttgaagccctctgggcttgaaccctctaagcaggatttcctcctgaggatgtgctcagctgcccccgtggaggccagccctgcccacgaggaggccgccaccgcctggcacgctgcttcctggccctgcctgcccttgcacgcccctgccacccgcatgggacaggaaggaactgaagccaaggactggtcccaggccacacagccagggccacagaggggccagaacttgggtttctgacctggcactcatgttcccatgaacatgttcccatgctctgtggcatctgcaagggacacagacctcccttccctggctggctccccttcccacccattccctgcagcttgtatgcccaggg

SEQ ID NO: 63677 - DNA, 575 bp, Homo sapiens
agcttccggggcggccagagacctgctgcctgcaactgcctcaccaggcctgatcgcttcaggcatggccatgccctcctgagggaaggaggagactctggcaggagtctgagaggatgggtggcagcagggcctggctcggccttggagctctaggcggaaggccctgacacttgccttcttgaggccccacccccacctgtgcagagtctgggtcctggtttacgtttctgcttggcatttcactgtttccctgctggtctctaccttcacggtcccgagcctgctgtgcacagccctggcctcctctgttcaaacagaaagataaagaggtcagctcttgggcaagacctgtgcttggactctccctggcctcctgacagccatgtggcctggcccacctgcatagccccagcaccccaagaggaagcacagctcacagctgctgccctgggcacgggccattcctgcctttctggctgtgattaggagctagagccatgagtgcctttcttgtcttcacatctttagtccaggggttttgtgaaattttatgaactgagatggctttctct

SEQ ID NO: 63678 - DNA, 2473 bp, Homo sapiens
cagccgctcacgcttcaagggcaggaatggaggtgactccaggaacctgtcaactgtgggggcagggggcttccaacagaggtaggtgggggtcttcttcaggaaaagggctggaaggaggggctcagctcatgggagaggaaggaaaaagctgactcttctcaggaaaaatgagtggacaaggaaagctggccgagttcacaggcacctggcattagctgactgaagccagcgtaccctgaagagccaaacaagtccatggcagggatgtctgcggtgtcgagatggttttaaacttagtccagattatctgcttaaactgcctgtcctagcagcactgaaccttccagaatgacacagcagcaagaaccctggtcaagccagcttcctgagccggcttcctaactagcctgcggtgtttcacgagactaatggcagaggagagtgtgtagggccacagctgtcatggtgaacaagtgagggtctcaccacctgcccccactggcgagccctgggccccacttccctccgtcccactggaagctctgtgagccagccacctcaggcacagcctggcacatgcccactgcctatctgaaggctcctctcagggacttgggcaccctcacacagcggtaggaggttttctgaacctgcttcagccctccactggctcacagggtacctcagaggtaaggccaccaggggcctcccagccacactccaggttgcccagagggtgtggggactggtctctgggcttctgagcagactgcttgctgtgtcagaaacacctcccccactccttccccgaccagttcctactcatctttcctggctcagcttagatgtcacgtttcagaagctttcccagactcccccaacaggctgggcaccccctcccccacatctgtttcaccaaggatcaccactgtgcgatgctatgcttgcaatcgtgactaaccctggcgggcagggactagctctgcccactgcggtgttcccactggtgggcactgtgccaggcactgacggacacccaggacagggttgctcagtgatacatggcgcttcctggctcccctgcctgcccagcacagcagcagcgccctgccgccccctgggtgaaactctgatctacccttgcagggagggggccgagctcttgctcccggcggttccattctcagagaggcgagcgctcttgcccggcctgacagctgtggcctaatttccagggctataaccgggctccttatttttacccacttggtatttttcattactgatgcatgggagatggccagggattgggaatgggggaggtgtgggctaatggaagacgcgtatgcggtggagtcggggctgtcgggccaaggtgagggcctgcaggcgggatagagaaggggtggggacagaccagacagatacatgtatttttaaattttacaagggaaaaagaaaatcccaaatcccacccccttgtttttcctcagtaagcattttcaacaaggtcacaaatgcgctggctctatagatttttggctccaaaccacatttcaggcagcctttaaaagccaattcttggcatagcttcagcggagcctgaggagaggggaaaactagggcacttttatgctttcagaaaacctcagatccaggtcacagcttcctggctctactgacgctgtggggcaccccccttctcacaggcctgacctgaggacccccctccacctcccccagtgttttcttcagagcatggatcacaagaccaggtcacctgtttctttgttacttgtccctgtgggcccctcccatgaggctgcagccccgggggaggcgtgagccatgccacagctggcatggggcctggcacatcccaggcactcaggaatatttgcggaatgcccctctgtgtggagtgagtgaatctttgacccctgttccccagccagggagctctctccttatgaactccccagtgctcttgtccagcccctataagatgttcccatctccctgaaataccttctccccggtctgtggaggctgggcccatgttggcctggcccaggccctcctccgtacaaaggcagcaggcagtaaatatttacaggagaaatcaaagcctcagtttctttctgtatgaaagaacccaactggcccataaggtccctcctggcttctccctgactgagactctctgggactctgatcagttttggccctgcggctacccaggcctgggtcacatgtatggagacagggccccaagcgggccctggtatgaggtgctgggcctgcgtcccaattccacacgcgacaaagggtagaagacccatccgctctgcctgcatggatgcttccagaaatagtgctgttggcggaaggaggccacaaaggaggaatcagctggaggccatacctggccaccacctcctcactgcctgctcccactgtggatctggag

SEQ ID NO: 63679 - DNA, 2725 bp, Homo sapiens
ttgggctgtggggacaggggtcaccctgaaggacacatggccacctcttgccaagttcacctgtgacctctagtctcctcccaccagccctgctcaaagcccagtggaccccgcaaacaccaagatgccacccctttgaggctcttgggccccctaggcacactgtgcagggctccctctggccagcatttcctctactcccctcataccccaggtcagacctaattcatcccagcctggtctagcaaggcctgccacatgtggtatccattttgcaggagaaaagccatcccttgttacagggagtgccagtgtgtatgacactgtggggactgcttggaggaggcagagcaaggccaggaccaccccccactccatctccagccacttctgggtcaacagggaacaacctccgatggttctgtgaggtgcaaggacgctggtcattttgccatggactagggaacaatggaatgcaggctgggccaggctctctgggctccctgaactttgcacctcacaaggtcatcttttcacctgggaaggcagcactctttttctcccaacagtcttttctgtgtgtcagactgggcctcttgggcctcctgggtccccctgccattcccattgcgaaggggtctctaattaggagatgagaagccgggagccggttgtgtaaagcggctcctgctgcacacactcctctgcgtcccttgcatggcgacaaaaacacttcagccctggcccctgggcggggaacggctgtggaaagctccagaagattcacacaaggagctggacagacaactcaagccagcaagaagagaagcttctgctgagagggaagcaggaagctctgtggaagaattcctcctgcctgttcaatgtcctgtctccctcccctcagctgggggcccaatcgatacggctacggacttatgaaagatcaaaacccatctgcattctgggtaggtggatcggggcctcttctagcaaacagacttaggttggtgcacatttgccacagcaatttatttttatcctgaacaaatgaacgcaatccattaaaagggtgagaggaagagtggggccgcctagaagctctagcttgtgagctggggccagaggcaaacagggatctggtctggccacttcactctaattcgccatccattagcaccagcacaatgggcttctgggggcccggccaatgcctccaggcaggtgagggggcaccgcacaaagactcacagagtgaggagggggtcccgatgccaaatggactcgagattcggcagctgcaggggatgacagagcctgatgtgggagctgggcttgggaggggcgccagtggtgcagacggccggtggccttggacaccttggtgatttggccccagccaagggccctgtccacagggcagaatgcacgaggccagcaaagtggaatttcccaattacggcatgaaagagagtttcttctcaggcccttcccccaggccccacaattaaaaacaagtccagtttctagcggctgcccggccccccaccccctcagtgaccaatcagctccccactccacctattccccctcttcccaacacaagggctcttatgcaaacccaggacactggggaggggcagtagcagaggcacatattagggactgagcatttgctcagctggacaggctgccacgcctgtctgtagcagaggtgagaggaggcccagaatgaaccggaagccttgctgctgggcttctctgggtcaggatctcgtgaaagaagtcccatgactgcttcctcctttcccttgtgggccccatcctctccaaatgcccgcctcatcttaggagtgccctgttctcctgggaggtggctcggacctcatctaccattaactgggccggttcggatcaggccctggcattcaccgcatacagtggctcattacagatgcaagcattctccaccagtcctctctgcaaggcggcagggaggaagaggaggggaaaaatgcacagtcgctgaagccaaagcgcggctggccggagggccgtgttggcaggcagagcgactgtcttcagacttgctcgcttcccagcacagaagcaggccttgtaaagatcacagctgtcgggtcacgctggagttcatatcacagtttatcaaagaggctgggttttctccctcctctcctttctactgaggataagtggatggttcacggggagacaaggcctgggcttgttctgcctgcattagcatggagggtgggaagaggccgggggaaggcaacgcacaccaacacctactccgggcagagttgttttagcggagccgggccgggccgctggtgggtgccctgggcactggggcaacagggccggtgcactggagccagctctcggcacggaaggtgccatgatttcatcccctcaggggtgtggttccccctccacagaccaccctgggaagcacaagccctgtggggaggctgaacaacagccccgctttatcagacacagccagcactggggctgagacatgcgccatttatataaccccaccacactatgacacggcaggcactatcatcgctgcgtcacagacaaagcagaaaggccttggaaacaggtcacacagttaaaaatgggaggaattggggtttgagccccaaatgagtgcctcgggaggctcatctgccttagtcctgcaaagtcccgt

SEQ ID NO: 63680 - DNA, 1558 bp, Homo sapiens
ctgcagagggcaggagcatgagggagagtgccatccctcagctgaaggccactgtgccttgtatttctggtttgggcaagtgaggagcctgccagcccctggcaggaagtgcacgtgaccggcggctggccaggggcacagagacgcactccacacagaaacccaggctggcggggtgggcggccggggagccagccctgcagatgttactaagtgaaacctgatgtggtgacatgagaatccacagaacgtctcacaaacaacctgccccgggatgttttggattgagttttgtggttatgacgtgaagaaacctcacatgtcaggataaaaataaccctggcttcagtacataacgcgagttacagttcaacagaaccagatgtgaaaacgtcagccacccagttcaggcccagcagggtccctgctccactccggcctccctccctgctggggttggggtccatgtgcccggacagcccgttgtgggctcaagatctgctgcctggaggatacaagggaagggccagaggccgctcaggggaggcagcaccaccttctccgaggccagctcctcttctgtgaaccaggcagggctaaagagcatcaagtcgtgcttggcacaggaagtggtccacagaaggggtgggtgatggagaggctggtatggaaccaagaggacagggtggggaaggggcagtttcccccaagaatcaagtggctgggagaaagggaggctgagcagggtcttgggggtgtagagtctgcagaactggagggggtgcacagctacgtagacaaaggccgccgcaatggcaccaactcgggaacccactcaaggggcaatcactttctcatctgtgggccggcctgggtcggcaggacaggagcgccggaggcatcaatcatagccaggagactttgcagctgctcaggtcagagcgagagagaagccgatgggatgcagcagggcccagtggggacttccagctgacgcggcagtggagaggtcatatagcagtctgccaccgggaaagagctattgctgcagggtgagggctggggccaaaggcagcgaggagagggtgtggaggaaggcaccccctgctggtggagcaggggggctggactgctggggcttccaactggacaagggagggcctggcagcacgggtatgagaggatgccattctgggcagcagtgccgggggcctcaggctcaggtgattggtgcccctgccttccattattttaataaactttcaaaaataggtactgacccttactgggcacctggtgccagggattccggggtaagtaaacttggcctgtgtggcctgccatgacgctattcaaactgagctgatgacacaaatcacccagcactgggcgacgctgaggagcctccgcatgcacttccagctgggggtctaagaggtcacagccaggagggaacagatgtgaacttcaccacccacccaggcagcctgagataagcaagtgtgttggaacagaggggcaggagaagctgggatctccagggaagcctcccacaggg

SEQ ID NO: 63681 - DNA, 4309 bp, Homo sapiens
tgtcacaatgtccccagggctgctctacagcccccgtatccttagaagctgcctctcctcgcacagcacccatctttgcctggcaccaagagctggcagggcggcaaagtccagcctaccactctgctgcaatgggcaatagggagaggggccacggacctgccctgttgggaggggcttcagtgtgtgtgtgtgtgtgtgtgtgtgtgtgtgtgtgtgcgcgtgtgcgcgcgtgtgcctgtgtgcatgcacctgccccaggggctgctgaggcttcctggccaccttctgctggctgtgtttatcctgcagggaactcctcacactgcaggtggtcgcctgctctttctgcccctcactcctctcttgctctgggctagggactatgcctgtccccccaaaaggtgtatctccaggactgtccctgcgcccagcagatgcccaacaaacatcagttgactgggtggttgcctgtgcctcttcctgggctactctgagcccaggccaagaataacgacggcaaccggggcttcagccctggaccagggaaagtgggacagagcctgatgggcagggccatgtgggccaggaccggccaggtggctggaatatgggaatacaagataaggttagcactgtagggctcctactgagggattaaaatgttgtggaattagatgggggtaatggttgcaaaaagcttgtgagtatattaaaagccagtgaattctatgcttcaaaagggcaaattttatctagaaaacaaacaaaaaagataaggcctaccccctcaaaagccattcctgtcaatgcaaacacagtgccagtgcctcccccacactgcccaattgtcacttctcctcctggttcctctaggccagccctggccgggaacccctttgcttgctcacccattcccgccccctcagtcttcaaacagtgtcacgtgttggcacgcaatctcccagcctcatccaggcaggagctggcactcgctcacacagactcactctcacagactcccctcctactgtccaattctgtccttcccttcatccctctcccactcatggagactgggatgtctgtgggcccctgggaccctgctctgtgccagcggctgcgttgggttctggggctgtaaaggtgagtcacagccacccctgcccgtggcctggcacacagagtggagagctgatgaatccacgtggctgagacacatggctgccacacagcccagtcatatggcaggagcaaggggtgcccctccacccaggccaggagccggggagccctgggtgggtctcagcctagaagtagggagggccgaggcctctgcttccactgaggacagagcctccagggattctttgcttcagccacagaagaaagacacagggcggagggcaggatggggaagtggcacagcaatgaatgacgccgcggtcctgcccgattcagcccctgcacacctgccacggcaggatgtacaaaggccatgcacaccaatgcttgctggactgtccaagcacggccagggaggggacttgagaccaggaaatggaggtggggggaggatgggggaatgactcatccaaaattaaacagtgaggcaagagtcaagccaacagctcctcaaacagttacccagagagctgccataggtatactcccactcctaggcagttaccaagagaactgcaaacgtctgtgcacatcaaacttatatataaatgctcacagcggcatttttcctaatagctacaaaatggaaataacccaaaggccctgcagtggagacaaggagaaatggaacgtggcacatccacaccagggaatattatttggtaataaaaagaaatgaagtacctgctacacgtggatgaaccttgaaaacacctgccgagaagccagccacaaagtccacatcctgtatgatgactccattaacaggcaaatccacagagacagagggtggatttgtggtcgccaggggcgtggggagggaggcatggggagtgactcctaacgggtgcagggtacatacagggcttctttctggggtcatgaaaatgttctggaattagtactgatggttgtataatcttgcgaaaaatactaaaagttactctatggtatacttttaaagtatacaatagagtcgtttttatgaattttatggtatgtgaattgtacaaaaaaagggcggggggggcaaaaccctaaatcagcaacctaattcctaacccatttgctcttgctctgcccacagcccgaggtggtggggtctcacccactccctggtgtctctcgcctgatccaggggagaggaggagcacggtgaggagatctgtgtctctttacatcactttgccccctcgcccccatgctgcccatcccacccaggtctgtctgcacagggggacagaggcacacacctctgggcggccaacactggtggccacgtgcagcaggggaggaaagtgaggagaaagtgtgatccagcggggcggctggggccaggccagcactcggcaagatccctgtgccatggggacaaactgattcatgctgggtatccggcaggtacctacttccctgtcagaacagaggcctggaaaaagccaccgagaggcctggcctgtgcaaggttgtctccacccttcgagtggctccagggccagaggagcaggctgtcctcgctcccggccacaatgaatgccctcacttgtcaccagtctcacctcacaggatacacacaagggaactgagacttggacagtcacctgctcaaggtaacagcgagtccacctcaaacccagctctggtccccaaacctgagcctgctgataacactacacagggtgctgtggtcagacagtcctgacatccaatcctgaccctggaccagttaacttcaaccacacaatgctccctctccagacagctgctgagcagctgctgtgggctagtcctgtgctgggtataagagacacaaggccagacaggtcaggctctgccttcagtgaggtcatggactcccggaggagtcaggtggtgagcatttactgataatacagggcgggtgccagggacccagtgatgatgcctgggggggagccaggaggctctggaagtagttgagcatgagttggccaagggagtaagaagggagagaatggcattcaaagtattctcttacctagcataagccattcatggacgcagaaccacgtggcacattccaggaaactaggctttggggccagctccagagtggggaatggggccagaggtgagggtatggccagaaatcaggccaaagtggtaggcagggccagatcttcaagagctcatgacacaaggccaggtgcggtggctcacgcctgtaatcccagcactttgggagaccgaggcaggcagatcacctgacgtcaggaattcaagaccagcctggccaacatggtgaaaccccctctctcctaaaaatacaaaaattagttggtatggtgctgcgaatctgtaatcctagctactcgggaggctgaggcaggagaattgcttgagcagaggctgtagtgagctgagatcgcactacttcactccggtctgggcaatagagtgagactctgtctcaaaaacaaaacaaaacaaaaaaacaaaaccataaaccaaaaaagagctcatgacacaaagaagtctgaacttcattttgcagaggatgggagcctcagtttccctatatgcgcaatggagatttgaccttgccaggctgttgtgaagattacaagagatacttgatgtgcaaagcacgaaaagcgggcacacaagaaaggctggctcaccacttccattccaagatttctggtcccacagctgagctgttccctggcccaggcttagtgactgagcatggacagcagtgcccacaccaagggcttccaaccccgctttctcccctgcagagaatgtgcttagcccacctcagtactactgcctcccaccccactgcagagcacagccagcaaagctgcatattttacattttcaattctcttattttagaaagtttaacaccaaatggcaaatgaatgcaaattacacttcaattgcacaattaaagccggaaatgttgtctacaggttcgttcagtaatcccagccactcctcttgtgcttacatatcataggatttgtctctggtccccagaggctggcaaaaagcccacagccctgcctgagacaacactgtgtgcgcttgtgcgcacagacacacacacacagcacccctccagcactttaaataaagc

SEQ ID NO: 63682 - DNA, 1353 bp, Homo sapiens
tcagtctcaactgaataaatacttgctgacctgcagcgttggacaggaaatggaagatggatggctctgagcagctcctgccaaggaggatggacggagaggccgcccacttcactctacccacttatccttaagaaacttggtcaaacgttcacacaggccattggtcggctgatgagccctaggagtcaactgactcagccttctagctactgaagagggaacccttcttgtgttgacaggaaatccccaagctgggccctctccaggcctggccaggaagaagctgcaagaatgtttccaacggacacacttggtactggcggggagaggtgaactcaggctaaaggccttggaagctgaggtctggccagtgcaggccactgccaaaggctatctgatgcctctgcctggagcggtcaggtcgcagggccttgcctgaaatctgggtcaggtccagcagctacttcttctgaggtggagctgatgtgaagtacacaggccccgagggcaggtattcctggaaaaccttggggtcttctgctcccctccaagcaggagcctggccccttccttcgtgaggggtgcagcctggctggccaagcctcttcagtccctgaccacatatggaatggctcttgttgccctggtttaggggcattagccagagagcacaccctaggaagccgggctgctgtacccaggaagggtcccctgggggagccatgggaaggacagtagggcttccactgctgagagcatggaagaaggcattggcaccagctggcaccggggccagaggcctccgccctggacacaaagtaaacatgagctgcagaaggcagcaatcgggccctggccctggcctgggaaaggggtggcatcctgagaaacgccctggtctgcacggggtcacagcagccctgccttctgcaacaaggaaggaaagtgttgcctaaaagaacgcttagctttggtggtgggaaaggagcactacttaggcctagacccattttatttcccattgagaaaactgccttgatagaaaacgttttgtcttagtaaaccaaaagcaacctaaaaaaaaatcataaatcttagtttgtgttgcgtgactttgaacacaaaccctgggggatgaggacagcattctgtgtttaaacattttgccacctttccttcagtgtccagcactgtgccacatatgccagaggccagcgcctaacgctgactgttaggttccactgattaacagtgacagcaccattagtgccagcactgggtctggcagctgagaacactctagcggccattcctcttagggtaaaggagaaaagaaaggccagcctcagg

SEQ ID NO: 63683 - DNA, 1309 bp, Homo sapiens
tccacgacaacctgtgccgcggggctgcctagctggaagtgagagccttcgcagcgagcactgaggttaacttccatgagtgaggactttggtaggagaggacctgcctgtctggctgtgttcctgcttaacctaacaagctttcatagtcttgaatcccagggagctccaattcgagatcagggctgtttggaaatacttgaaaaatcctgagagggcactttctagatatcctagaaaggaagtttcaggagaagatgggctttgtcttgttcatggttgttttcccattgccaagtacacagcacaccctcaggctcaccaaagattaagcaggggacacttaggaatgtgattctggaaagcaaccggatggggtaagatcaggactcatcactaatgatgaaggtccccaaatccctcctctagacagaaggggaagcagaggctcttcactgctgttatggtacccctcaactgtcccccagagcagtttccacaccctccccagtgcaggcccacaagacgtgccccaaaaccctgacaacatttggcacttcagcaaatcgagtttccacagccacagcctgaacagcgctgtttaatggactgcatctccgcctgctccctttcaatgcgcacacacaaaaaccaatttcaagcacagaaagctggatgggattaaacaactcagtttaaaggactgaaaactcagctgcttccagtgaagtcctagggaaggaaccaatcagcaaagttctgctcttcttttttgtattgaaatgagggctgtgactgtgcagtgagtcactcccaactcgcaggcagaacggggccaagtccacctgggcctcgcgctgcagggggtggtgcacgaagagagggtgtgtgtgtgtgtgtgtgtgtgtgtgtgtgtgtgtgtgtgtgtgtgtgtgtgtgtgcatgggggggcggggggtaggcaggagaggccaagggcatactcacagaccatctgttttggatttttctggtaatacagaaaacctcagaggacctagaggttgatacctgcctgtccatttctctcttcagcccaggttcgggaaagcaaattcaggctgcaggacagctgcccgggccccccacaagcctggcaccagcccagggaagactgaggagcctcactccatggggactggtgagcaatagccctctcccatcccccccacccagcctcatccactctctgcagtgtgggcaggtctgttgattcacgagctggctgcctcatggagatacagctctgcctacagctcacagtgccttg

SEQ ID NO: 63684 - DNA, 1159 bp, Homo sapiens
agccttgagatcacgagttttccgacctgatttctctacttggtcactaacaatctccttcacttctcagaagctgggtaagaaaccaggctggtcagcatcacctgcaaattctccggcttctgacttctctctcaccacagagacaactctctgatttgctggtttgggtggcaccgcaccgaagactcaccatgtgccatgcactgtgcaaagcactacccatacatgatgtcacttcattctcactgcagccctttgtggcaccgggaggttaaaaagctgggaccaaatcacacagccagtcaggagtaaagcagggactcccagatatggctcccaatctgctcttaaacactgcgctaaggtaagggcctaaaacctgggaaagtaaccctggctgggaaggcgtgagaagtccccctggggagcagagcagtcaggggctgcatagccagggaggggtcctggcggctcttacttctcgatctccagcgctgccaccttccgcttttcgtacagcttgtcattgagggcgcgcacgatgttaggcgtgagcggcgcgaaatccttctcggggttcatggtggcagctgggggaacctcgcgactccttagcccgcggctgccggggccgcgccggggccaggggagtctgcggctccgctctgcccccggcgccggcgcatggaccacgccgctctaggcttgcctgccacgctccgccgcctcgccctggaacccgggcccggaccccgctccagcacacctgaccctggccgcttaacaactcccgcccggcactagcgggactcacgagacagcggccatgttactcgagtcacatgactctacagcacttccgccttccgtcgcgagggcccgcccctctccagccacgcccccaccgcaggccgcaggtggattggccacgccctcggaaggctccacccacactgcacacactatcgcgctgcgcgccaggtagctggagtgtggtttgagacgtgctttaatgggtgtgtagctcacgcccaactgatggcacgtggtgggcttctgtagacgttcgtaagaccgaatgggttcttggagtctgattcacttaacataatttattcaatagtcaccgaattcactagttcattcagtagttggt

SEQ ID NO: 63685 - DNA, 1889 bp, Homo sapiens
cctacctaagattgcatcttgcattccccatgcctcttacctcgctgtatttttttcctatggtactcatgtacttccaacctataacttccttctttttgtttactgtttattatttgtcttccccaaactagaatgtaagctccacaggacagagatctttgttttgtttacacatagaccattccaagaagttggacattgcctggtacacagtaagcactcagtattactgaataaatgagtggatatcatacttagcacaaaagggatctctctcttcaggttctgaatatgagtcattaatagtgcacctcaacttcactccagcacttaaatgcatgacttaaaaaaaaaaaaaaaagcatgtggcttacagcgtgtgtggaaaaattttccagtatatgatcctctgagcctttcattaaacagtcctttgagctttgtgacatcataattctgctaagtgggtcgctattaccattctcatattgcaaactcaagtaggcagttatgtagcccccgcccaaattagtgaacccaaaacaaaacccacaagatctcatcaacagtttttacctcacagctgacacttataaaggagttccaagtgcttccgccaactcctcctaccagcaactgtgaaaacaacggccagtgagtatccagggctgactttgggccgggcaccccatatctcatttcatctagtgaagtaagtcccaaaccccactccagaggcccggtccctgacctggaggaaactcagtcccagcccctggctcacccgctgggaagtcgaaggagggcccggaatcgtacccaggcctggattaccttcgcccacgcccactggggccccagtgtctggagaggctgcactttactctctcgaggaagccattctgcacttccgctctcggggctgcttcccgggatggtccctccctttgggtccgcggcgcctccagccacaaggcagggagatggtgcgccggactggggggaaggctgtccggacccgccctcgcggcaccgggaagccagtcccacctccgggccccgcagccgcgaatgccggcagacagggaccaggaggcactcaagtcccactgcgcacgcgccctgtaggccgggccggagtcacgtgcgccaacgttacgcacgccggcgactctcgcctcgcctaggcctcagctccctaggttttgcttcgcggagtacagaagctgggaggcgccagcctcccgcccccggccactatggcaacggaagcggcgcgcgcaggcggagcattctttggctccgtcccgaagaggggtgaaagggagagggacagggaggcgaaggggagggggagggggagggagggaagggacggggcaaacctgtctgtcaggacgtgctggttccgctcactggctgctggccccaagggctttcagactcttctggacagttgttacttcctgtacagactgggttgaaactgcagctcaaaagacgataggttaaaagccaaactagggaactgcaagataagattgtttatatatacatgacataatatatattaattatgttgcttaataagccaataagaaaaaggccaacaaccccagaaggaaaatgagcaaatattagaacaggcctcccaaaaaacaaaaaagtcaaacaaatagccactaaggatatacaaaactgtttaaactattattagacaagaatggaaatgaaaacagcaagttttctttttactcggtttagcaaagatgtaaaaccttggtaatgaccactgttggtgtgactatggggaaacaggtttacatctgtggatggaagaaaaacgttattagaaaccttacggaaggcaaacttatttatttgtt

SEQ ID NO: 63686 - DNA, 917 bp, Homo sapiens
tctttactacaatttaatctgttctgatctctcattgcaccagaaaacacatgccaaatcttggccaaagtgatgacccccaacaccacttccccacatacgcttctaagttcccaggagcgttgaggggtgggggtacagggagatctgattcagccatcacctcagccaccctcattgctgggtctcacagaaggctgctaagtcatggctcattctggccatggggtcattcagtttccgcagctccctggccagctctgatgccatatccatagcactgaactcatcccaccaggctacaccctcagaggccctgactgtttagattggatttaccatacaaccctttctttttctggagctccacccaggaaacgggaaatgagtcaccatgactcttagattccacaaactgacctgaggatttttgccatatccacctgctctaacctggatttgacccagggagcaaagtgcaggatcctcttctcaatgaaccactaacttctatacacttgttgcttctcctttctacagcccaaggaacctttatgtagactgggctaaagtatccttgttcttaattggccaatatctctcattctttttattatatgttatttatatttacatctgttagtagatgacataataataataataataataataataataacgctaccaataatctatgctaccagttccttttgttccccttaaggccaggattttgtatgcaaaatcttggaagcatcaccctttacctttgttaccacatcccttaccagggctaccatgttgtgcaatttcaggaagtattgtgcacaaagcctgggtggacttattcagtgcacaacctgaacagctgtatgggtatgcacagctgtatgtgctgcagaaatgttgaccac

SEQ ID NO: 63687 - DNA, 675 bp, Homo sapiens
cacccactcgtcccactgatctcccatccctctggctttcttacagctctgccagcacggagccttggtgcatggggtttaaatccaggaatgctcacctcctccctcctcctggttagttcactctcaggatggcttcctactcatgctagatacggtcgctccctgatattcactctgttttcacttatatgtgtgattgtgtggtttgatcaatgtctgtctccctcactggactttaaactcctgaaaggaggaatcatttctgttttgctagtacagtgcctggcacaaagtagctggctaatcaatattttttacacagcatgaatgaataaaatttgtaatgaattcatgagtgaatgaaatgcagcccttatctttgaacatctcattctcacattcctgctgcattctggggaatcctggaagtggggcactgtccctctagggacatttttcccatccttagtaaaggagtccaaattcctggccacctggaagtcctgttctggcaggaaatagagcaaatttgtttgcaaatcaagcccagggctccctgccaggcccccaggcagagccaagccggcctcacacggacgccctgtggatttgcactcatgcacgctacatttccttgtgtcctccttgcctgcacctttctcttcgtcctcc

SEQ ID NO: 63688 - DNA, 974 bp, Homo sapiens
aggccaggccgctcagtggccgcaagagcgaccttcccacatgtccccaggtgtgcgcacaagcccggggtgagaccagaagctgctgcctgcagagcccgaccttgcgtagatgactccgcgagtgcaaggggctgcaggcattttcttacaggaggtagcaagcttgtctaagcagaggccctcttagcgcagtgggcagcgcgtcagtctcataatctgaaggtcctgagttcgagcctcagagagggcagctgttttgttgtgctacgaatgcagcaaatgttcggatgtaacccagcaaagcactctgaactatgggcaaagagtaggtgtgtccctcaaggaccagagagtaacaattgcagcaaatatgcggatgtcacccagcaaagtgctctgaactatgggtaaagagtagatgtgcccctcgaggaccagagggtaaggatgtgccatcacctgacagccaggtgtacaggagcaggggaccctgccacagggccgcgtaaataaaatacatggtaaggtcaactcgcgaatgaatcacccttgctcataacgaaaagaaactcagatcacagccacaggaactgctattgtcccctctcccaggaattaaaatccacaaatgaggccgggtgcattggctcacatctgtaatcccaacactttggagagccaagataggagaatagcttaagcccgggaatttagagaccagcctgggcaacataatgggaccctgtttctacaaaaaataaaaatagccaggcgtggtggcaagtacctctagtcccagcacctctgaggtgggaggatcgcttaggtcggagctgcagtgagccctcatcacaccattgcactccagcagttttaaaacaaaacaaaacaaaaacctccacaaatgagaaaacacgcactgttggcatgaatgtaggcaaacggacactaagcgttgctggtgagagcta

SEQ ID NO: 63689 - DNA, 1774 bp, Homo sapiens
aacacaaaagtcaatataactgttacctctaggggttggaggctgggagttgggttgaggaggaggaacacattgataaattcagcagtactggcaatcttctctttcttaattgggtggtgtgttcatggatgtttactactatatatgtaacatataaatatatattttaaataaatatataaaccagcaaggatggggtgaaattgaggacccaaaatgtaatacaaagaacagccaatgtgcttaactatactacagtgaacataaccacacttaagtggtaggaaagaaaaggggtaagcaactttggaaaacagtattttgactaaataccataagagtaaagacaaaaagacctgtatccaagtactgtactttaggtagtaaatttgcttttcatgggggtatgaattagcgattctgagactactaaatatattctaaaactgagtgaattcgtaattacgttgtagaagtcattcccaggtcactgtcaaccctgagccgagagaagcagggctgagttaccttttgggactgacactgctccaggagacaatgtcctccaaaagccgggctgcttctgctgccgggtgactgggaggggctctgcgctcccactcggccctaattcatgaccctatgtcaggagcctgggagcacacggtccatactcgggatgcacataggttaatgttcctgccagacctcagcatgtcaaaagacttgtggtatcacctcgggccgcttcacgcccgcaaatattccatcttttagctgcaccgacacatcttcccccgtcgaccaagtgctaaatgctcagggcctcgtggctgggacagcaacgtgcgtttccccttccaatgggcgcaagctattgagccacaaagaccaaagctggagtcgaggagcgcggaagagcaccccgggccgccgccctgctccctctcccagcctgggcctcctggcagcgtaggccacgggagaccctgcagcacccagggtgggagtgcgtctcaaccggacccagagcctgggggacagggcacggcacacagcgcccggagccctgcactcacctccgtagcggactgctccccggcgctgccggaagtgcgtcaccaggcggccgggcctctctaggagcaaggtcgctgcgcctcggtggtggtcacgcccggccagctgtggccgcatccctgtcggctagctcgggtctggcccacggtgactgttacccctggggaatggggcaggtaagaatcagagccaagcggggacccagcccggggaggtgaagctgcaggtgcagccacgtgtgggagtcttggaaatggaccagtggatggcgcgctgtcacacccaatgccccctttttctaacaaatagtttgtaatgtccatcttattctcctgacctgatattcatatataatggcctagaaaatcatacataacatacacacctacatattaaaaactaatgttatgccttaagtgtaatgaaagagaaaaaaaagaggaccgtcatctgtcgtttaaaaacacatacttcaatgtgtttggtcttggctgctgcaggagacctaataaggtggtcgcctttacacatagacgttgtctgagtgccacagccacaaagctgtgacttacattgttgcaaaagtcacaaaattatgatccaaaatggcaaacatgttttcgtgaagttctgaatgaaacacaggacaatcgtctcttgattatacaataattacattcctggaagatca

SEQ ID NO: 63690 - DNA, 2264 bp, Homo sapiens
gtgtgagccaccgcgcctggctgactcatgcatttttatgtttgtgttatacttcaattaaaaggtgtttactcaattccccaagtctatcattcattggtcaacccaagcacatgatacaactgctcattcatctgctgacaagtaaggaagaggtggtgaagccacccaggtgctagacgcagtaagcaattaagtctggaattgggtagggagattccaacactggctggcagcggaaggacacgtgggagaaaaaaagggtgcagtttgtgttcatcaccaaagaaaagggccagccctgttttcctactgagagatctctgcagtgtgtcttatgaccaagaaccatggcatttccttggctccctagccaggtcaagggcaaagcgggcgtgctgtcctaggaattaaaatggcaaataccaagatataatagctacaatagcctggcatttctcagtttaaggcctagagtagcatccattccaaataaaaaactgaataaacagaaaatgaaagctttaagagtgaaagcttttagtttcctagttaagacttttcttgagaatggattcactggtgcagacataattttgtagtacaatgagatttttgttacagagctcaagttgttagaacttctatctactagtggtgtctgatataacctgggctctccagtgttacagtgggcttcccaatctcatcacaatcatggggttgaggagctgccatgactataactaaagactttcccatatatcatacacacaaaacatttctccatcaggtatgttatccctgaaaacttcaaacaactgctacaatgacaacactgtttaagtcaaaattctgttccaaggcaagaaaacctaactcaggtgtgccaaagccaaaaccaaccaaacaaaaatggaatttattggctgctgcaattcaaaaacccgtatatatttttagcttcaggcatggtgtatgtggctgttcaaacattatcttcagtcttttactgctctccaattctcagatgcatttttgctgtgtggacttcattctcacctctgtaagagtctagttcttcttctcagcattaaaaccaatgggggtgggcggggggagagtatttgttcctattagctcttgcaatcctgggactctaattgaaccatctttggtcatctactgacatctgaatcattaactgtggcttgagggatggatcagaggctgagtcaggcctgtgtcacacattccattcctgagtagaagacggaatccactcagtacatttcactggagtgtactattaccagtaaaagggggtaaaaaattctgggaggccaaaacgacaaatgtccagcacaggcttctctccagagtagacatgctcaaggtgacctagctgggaagaagtcccaaaggccttctcatacttgctacactcatagggtttctctccagtatggattctttgatgctgatgaagatttcttttgctagtcaaggcttttccacactcatcacatacataggaagactcctgagtatgaattctcagatgcctttttaattgttcctgagcactgaaggcttttccacaatctacacagtcaaagggtttctcctcactgtgaattctctggtgccgagttagttttgtatgaaaattgaaggcttgtccacatactttacaagaataaggcttttcccctgtgtgaatacgctgatgttggcttagatgggaagtccttccaaagcttttgccacactcattacactcatagggtttctctccagtgtggattttctgatgccgaagtaggggtgaattaccaacaaaagctttgccacactcattacactcatagggtttctccccagtgtggattctctgatgtataacaaactcggaactactcgtgaaactattcccacactctgtacagtaatagggtctgtccccactgtggattctctgatgcctgatcagatttgcattatcattaaaggctcgcccacactcctcacactgatagggtctctctccagtgtgaatcctctggtgccgaattaacgaagaattaccattaaaggcttttccacactcactacactcaaaaggtttctccccagtgtggattctctggtgtctagcatagtaagaaaagtagctgaaggatttcccacactcctcacatatgaaaggtttccttgcacaggggattcttggaacctttccttggatatttttcactgtgggg

SEQ ID NO: 63691 - DNA, 954 bp, Homo sapiens
tacaaaagtaacagcatacgcaaaagccatgttctagtagtgaaggatcaagaacactgtagtagcagtcaaaggagagtgtgctgttagatgatgctgaagaagtcacaagggacaaagccacactttgtgcacgtcaagaacttggtcttcgatctacgtgcactaagtcacgggcaggtggagtgaaataaccagatttgattaatacatgactttcccattgggcggaaagcttcctgggggcggggcccacgccccgcctcattcaccgctgcatccccggaatctagagcaggaactggcacatagctgctcagtaagcagctgtggcccaatgagcagatggggtttgggcggcgtcgagaacagaggcgtcccttccatccagccgcccatatccacagcctccatttcccaaggcgccgatgcaggcgtgggggagcgaaggcaccagagggagaccgggaccggcccgcgagcagcctccgctccccggtcccggaggggccgccctgtctccctccactgaggcagcagggacgaagccgacagccttctctagaggtgcagtgcctgagcctagcaaggactcctaggcgacaaaccccaacactcacctcaggaaaaacagaaagcggtgcgtgaacggaagtgcgtcactactttggccttgcacccaggctcacacgcgtactctctaggatgccggagcggtcttctcagtggttgtgtggttttactcccgggaggagtttccacccggggatcctcagagaccttgaataggaaagaaagtatatcattgttttcgctaatctctaaccgaaatttagcattttcttctatgttggcaacaaactactgtagtatcagccgtatctgtgactgtcaccgatagaaatcacagatattttcatatcacattacagttgatgcagatctcagaatatg

SEQ ID NO: 63692 - DNA, 717 bp, Homo sapiens
gtttatggccacatgccttcctataatctgggtatcttcatggtcattatatatataagtgaggtaatacttataaatatttaatacagtacttggcccctagtaatcactcaggtaacaactcttcctactattattgttaatatttgctattactacatatcaagcattgtgccaggcacagcaggggtcatatcacagggtgtaagaggcctcaagttgcttaacagtaggggacataggacaaatacctaattatagaacagaacagattttgtccgaatgatacaaaccaggaagaggtcacattcattcactcattcaacaaatattaatcgattttctccagtgtgccaggaacaacagggaggaagaggccaaggtttcagagcctcaggaatgaggaacagcaggaggtgagggggtcagtgaggaatgggatgggctgggcgtggccaaatcaggtaaggctttgtaggcctatgtaattgaggatataaggaaatgttttatgagaaggctgcatttgaattagaacttcagaagaggcaggattcgggataaaattgatgtgcacattcttttatgcactttcaacagatatttgagatttccgccaagtctgctgcacaaacgatccctacttccaaagaagatatttttgcatttaatggtttttatcacataagaaatacatgcgcacttttaaaaattaga

SEQ ID NO: 63693 - DNA, 560 bp, Homo sapiens
ccatgaggcaaaaaagaagtgtaacaatgcaagggagttaatggacttgggaaatgtttgaagagattaaagggctgtaaaatgtccaggtgtcagattgtgagccagttggagggtgagcagcttgcagttagtaaattacatgttagggattaataatcctaaaatagtctagttcaagtgatgacaaggaacacaggtgtggctttgggagtggggccattgtggggtagattgtacagctcctcatgtttggaataagcaagaggccttgaggttagagtgtgggtgaggctatccacagagatgttgaaatttcccaagtgttgaaatttcccatgtatcaggccctaaataaataagggagtgtgcacagaaaggatataaagtaattcagcacatgttttaaaggaagctggttattgtgtgagtctgggggagtatagatatgaaaaaagacaataagttagagtctgggctatgtgggaaaaaaagctatttcaaacagtgagttggccgggtgcagtgactcacgcctgtaatcccagcactttgggagg

SEQ ID NO: 63694 - DNA, 625 bp, Homo sapiens
gaaaaagaaggaaggaacaaaaatggcaatatcttgagagtcattaaatctgagtgatgggtatattggtgctaattatactactgcttctacttttatatatgtttgaattttcagtcaagaattctaaattattttagggaacacatgaacgaaaaagtgtaaaaaccactagtttatcacacatgctaattctgctatttacagaaacatctcagatgtttttctagaaatttcttattgctcccagtgtggaagcccaactgacactttgccctgcttccattatgaaataccagagtcaggaaaaataagcactttgtacccttaaatgaaacaacaatgatgaggtcaccccatctagttctagtccccaaactaattcctgcaagtgtgcactccttatctttaaaaaactgaagttatctctgccttttagaatgattatgtctgaagtaacatcacaatgtttgtgactaggatgaacatgagaaaaagttactgttttccaccatgaacagatagctacaaactggcaatcttacatgctttttcttttctttaaaaacctaaaaatcctttaaatgccacacagatatttgagttgatctccctaaagtctgac

SEQ ID NO: 63695 - DNA, 3304 bp, Homo sapiens
taaattgtttaaaataaataaggatataaataatatgtactgagaattcagttcttttccaacatatatgcaataattcaaacttcagggtacgtaaaatacaacacctcacacagaataatgtgcagaatatgcggagtaacaaaaattctctccttgaccaaactctagccaggttcctctgagccatttgtggactaggcctcaacagacttgaacaaaactctaacacagtctctaacagttcaaggtagcatctctaggatgactccagccccgctttaaagggcctgcctaaaaaaactcaggctgccaaaggaatttactgttccagccaacaccttaagatatggctcctatctcccagcatctgtaggaggataaaagcctaacttccagaaacaccctttaacaaacccagatgggtttcacatggactaacccctacttcgcactttttgtaatctttcacttccctcactcttctgagcgccccctcattcctctccccttccctatttccccatttttcctttaaagtctgagtaacatttgtacaaatcaaagttgagttcagttcgtgctggactcctccttattccattagtatattactggttaaaacctgtctcaaccgctttactgtcctgctttgtctttgacaaaggcacgggggtggatttatttttctggctgagtagagatcctaatgtcaggcactgcggacggtgagggccacgattctttggagaaaagttccaaggggctataccattggaaactaacaccagctaatagaattgtctgctctgcgtcacaactcatggaagttgctgcttctgatccagagctgggaaaggttaacaggtgattacaaaagcctaggatgttttgtcaacttcctggaacaattccaccagtcagagcccaaaccgggggcaaaggaggaagagaaactcgaagcagggtgtgaccagggtagacaggctgaaaaaggaaacaaaatgtaacatcctaagagaacgcagaggccgaataaaggaactaaccctcacctgcagctcagattctacgccggcgcccggagctgtgtcctgttgcctagcgacggcgcatgcgcactgactagcgcagccccctaaacatgcatccgcgcctgcgcagccgcgggtcgcccagggttgggatgttggtgtcggctgggggctgctgtgaggcgcttggtagcacccagtcctgatactctccagttacccggtaggcggggctcggacacaaagaaaaggtgaattcgcagctgagagcccttgtttccggtccttttttttttttttttgagatggagtctcgctctgtcacccaggctggagtgcagtggcgccatctcggctcactgcaagctctgcctccggtgttcaagcgattctcctgcctcagccttctaagtagctaggattacaggcgcgcgtcaccacgcttggctaatttttgtatttttagtagagccgaggtttcaccaagttggtcaagatggtctcaaacttctgacctcgtgatccgcccgcctcggcctcccaaagtgccgggattacaggcgtgagccaccgcgcccggccgtctccgatctttacacgcattcttcgtgttatctgaagacactctgacgccaccacccaaagcaactggcagttgactcttggcaattttaagcttgtgtggaaagcagccgccgcccggtagctcctttttatctagagacactcaggatgtgggggacaccccagcaatgccatccctcctttgacctccagagcgcgcagaattacaaagttgagtaatactttatttgaaaaaatgaaaagtgcacacacacacacacacacacacacttacataggcacagtataatctggaagtatgaccagcaaatgataactgattccctcaggggagaagaaactgggtggctgaaggacaggaatgagaaagaaggacagttgcgtttgtttgtatcgtttgaaattgtccagtgtgtatgtgttcttttcaaatgtttgaagaaccattggctcccttatcaaaatgtaaataccaaggaaaatcaggaatttaagaagtctaagaattctgtaatgctgggtagaattttctgtacgtgtaaaactaaaatgtcttttgtaaatcactgagtcttcctgtttatttctggttagagatctttgggggcttggatggaggaacaggaaaagaggagccaggcttttttggaaaattggcggcagcggtggcatacgggaaactgaaatctttatctaatctcatcctttgtatattcgtcttggatttgctgaagaaaattaaaaggtaaattttgctgtgagctcactgaactcaaattgaaagggaacatatgctgtttatttttgtgaaggacattaattgggtgtgactggcagggttgagacctgaagttcctcttttagataaggaaaatttcccttggtgagaaatctctagactagttatgatagattcctaacccccaaccttgaaaggtaacttaaggctccctcctctaagggaagggctgaagaaaaaattaaacaggcaactgtgcctatgaagatttgcgaaaaaaaaaaaaaaaaaaaaacatctaggacacttctcattcactgggtcaagccagagccatcaactttgtgacctagtgagtggttagtggatataggcaagcgtagtaacttgggaccagaggttagggatccagaaagttgaaaatgtaaagacaaaggccagaggttataacttactgcctcttggtaagtaggaagccagaagttgagctcccaaataaaatgttttaggaactgtggttcttaagtaactccaaaagtcagtacatttacaaagaagtaaatgaaacctcataggtaatgaaacaatgagactgaggagtgcctgggattagaaattcccaaacggagaaaaaaacacatcacagaagagccatacttggtgaaatttattaaaaaaaaaaaaagaaaaacaataatttatgcccttggcaaaataaaagatcttatcaatataaatgtttcttagaaaatgtatgaaaagataatatatattaataaatcaatattaacattacagcaaaagtaataatgattatataacaatgacaagtgaagatatttctggcccttacacagtagtatttctggaaggtctctgattcctgcttgctctagtacaggcgtgctctcactttaagaaagcctgatgccgctgggcgaggtgg

SEQ ID NO: 63696 - DNA, 3006 bp, Homo sapiens
tcaagaatattaacatttctgccattttccccacactcttaacaaatatatagatccacaagtgggaaaaataaaaatctacaaatatcaggtcaaatcaggttttgtaaccaaatgaattccaggaatctttggatttccaaagttctttgggtttcagaaaactggctaaggagttgtgggtctatatatttgtaaaaagtgcagggatgctgatttgctgtaatgaaacgattaggagttgtttctgattattccacttctaaagttcccataaaataatttgagattactgtagtgatatatcctgatcaagactcaccatgtctccatagatctcatcagctaagatggggacacactgccgtgcagccactgaaaataaaacatgctgaaatcagttttaatgtgaattgctttatcatgtaatagtcacataatatcatgtaatttccctatcccgtaatattaagaagttacaattcttaaagagaaagacaaaaagcacaagcaaagtgtgatttgcatttcatgtttgtgtgttttgtcttcctatttaagaactgtaaattcttaacatactcttccagagtgcagagcctgaattcaccatttaagtaactagatatttcagaccctatcttcaacgtgatgggagtgatgaagaggcaagtactatttctttttctcctgggagtgatgaagagacaagtatttcttctttttcttcttttaggccaggcctaccactcctatggcacagtattgatgagagacatcagtggagctccccacctccaccccaggcttggaacttagggaatgactggtttttgtcatttcacacaacagctgaaggattctgtccccacctcgtcctctgtgaagtctgctggacgtacctgccagaatcttctgaagatgacgtttgctgaacactgacccacaggggtttgatggattattgacaatgagacaagctgtcttttcatcaattagatattccagttgtttcaggtcaatttcccaagatttctctggctggagagaaagaaaggatgagactaagatgattctgaaacatttagggggaatcctcacttatctcaagggtccaatgtaagcaataaagtctgtctctggcttcaaccaccactttgagaccttcctctgctgaagtaatgttcatatattttttacaggttagtaactgagcatttgagtctaagattaaaaagtcatttaccaacaaattgtagagtttgacctcaattcccatagactcagccagagtcttgtagagagagaaaccaggtcttggaaccaggatgttttgccctgggttggccaacacagctaaacaaaggtcaatagcttggctgcagccacttgtcagaatgacgtcctgtgaaggaaataaaaggttaatttcattaggggttccaacagcaacaggagaaaagaagttgtcaggtgggtgagttgggagcaattgtgaacttcctttaacaagttgtaagtagtaggaaatgtactaagccaaaaccaaaagaaatttatatatgttgataactattgttgaaatgttggccacttaaatcactttaaaaaggataggttggctgtgactcagcagacttccatgagagagcatgctggccttggacctttttcgcttggttatttatttacttttggccagagatttgaagcctggctcttcgctgacatacaggtgacagacacacattatgttagaaaatgctgaccccacacagtagactatagagggaaggacatcatttaaacttggcactgccatcaattcagtatgtcctggtacttctatctttctctctaaatgaccttacagtaaatgagaaaagctacaattttttttaaaaaagaaagatcctattggtaaaattttttaaaataattttttagtgtttatgagttgttctcaaatgatcttttacagacaatcaaatataggtgctctctggatcctttcggcctccttgagacagacaccacattaagttgtatgggatggtcattatcacactgtaatgacattaactataatcactgattagtgaccccaactatatgagaagtcttctaattgctaaagggaaattgttctcagcttttccccctctgacacccgtacttcttgtggaacagaaacaagtaaaaagggatagtttgccctaaattgcttcagagctggtgtcttgtataaggctcaccttagcttctaggggtgcctcaggacagtggtaataagaagcaatctcctcccgactggataggaagcctgaaagaaaagagtggaaagtggagcttttttggtttttagagactgtgtctcactctgtcacccggacttggagtgcagtgacacagccatagctcactgcggcctcaaattcctgggctcaagggatcctcccaccttagcctcctgagtagctgggactatagtcgtgctcccccacattcagctaatttttgaatttttttgttttgttttttgtttgtttgttttgttttgtttttgtttgttttttttgtagagacagaatctccctctgttgcccaggctgatttcacactcctgggctcaggggctcctcccacctcagcctcctgaaagtgctgggattacaggggtgagccactgtgcctggcaagaagatgaagttttcatccctcaactgacagctatgccctggaggcccagcatgggcttcaggctgcctctgcccctgctcagagggcattctatttagttcagctctcagccattgtggataaaggagattcacttcacattttatgttttacaattttagtataagcacgaatgtataaatgataacaaggaagagctccccaaatactctgcaccatcttgatttctgtgattatattttattctgtgtaatacaaggatttctattattcccaaatcttttttagggactgtattttttaaga

SEQ ID NO: 63697 - DNA, 2236 bp, Homo sapiens
atgaaactggggttttattctgcattaagaatgtgtttctatgtacacataaggaaaaaaaatgttcaatactgaaagtcaaggaatcatgtactttaccaaaatattcagggtagaaatttttaatagatggagagaaacctaaaaaggagtaatttcaatctatcagaaacaaccttctatccttcagtttgacagcccattttttgttgttcttgggtgtttgtttatttgtttgtttaaacccgttagtcataaacggtaacaattgcatttcaatgtgctcaggaccataatgaaaataggccttcaatacatagagaagcagaaatgaagcaaaggagctatatacacagagcaataagtaaatccatttaggacctagaggctcagcaaacacaaagctcctgccagactcaaggccttcagattagaattagtaatgataggataggagctttacttgacaaataagtatgtttgggagcctagaggggaagtgcccatatgtcaaagaaagccaggaaagaagttggaccttgatgccttgtatttaagcatcccgagacccggttcccaaatccaaaggaccatgtaatcttagcctctccttaggaattgtgcatcaggaaagtgaagaggattgctagacatttagtcctgttataagagcactaaagatttggcagtcaccaggtatggagtctcaggaggagcttaccgatggatggggcatagccattatatttgcccgagtccagggcatctttcattgcctgggtaacttcagggtctgtaggcaggtttccaaacacagtagggtcccctttttatgggaggaaaacacaaaaggagccaagaggttattctcccatgttcagtactcagactcacccccaactgccatcttctccaaccagcctgtgaacatgagagtagaggaggacaatgacagcccctcagtagtgtccccaactcaccaatggacagggaaatcatggttttgtttggatttggtttcaccttcatgttgtccacaatggctcggatggggttgaaagttttcttggccatgtctgagggcctcacagaccacctggcctttctgcctttcatttttcccggcacagagcttctcccaccaacgttgacatgcacgtccagaattgaggggaggttgcctttgctgctcatctgaatcatgtatgggtccatcactagcgaagcctgcgaggggaaagaagttccctgtgatgttgataacatagcgctgggggacagaggagctacatttggacctaaacattgggtgacttcactaaaagtgtctttccaaactctctctttatttttttttctactttctgttgtaaagtagctttactatgaatgggggagttttaagagtttttactgagatggaaaataaagcaagaacccattctacttaagtaggatttgctacacgcatctgcaattcctgtcaaagcttaaccatgctctatgtgaaaccaagaaggaataagatgaaaattgttcatcagtcaaagcataggttctccttcctttccatgcgagcctatccaagaaaatctacctaatgcttcttgtcatctgcagaggaccaggaagaaccactccatcttgttagaagttccatgtaaatatcattgttagtaaaagtaaaaccttatcccataagcatgttacagccctagctggaaaaagaaatcaatacaccaaaaagaaaaaaattaacagctcaatcagtcaccactgcctgatcagcttgggcttgagatttttaccttccaagtaaaggagaaagcagcctccaagaagccaaccccgaaagctcccttagctcttctttgacaggttacaggggcaatgaactcagatgcaaatcctaactcctgaaatagtctccacaaatgggcgttgggcttgaaactttcatgccattggttggaatgacaactcagcagccagctctcccctcagcttctttcctcctctcccccgtcattgcctctcatccctaagcccacctcccaccctcaaagcaggaatttgtcctcacttcaaacatctggaattctcctgtgttaactctttctgggcacttggtgagatggtttgagaacatctactgtcagaaagtacttctggttacagttgatagcttttattaaattttttttacaaaacagcctgttaaaattttaacagtaca

SEQ ID NO: 63698 - DNA, 1673 bp, Homo sapiens
cctcggcctcccaaagtgctgggattacaggcgtgagccactgcacctggcctcaaggttcagattttcaaggagacacggatccaactccccctcccacatttacacagcctgtaagattggtgtcctgtctccaactggacattaaaccaggagacttagattattcccttataggttgtgacccctggggtcttccctttttatcttgggagctcaggcattttgttatattttatcaagtatgtctaaatatttttgtaatggaagattttctaggttatcctgtcctcaatacagccagaaaaggaaatctgtcttcttccttacttaaaatgtcactttgtactaaattcctgtatcttcttgactctctttctggcatatgctattccagaatgaacattcttacagttttttatacacacagccacattgctttaaaaaaggccatttacctttctatcagtaattgtctgcaaaccctgggaattattttcttaaaaaaatctttgccaaactgattgatggaggaaaaatggtatccaagtgctgctgttatttctgttaactctgtcccctctattttagcgagggtggtcatgtttcatgtttctttgctcttcccattttgtgaattgtctgttcatgtccctcacccgtctgtctacaaggggactcatctttctcgtaggtaggactttggcctaggaagccactgcaaagcaacaagacagctgctttgagatcactggcccagtctcctctgtgtcaacctgactggctgagactcaggtttacagatcaaaaaacagcaagcagcacaaaattttggcgggttgtcctgcaaatagtgccgctgacgcagaatctgcaggccaaggggtgtgtgatggggacaagagctgctgtaccagaaggtcatcaccatggacacaccctcgcctcggctttggcagttgacaacgaaacctaaatcagaaggaaaaacagacaaggcaaacaagttttggtcatgcgctcttctgtagctaatgttttccctcggtagaaagcagacagagagggccaggcgcggtggctcacgcctgtaatcccagcacgttgggaggccgaggcgggtggatcacaaggtcaggagatcgagaccatcctggctaacacggtgaaaccccgtctctactaaaaatacaaaaaaaaaaaaaaaaattagcctggcatggtggcgggcgcctgtagtcccacctggaggccgaggcaggagaatggtgtgaacccaggaggcggagcttgcagtgagccgaaagtgctccgacagagcgagactccgtctcaaaaaaaaaaaaaaaatgcagacagagagaacgtgagaggacccaagtctacttaggaagctttcctgatgccagataaactttacagggaagtcaggacccagtaaagtgtagaaacactcgttttttgtttgttcgtttgttttaagacaaagtttcgttcttgttgcccagactgaagtgcaatggcactatctcagctcactgcaacctccgcctcccatgttcaagcgtttctcttgcctcagcctcccaagtagctgggattacaggtgtccaccaccactctcggctaattttttgtatttttagtagagacaggggttcaccatgttggcc

SEQ ID NO: 63699 - DNA, 1619 bp, Homo sapiens
agttcgagaccagcctgagcaacaaccctgtctctactaagaatgcaaaaattagctgagcatggtagcacatgcatgtaatcccagctacactggaggttgaggcaggagaaccacttgaacctgggaggcagaggttgcagtgagttgagatcatgccactgcacttcagcctgggcaatggagtgaaactctatctcaaatgaaaaaaaaaagagattttcagaaaagctgcagatagtagagttcccacatacctctcacccagtttctcccttttcaaacatattatatttaccatggtaaattcttagtcacaactaagaaacaaacattggcccgttaatattaactaaactccacactttattcagatctcactagtttctcctactaacaacctttctctgttccaagatcccatctgggatatcacattatatttggtggtcatgtctccttagtcccctctggtctgtgacagtttcttagactttgtttttcatgaccttggcagctttggtgtagaatattcttgaatttgggtttgtctgatatttttctcatgggttctggaaagaccagttgagctttcagagttacagccactcattccacatcagagctctaaaggttaaaaaagaaatagaatcttcatctgtttgctgattgaaatgcttgcgggccacttcctcatgaagcttagcaaataacatcatcctgtttgttttgagctttgcataaccgtttaaaccatggccattaactcagtcattttcatttcgttggaacttagtgttccttcacttgtgaatggttaaaacctgaaccccactctagttcttagcattcatcaagaaaggctgtcatttgtactcacagaggaagccaccaagcaaatacacctaggttcctgggaaatcattctgcattcttgccattctgacattcagaataatctagagtccaaaccatggtccaatctatcagccgacctctggaccacaatgtcctattatttttatagtaacacattgttgattgtgtttttcttaattgaaatataattcacataccataaaatgcatccttttcaagagtacaattcagtggcttttattatattcacaaatgatacaaccatcaccactatccaatttcagaaccttgttatcatcccagaaggaaaccttatgccctatcccattagcagttactcccatttctctctgttccagcccttggcaatcactaatctacctttcacctctatggatctgtctataccagacacttcataaaagtggaatcacataatatgtggtcttttgtatctgacttctttcacttagcataatgtcgtcaaggttcagccatgttatagcatgtaccagcacttcattcctttttgtggatgaataatattccattattcacatggactatgccacattttgcatatctattcaccagctaatggaaatttggttcatgtcctagttgactatgttttggtagctgctcagtgtttactaattgactcagttcctggtgtcacaccttgttttccttgttaatcccatgtctagcccacaaacaaaatatagccaaacagtggc

SEQ ID NO: 63700 - DNA, 5053 bp, Homo sapiens
aatctcaagtacccagggacacaaacactgcggaaggccgcagggtcctctgcctaggaaaaccagagacctttgttcacttgtttatctgctgaccttccctccactattgtcctataaccctgccaaatccccctctgcaagaaacacccaggaatgatcaattaaaaaataataataataaaataaaaataaaaataaaaaataaaaataaataatgacatgatatacaaaacctttctctctcttgctgacctatttgggatccctggccttgggagttccatcctttgaccttttactcaggcctacatttccactgcagtgagagctctgagcacaagacagggcttttcatgaggaagattatcttggggtagcacagtatattgaagcatcccctattctgtgctttggtgggtaatacaaggtctgctttccatacgagacaggaactgagcttagcgtctatgctgtagagaggcctgagtagatccccatggtctgtagttctgaagaattctgtcagccaagaatcatagaatgctccaaaggtaaaagggtttgtcatggccatcccccagggaggcctcaagaccactccttccctattctgcctggaaacaagtgccagaggtgatgcaactcagcaaactttatccagattcacttccagaatctgcagaagggacagtaccatcgatggggccaaatgacagttgaattacccaagtctgggaacatcaagttcccgcagcaccatgggcaaaacaaagatgagacacaatgcggtctccaggattggagaagatgagtacatatgtttcgtgggaggactggtagggacagagtgaaaaagaatgagatgggataagagtgaaccaagtcaaataagaggattcaggtttgaaccaagtcaaacctggagaggtgggacaggagaggtgggacattgtgcctacttgtcacttaaagctcttccatagcaagagtcctgcaatcatgtttcattaatacactcattcagtaagtgtttatgagccaggctctgttctgaatgcaggggatactgcaatgaaagaaccaaaccaagccctactttcatgaagctgacattcttgttgggagagagaagtaataaatagagaaacagatgttagaagccaccaatgccataaagaaaaataaagcaagatgtagggttagaaagggcagtattttgtgtataatcactagaattgtcccctaaggtagtgatggttaatgggagatgggaatgattcctgtggatgactgggtgaacaatgccccaggcagagggaatggcaggggcaaatgccttggggtgggactgcgcttggtgtgctcaaggcacaaccagccaagggggctggggtgagcaaagcagaacgtgcagggatgtcagagtgaaagtgctttgtcttgcttccaagaggatgaacaagggctactggttcaacacagataaatttgttctcgtgtacccggttgtatagatgtcaactagtcacctatgaatgcctctggatatgaagggatgggagagtgtgtctgccccactcagaaattaaaatattaataaaatccacagtaggcatgtgctgctaacagagtgggtcagcagggtcaccctactctgtgggagttgggctcagacttgtgggatcaaacaagagatgcagatgagggctgtccttctgctcgcatctgcacagaaccagggctctgcactcctcccagcacagggatttcacacacacccatctcaccgaaggaccttcaaatccagtcattttcttggcccttctctgagagtcctatggacagatggtttcaaggaacaatgatttcagtccctgttgggttctataggaggaatttgaaagctattagttaattagttaattatttaatatcccactctttcccccccccccccccccccgctagagacagggcctcactcatttgcccaggctggagtacagttgcacaatcatagctcactgtagcctcgaactgctaggaagcaatcctcccacctcaacctcctgagtagctgggactacagcatgtcccattatgcctggcttatttatttatttatttatggttgagatgggatctcactatgtttcccaggctagtctcaaactcctgacctcaagcagtcctctcgcttcagcctcccaaagtgctgggattacaggcttgagccacctcactggtttcagtcttgttctagaaattagttatggaccaattgactgctagataggatttctctcttaatcaggtttaacaagggtgaagtgggcaaacatagactgtcacaacttaggaggaaattatccggggccaattggatttcatctatccccaaccccccaccgcactgagtgctgggcctgggcttcttccatccaagcttagacagcttccctttctcctccctcctctccatcccatgttctgggcccaccttctgtatcctgatcttagtgaatgtcactggctgttggacagcttgttgtctacacagggcagttcaatgagtctccaagtttggtctctaaagtgggaagtcatctgcaggatggtggcaggaggactatgagagtgacagagctcctagccactttgccccctcccaggtcccagttgtaatcctctgcttagggaagggttgttctgctttttcatctgagctgtcttttcaatccattgcatgtaaactatgaactttgcttcattggatttgccaaaagcctttttcctttccttttccaaagtgaagagaatcaaaagctctgacttttataactattacctctaaaatggatttcaataatcctttttggaaatcaaagactgagtggagattattcctctgctgtaacagtcctcagcttccctgtgaaatgggtacttctgcttgttcaaggacccaaaaggctggtgtggccaagcttggagaattggggggaatgtggtaggatggtggtgggggagccttctggatagcttagattttacttcaagtacaaggggaagccctctgaaggtttaaaggaggaatgtgaagtttaagatctttctggcaatgaaacatggagaatgggctccaggggcgagcaatccagttgagtttacattgcaatggtgatgaggacagggatttttgtgtcccctaaattggaatgcaaacattcctcaattgggagactcctaacggcaaaaccacaccaagctgctgtcctcctgatactgaatatattttgttcccaaaggatagttacctgaaaggaccagtaagacaccctccaactgaggtcattccacctatttctgcaaaattactttgaagggtcaaatatgagaccgagattcagtggcacctttctcagccaggtttttgctttgtttgttttgtttggtcttgttttttggaggtgatcttttttcttttctgtctctctgtctttctctctctctctctctctctgtgtgtgtgtgtgtgtgtgtgtgtgtgtgtgtgttgtgtgtgtgtgtcttcctccctcccttcctctctctctctctattggtacagtacttaagtggcatttaagaaatcaataaagcaacaaaaattattaacttttgtgaccaaagtgacctcccttcagcccccagttgattaggcttttttgtttcctggctggtgaatatcaataggcaaaagtaagaccaagtcaacctgccctggttgctttttgttttattgacatttgctgggtgcccttgatgtgaaaagcattgtgctagttgctggggataggtagataagacacaggcattcccaacacagaggtgagaggacagtaaaaaatgattatcaccatggaggtctgtaggaggttcaggatgagcctggaggaagagaggggaccatatctaccttgagttgaaacttgaaggaggaattacagtttgccaagtggacaaacaaaggaacactggacgtactgccctccaaacctcctgccctctagacctaaagctgggtgtatttgctcccttctctttacaaaatagtttttggtcccctggaacaaaagatcagctttagctccctacctctgccagagcaaatattgggaaatgttgagctcgatgagtttagtgttgcaccttattgcgtgtgccacagggatgaatctattcatccccctcacccccactccctccacaaatgagaatcaagtggccaaagcaaagctaaatcccagtaaatgagatggggaagaactaggggccacccagggatgcaagagggcgacaaaagaaccaacaaacagtgaccaataattgatcctgcaaagttccttgtacaaaggcccacagaatgtgcagagatggtgatgtaatattgcctgatgtcagagcaacaatcaataactataagaaatgtgaatgctggctattctggggtctcccaggaactcctgtttcctttccttaaaacaaaacaaaacaaaaaaaatagataaataagggccgggcaaggtggctcacgcctgtaatcccaacaccttgggaggccaaggcgggtgtgtcacctgaggtcaggagttcgagaccagcctggcaaacatggtgaaaccccgtctctactaaaaatacaaaaattagccaggcataatggcatgtacctgtaatcccagctactcaggaggctgaagcaggagaatcacttgaacccgggaggtggaggttgcagtgagctgagatcccaacagtgcactccagcgtgggtgacagagtgagactctgtctcaaaaagaaaaaaaaaagcaaaaacaaaaaacaaaaccaaagtacacaggcaacaaagagcacaatacctcacatttcaatactaacattgaatggaattgaatataaatggcctaaatgctcccactcaaaagatacagaaccatagaatggataagaactcaccaaccatctcctgccttcaagagattcacctaagacataaggactcata

SEQ ID NO: 63701 - DNA, 1006 bp, Homo sapiens
ctccagcctcggccacggagcaagaccctgtctctaaattaaaaaaaaaaattaagaaacagaaaaaaagaaatagatcatttgttcctctgtgtgaaagttaacttggagcaaattctgggggataggggatgtggaggtaaagactgcagcctgctgggggtgacatgcattcccagagaaggaaaagatgctgaatggagaagtctcaacgtggtgaacagcactctttgtttgtgtccagactgtactggaaactggctcttagagtcagagttccagagttccaccctccttggtcctagcctgcttcttgctttcatccaccttccttgggagattgtgaaacccacgttgggaatcaccaacaccaaggtacgattgggagaggcggggcatgagagcaggatagggcacacagcgaacatcagtgtgcagaaggtcgcccaggcccacagatgggctgatgcaggtgccgttccttggcaaggactgtccatgtgtcatcactgacctcttcaggtctagagaactgcagttttctccagcacctcctggacttcatccatgggtgctatgacagaaaacagaacgatgttcagagggcactgtgcagtcctcaaaccgtggagaggcccagaagagagacaaataactacacaggactccaatctgctatggctatgtttcagatgtaggccacaacagttctctttgtttggaaaaacaaagtggcaaaacacattgtgacacaaaaagatctcagccgggcgcagtggctcatgcctgtaatcccagcactttgggaagccgaagcaggcagatcaagagatcaggagatcaagaccatcctggctaacacggtgaaactccatctctactaaaaatccaaaaaattagccgggcatggtggcgggcgcctgaagtcccagctactcaggaggctgaggcaggagaacggcgtgaacgcaggaggtggagcttgcagtgagccgagatggtacca

SEQ ID NO: 63702 - DNA, 656 bp, Homo sapiens
tggcctggaatgttatttttataacaaatttgactgaggtacttctctgattaaaagccatctctggtggctccatacagcctgtactctcaaacctaaccccaacatgaacacatgtatttataaattatatctatgaactgctgtattaacataccatttacattataaatcagatacagaaaaagagattcccaaaaagacaatatttccagattaaatagaggtctaggattttttcccttcaccacattgagaggttgtgtgcacctgcttggagaccacagacccagagagaatacacgatcagtgactcattgcctgagaacaatgagtcactgatggtcaaataaatattcaatgaactacagatgctcaaaatactcggtgaatgtcaggttctcaatgaatgtcagctgctactggtagctgtaaaatttttattacagagaagctgagtaagttcaagattgaaacgtgtcatttgtgtttggaagatgtcaatgatcttagacagatcattttcaggttgccaggaaggagtcagactgtgtcttgggtgagaagagtaggagaaatgactaactgcatatgcctggctttgcaggcttcttataatctgacccctgcctccctcttctgccttttttcccttt

SEQ ID NO: 63703 - DNA, 1014 bp, Homo sapiens
ccaagttgcagtgtaagttgagccaggggaggtggccacagttggctcccttaggccgcccacctcgtggggtcaccaaggggttacttcggggcagaaaggtgcggctgtgggtcgccccgcccgggtttccagcagcagcaccccagcccccacccagcacacaggcacccctcccgcccgggccccagacgcgctcaggccgccccctgagggcgcccgttctcaggtgagctcccggactagcgcgcatgcgcacaggtgagtgcccgccccgcccccgggcttggccacctgcccaagaaacttgttggttgttgccctcaggtcgctcccgggcggggacacggaacccggccatggaagatccgtcgggggctcgcgagccccgggcccggccgagagagcgggacccgggacggcgcccccacccagaccaaggccgcacccacgatcgaccgcgggaccgacccggggacccgcgcaggaagcgaagcagcgacgggaaccggcgaagggacggggaccgggacccggagagagaccaggagagggacgggaaccgcgaccggaaccgggaccgggagagggagagagagagggaaagagacccggaccgaggcccccgccgggacacacacagggacgcgggccctcgcgcaggtgaacacggagtttgggaaaaaccgcgccaaagccggacgcgggacggagcccggggactgacctgggacgcagccgcgcctcctgggcccgcgccctgggaagccccggagccgccgcagccgcagaggaagggagaccccgggcgccgcagacccgaaaggtgagaggggccggggcgctgcgacctccgcgccggggacacctgtggcccaggccggcccgcgaggccctggcgtccccgggttctcgtcctaggagcccgtttaaatgaacaaatgccgtttctcccttctgcgctctcagaggcgacctggcagggaaggaaaactttagggttcccccttctcg

SEQ ID NO: 63704 - DNA, 1587 bp, Homo sapiens
cttgagtccaggagtttgagaccagcctgaacaaaacggtgaaactgtgtctctacaaaaaataaaattagccaggtgtggtggtgcatccctgtggtcccaactacttagtaggctgaggaggaaggatcacttggacccaggaggtcaaggctgcagtgagctatgattgcaccactgcactccagcctgagtgacagagtgaaaccatgtctctaaaagcaaaaaacaaacaaaacaaaccccacaaaaaacaaataaactccacaaaactagttttcacttaaaggtgatgtacacattaggtaaacctgattacaggcctaaaataggaagacatgtcatctatttgttaatttatagtgagaaggcaaatgacaccttctggaaggacattatctgtaaatacagttttcaaaaagtacacaaaaaggtttgcacataaagactgtaattcaaaggcggtttggtaaagctaggagcaaaaaccaaattaactttagtggtacgtccttttctctccaatgcaaaagctcaaaattgcccaaagaagccacagcagaatgttgtaatttctctttaaatatcataactatattcattttcagagatgaaagcctgaatcttctcaacctgtctgaaattgtttacaacacagaaacctctttaaggatttaacagttatttcaactatgagttactgcctcataaaacagtgtcatattttgtttcataaaaattgcaaataagtctccactcatagttggactattaggtaaacgctctgtaaatacagttccaaaggtcactccaatgataagtcactgcagtctgtttagccaatgattctgctcttccgaaaaaaatcctatgatacttactttaaggccttggagaagagggtgtctggcagcctcgtgagtgcattatgctgaagatccagcacctcgagggggatgtgctctaccagtgttggaaggttttgcacatgattgtgtcccagcatcagttttctaagactcaagctactcagaattctaaggggggagcatacaaacaaacacattaaaaacttacttaaatcattctttctgaggctgtcctagcctatttaactgaaattagttaacttatagaaacatattctcctagattgtatactcactgacaagtgcctgagccaagaaagcagctatgaccatatgtttacctaccacccaccaggaagtcattaaggtcattctgagaaaaggtgaattaatgaaggcaaacagcacagaggagatctatactaaaaaggcaatttctagaataaatcaatttagattttaagtctaagcagcaccaaaaattcagtatattaatattaacacatcttgtgaataaattcataacatttcattacaataaaaactactatttatggagtgcttaaaatgtgctaagccacttaacaatgaagttaattcagaaaggttcagtaactttgatttgcctaagatttcacactgcatagtaaatggtaaagtctggacttgaattaaggtttgactccaaagattgtgttcatatttagtatgttaaacg

SEQ ID NO: 63705 - DNA, 907 bp, Homo sapiens
ttttgtaacatataatgcattcttttaaaatttttaaatagcacaaaaacatgtaggaaaaaaaactccctttcccctattcagtggtaatcagttcagtatgtatcctaaaacaggatgtttcattccacctttataatttcaaaatatggcaaacaaaattttagtgactcagcaaatgggaatcagaactcagcatcccaaatcccaagggtgctattttctgttatacacaccctattggttctaaactaattttaaaagatagctactgactatttagaaatcttagtttctcttctcatctggttaatgaaaaaataaaaattaaaaaaaaagaaaaacagttggttatttcgatgactaagaataaaagtatatgaccatcagccaaagggcaatccattttatcacaaatgatcttaacaacttttcagacaggaggcaatgattacactaagcttcactagtgagtcatttttatcactcgaaacagttcaatagaaaagacaagccaaatattttaattgtaagtagcagcagattgagagacaagaccaatctatcaccagccagctgcaggaatgtgcattcaacctgaaccctctgagtctgttttcactgagggaaatggcctcagtgattcctaatggggaagtttctgacttttgggacaggaaaatccttggctgtacaaggttgtcccacacacatttttctttttcttttttttctgagacaggatctctctgtcgcccaggctggaatgcagtggtgcaatcttggctcactgcaacctccgcctcccaggctcaagcgattctcctacctcagcgtcccaagaagtgcgcgcactggaaccacaggtgtgcaccaccatgcctgtctaattttttatattaatatt

SEQ ID NO: 63706 - DNA, 1787 bp, Homo sapiens
ttttgttttgcaatgtatttttgaaacacatcaaatttaaattttctttcctttccatccttctactgggcaagtttcatatcctgaattcctcatgtagaactctagaaggaattccattccacctgcggaaggacacctagtttacgtatttgacctacagaaaaatttctctgcaactctttcaaatgctagtaaaaaactccacccagtcagcctcccacaacccctccctttaaccatcttctcctccccactatcgccaccctaccttgtgcattccttcgtaaacttacttctcatcaccttcaaggttccactcccctcttgcctacatctgttttcatatcctcccactcccccaattcctgccaagaagccccgctagctgcctgttgcataacggctcccccattccgtctccctcggcagtcggccccgctcccgggagcaggaatgcccctttcggcccggcccctcctcccttccgcaacacgcccagcaagtccccgcgacgcagctccagcggggattctctctccaagctgggcgggtcgtccttgccggctggcacctcgggtagcgagccccgagggcagaggagccggctccacccggcctggccccgaaccctccgcggcgccggccaatcgccgctgccatcctcccgctggggtgatgtcttcaggtgtccgggaggggagaaagccctgcgtacttccagccccgctcctgtgccaggaaccggcggccctccgagccctccggagccggcctccgggccccgagcgcggcgaggcaagcaggggcggcgaagggtccgggtgggcggcggctacccgcagcccaaaggcgtgggcctgcgaggcgggcggcgcgcggccagggatgggcagcagcggggtaccgaggcgccgaggcctggacgcgggcgcggcgcggaggcctcggcgtccccagccgggtgtggggcggccgactgactgacgccgggcgggggccgccgactgcctcagccactgcgcggggcgggggcggcagcggcctctagcctccctcgttccctccctagtccgcttgcccgctcgcccgctcgctcgctcgctggtccatccgcctcctcaccttcaggacccggatccctcccggccggcggctcgcgggcgcttcgggcggctccgggggctccagcgggcccgcgggccccggctccacctcccccatcggcgacccaggattcacagagacgcccggcccgcgcgacggcgtgcggagcctcggcggcgcgcgcgagcaaccggtggccccgccccccgcggcccgccggctccgcccctccggcggctcgccagctccgcccctcccgcagccccgctggacctaagcagctgccggcgccgagtggcccgggcgccaccgagccgcattccggccgcggcccgcgtggcggaacctggcaccaccgcagagcgctgggcctccactgcccgccgccctaggcttggaggactagagcgcaaggaggggtatttgctgctttccccgccctctaagaaacccgcgggagaaagaagcaggtggcgccggcacctgtcaattgtgacaagacgctgccctccgccagggtggctcttgtaacttccctcacctgccaagccgttgaacgaactgttgagaatactcaccttggcaaggccttttctcttccttatcagagatgcgtgcgaccttcttaagcaaattcaacccaacctcgtacaaaacgtccgctcacctcccagccatgt

SEQ ID NO: 63707 - DNA, 853 bp, Homo sapiens
atttacttcttcattctggcaacagtagttcctctttcaaaagggaaaacataaaaaaaaaaacccatccgcccaaaagtttcaggggctaatttatgatgtaactacctttaatggttcccatgatttaagatccaattcagtagtgacaaccagttgatttttttcaaatcatgtagtgccattaacattttatactttgtttcaaaggtcacatattgatgttctcccccagttcaaggcactgtgcattatgtatgccaagggttatgtaactacaatttctggaaatggtaaacagctgagactaaccctaaaaataaattcctctgggattttttttgtgcgaaaatccatctgccctcactgcaggttcatcattacaaaaatcactgtttagctcaaaccaagagacagagaagtcatcatgatctctcctttctgtctccttcctgtagcagctgtgcttcccctctctggtatgtacacacgcacacaccttctttatgccaggagcttttccagatcttcactacaaaatgggaagtctggagaagggaagctcatgcctatcagatgttgggagaggaagcagatgagacttatatttacttatttatatctagtacgcactccagtgatccacaaagtcatctttgggcctaaatcccttgttattctaccaataggttaagcagatttggatattcctaattttggttccaaataaacaggcagtgtttacctagcttcaaagtttggagaatttttctgtgaacattttgatatttttcaaatatggggacaattgaattgacaattgaagacataggatagaaaacccttaaaagtg

SEQ ID NO: 63708 - DNA, 590 bp, Homo sapiens
agacaagaagatctaattcagtcataactcactgctacatagtatcccacttttgaatataaacttacctattatctgaggacaaacagattgtttgcaatgttttacctattagaaacactgctgaaatgaatactcttatacatacatgtctttgtatactggaaaatttatctaggttatatacctaaggaggcttgatcaaattcagacttttcaggttttgctttgttctgttgtgatctcattttgcaaatatgcaccacttagagccagtggtatgaactttcaccaggaggcgtataattatttctggtagtcgtctctcttttgtgacattagcagcaactgacgatcatcatgggttgcaaaatgattagattctaattcattccttcatttattagttggactacagctctaagaagaaacttctctatacagaaggaaggccatactattgctaaggaaaggcaatataaacgtttatttcaatcaattgcaattattatcctttttttattgacacagagtctcactctgccaaccaggatggagtgcagtggcacgatctcgcctcactgcaacct

SEQ ID NO: 63709 - DNA, 2877 bp, Homo sapiens
gactgcaaacatgcctttagaataaaagtgacgagattacgagtacttagagggttcatatttttcaaacgtgaaagttagggtgtgtgacaagttaggtatttgacaagtattctagggaacggtggaagtgaatatttaaaattcagctatccccagaaaaacccaatacatgaaatcattacaagtattttttagaatcagtcagcaaagatcattactgtacaaacacttcaaagttaaggtcactaagaaagcactaactcctcccttctgttaactaatcactgtaaagcagcccaactctcctttctacctacctcagattaatatttttctccatggacagatttccgtgctcagggatatataataggggagaaaaaaaaataccacacaagtgtcagtaagcaccaaaaagctaagtattcagcacagggagggaatccacatatgagaaaacatttgacagctcttgcctcccaaaagccatttaatctgcttcataaacataatctgcttcataaacattaccctgagcgagtggttcgatggatctcctacaccgagtcctaaccgggaaacacaatcaaccgaaccgtcccgactctttcaggcaatcaggaagaccgggagaattattagacgctgacgtccgcagggccaggagctgagaaaagggtaaacagtatactcgcaggtaggttgaaaaaaacaaaacaacaacatatacacacacacacgaaaaattgggaaagaagttggtcggaaggttagagagaggcgaggccgatgtccggttccgagaggacggcactgcaggggcaggcagcgattaactgggcatttggatatgctgggagttatctgacagacctgacacgggtacaagacacaagaacgctgatacgtggctcagagaagacacgcgggggtggggcccgccccgctaaaccccaggctccctgaatgagccctcaaagatcgcagcctgagaaagtcaagggttcaaggaggcccgtaccggcggggcaacgccacaacacggaacgccgcggcgcgcggaacctcccggtccgaggcctcggggtcggccctccagaagtcggagcagcccctggggctcccggcctctcctggcccagcttctctgtcttctcttctcaacacccacagcctgggactggacccctgaaactgaaaggaagcttccggtcgagcgcccgcggcagcggcggggcaaaagcagcaatatgctctcagcgccgggagtgacactcaccggcccgaaacctcgaatgaaaccagcagctccgggggcggcggcagcagtggcagcaggaaccgaacatccaaaatggcggctccctcggcctcaccaccgctaccgcaggcggagggatcctgaggaaggagggagtttttaactaacttcacacactattgaggaaacttcgctccctgtcctcctctcctggtcgtttccgtgtcctcgtactgcaacttatcgtgccttttctctcgaattatccaagaactcggaccctgccgaggactatttgccaaggaggaggcgactgctcctggcagagcgacgcaaacgtagcaaggatcggggctgtcactgatgacgcgagacgctgctgccgagtcaccgctgcgatgagtctgagcgagaaagatccggcctaccccgtagcggacggacattggttccgcttggtgagggggtaggggggtggggggtaggggggtgggggggtagggggggtggagctgggctaccaggaagcggtggagccacctggagggggcggagctaagtcaggtagcccaggaagtgagagcaagcgagacaggtgggggcggagaagacagcagggctgaaaaggtcttcgtccacgggaatcccgaactctttgctgtctcctttaagatttttgctttctttataacttaaggagcatgctccaggtggtattctatggttttatggtgtctttgcaacatattttatgaagagttaagaggatgactgaaaagaatggattccacgcccggtaccgcggtgcttgcactgctcaagtcacttaaactctccagggattcaatttcctcatatgtagaaagaagacttggactcatgttagctgaaacccttacagaatgggctttcggtctatgactccatgaattaataaccagggccaaagaaagtctaaccagacagttcctaacctgataaataattactaacatatgacgtgagtcttttccatgtgaatgtaaagagggcctgatatcttggcctgtttaaaggaaaggtgacctacctagactaaaatccttctgctagattggcaacaaagtacaatacaacacagcagcaggctgggtgccaaagagaacagaaccaaccacacaaaaaaaattttttttttttttttgagacaaagtctcgctctgttgcccaggctggagtgcagtggcgggatcccggctcactacaaccttgcctcccggggtcaagcaatttctcgtgcttcagcctcgcaagtagctgggattacaggctcccgccaccacggccgtctaatatttgcatttttagtagagagagggtttcgccatgttggccaggctggtcttgaactcctgacctcaggtgatctgcctgcgtcggcctcccaaagtgtggagatgacaggtgtgagccaccggcctggccagaactaaccacaaatcttgagtttaggatttgggtgtcatagagagaaggttgcacttttttccttagtcattttcatgcagggatttcaaaacacttaacaaaaattgctctaagtaggccgggcacagtggctgacgcatgtaatc

SEQ ID NO: 63710 - DNA, 2044 bp, Homo sapiens
aagttaatcagatgttcatgttactatgaagttgaccagttaatttgtaatgaataattagttaatttgtaatgaataatatttcactgagtagtcaagccctctttccactaaaccaagctgcttctcactgtactaaaccccgggctctctctaaactttcaggtgttccactccttgtcaccttcccctagatcctgagtggggttcactcttagctccctcgggggccacttctcaacacttacagagctcctattgacctggcacggtggctcacgcctgtaatcccagcactttggcaggccgaggtgtggggatcacctgaggtcgggagttcgagaccagcctgaccagcaaggagaaaccctgtctctactaaaaatacaaaaaattagccaggtgtggtggcgcatgcctgtaatcccagctactcgggaggctgagataggagaattgcttgaacctggcaggcggaggttgggtgagccgagatcgtgccattgcactctagcctgggcaacaagagcgaaactgtctccaaaaaaaagaaagaaaagaaaaaaagaagacttcctatctccacctgggtccccaagaggtaagaggtatctccttttctcctgagcctaggtcacctcggggtcccccgaagttccccagaaggggctgcacaagtcaggacaagaagtccaggaaatggggggtcgccgatgaccacgccccggggctctgtttgggaacccccaaaatttactgaggtggaaagattgcggggtcattgtggggtcaggctgagggggccgggcccagccctattcacgtgacccggtcccagggagaggagtttgttcacccaccagagggaacgcccgacgcgaaggcagtgtggcaccctcccttcccggggagtcctgggcgttgctctcccaccccggccgtgacgcaatctctccgcgccgggggcgggacgagcttgacgccatctccgggcgcccggctgtggggggcgctgggtgtggggcggctccggggccggggatggcggcggccgcggttgcggcggctccgggacgagtgagtggatcctgggaagcgctgtgaaatgggctggtgagtgtccctggaagtggtggccgccggggccaggcaggcctggggtcggtgctccggaggaagtggccctcaggagcccgttgctccggcgggccggggcccatgaaccgtggacagacggaggggagaggccgcacctagaccccctcgcgcttctctctggcctgtcctggaaggtggcctcaggccccggcgccccggaggctgtgtgcctgcgagccaaggtgtccgagtctgtggggcgggaagggcccccaaacaaggaagcgtcgcctgcagggcctcgcccctgcccccttggtgaagggtggaccccctactctctaaacgcagaattcccaatttcgagccctacccttgttggatcaaggattgcgggaccactgggagccataaccgtagtctctgacaagcttctccctttctgtcgggcgcacctctcgcccgcagagaatttgggtctccagctgggttcagccccttgattccgacccaagcgtgatgaggagcttggttccgggctctgctagcagcgttggcaactctcctgaacagcctgttagctcggttggggtcacaagctgcgttttccctttgagatgctcagtgaggttctcgagaggcggaggtttcggattcttaagtgtgttttgcgttgtgggaacctggcgcacaggcttggctctttgttttcctttctgcagaccttttgcctctttcggtccctttactagcctgtgtttgctaacttctcggtgacctggaggcaggttttctttaaagttttcgttacagaaagcaaggatcattttgggattgaagtgtgaccccagtttctgttgggaatgaagaagaaagcaagctgcttttcagttattaaagctgctggtggagaaaagagtcattatttatgccactgtgtaataat

SEQ ID NO: 63711 - DNA, 556 bp, Homo sapiens
gaattgcttgaactcgggaggcaggggttgcagtgagccaagatcacgtcattacactccagcctgggcaacagagcgagactccgtctcaaaaaacaaacaaaaaacaaaaaacaaaacccctagtttggcgggggtcagttgacactgttaaacagccttggacctatggaggtcagagaggaatccaagtttccctgttaagatattggaagaagtccgcattcctggcatagttatttttctggctacaatttaactagggcacttccttctggacctcaagatctataattatctaaactgaacacaacctttggtgcaggctaggaaggttctgtgcctgttctgtaccatcacagaaactttttagaaatgacctcagctcttgtctcctccatggtttggcagtcatacaacctgccagagtaatcattttgccctagccttaacctgagctctcttaccaccttaattctggattttcttcagtgagcttattttccttccttgcctctggtgaacaaataaaacacaaataaaatgcaaacatgag

SEQ ID NO: 63712 - DNA, 1495 bp, Homo sapiens
gtaaattcccaggaattaccagacaagagcctgacaagagccggaggtcttccgaggcggctcagacaaacccttagacaacacaatctccgaaatctaaatttagaagcttttctgcgagacccagacgcggggactgataccccccggtctgcacgcccacgcccatcctcccctcccccagctccacccaaggctgtcagacgccggggccgtccccgccggggcccgaggaggcggggtgcccgcggcccgcgcaaaagccccccggccccgcaccccgcgccccgcgcccgagagcgccaaggggcagcaggaggagcggccggggaggaattggggttggaagcggggagggtgagcccgggctgcccccctaggccggagctggcccccggccctctccccagtgcagacaaaaggaccaacagccggcggccgcgagggggcgaggagcccgcatccccagcccggacccggagggagggcagggggtctttttacccggcgcctcggcgctgcgctgcgctctgggtccctgggccccgcctccggacagacggaccgccggacaatggacccgggaccgcagcccaagccagccgggccggggcgctccgggactgggccccggcgagcggaaggggctccgggccgagccgagccggtggcggggagccgaggggcggcgctgcagacggacaaagccaacagcagacagacagacggagggggaaaaagatggcgacgcgggcggcgggagcgcgcggctcgcgcacccgcagctagtgaggcgcgtgcacgagcctccctctccccctcccccgcgccggccaggtccccttccccgcggcccggcgcgcgcctggcgttgtgggcggggcctgaggagaggggctctggagaggaggggctccggggagcgcccaatcccgggcgcccgagaggggctcgcccgcgttccagggctccggaaccccccgcctcgcccattcccgggtctttctctggctgtctcagccgctcagctcccccagaccttcctggacgtgtaaacgccaccctacccagccccgatcctggtttcttaccccaccatcgagttcagccacaaaacccacaacccccaaccacagctccgccgcaggcaccccctctccttagcccggatccccaccaccgtcacaaaccctcttcgcctcattcccccacgcttcgcggtggcttcggctcccgaggctttgaatgtgaccacgggccttggtgggaggggccaagttcagctgtcagaacctcagagctgggaaatcttgagatttcttttgagtatttaattttctgacatgattctcaactgataaaataacattggctgcagacccaggggcaggggaacttgtggcactgttgtcacttgagggatgtttgggggcaatggagagccgttggaccttttttttttttttttttttgagacagagtctcgctctgtcac

SEQ ID NO: 63713 - DNA, 2574 bp, Homo sapiens
gtctccccaagtgctgggattacaggcatgtgccaccgcgcctggcatggaacctggttttatcttgaaatgttgcaaacgtttataaagatacagtatttctaaattcacatcaacatcttatgataagggctagctcctacttgtcatatgactgccccggtacaagcattagatgcagcctccacagcagggagcagatgacttccttctggaggcccctttttcttttttccctttttttttttgagacgtttcgctcttgttgcccaggctggagggcaatcgccggatctcggctcactgtaactcgagaatcaagcgattctcctgcctcagcctccggagtagctgggattacaggcttgcgccaccatgcgtaatttcctctttagtagagacggggttcctctgtgttggccaggctggtctcgaattaccgacttcaggtgatacacctgcctcggcctcccaaaatgttgagattacaggcgtgagccaccgcacccggccctttttctttttttctgtagcctaggctggagtgctgtgacgtgatcacggtttactgcagcagcgaccttctgggctcaagcgatcttcctgcctcagcctcccgagtagctgagaccacaagtgctcactgctgctcccctaatttttaacttttttttttttttttttgtagcgatgcggtttcactatggtgtccaggctggtctgcaactcccgggctcaagcgatcctcccgccccgcctctcaaagtgctgggaaggtcccttccaggcttaagcagcgataatggttttcaagttaaaaacaaaggtaaccaaggaaaaagttttctctgaataccgagataaattagggaaatcgccagagactgtggtgctgaggaaacactactgaattataccacacagaccggagcgatgctggtccaaagggcaaccggacggcttaaaagcggggcgggggaacgcttagagcccgtagagggacacggaggcgctgggtgaagagtcagggatacgcaggcttcgaaaccccctcggccgctccacccagggggaaagtccagcgaaaggcggcagcagatcttagggagcaactcccggcgtcagagaggcggtactggcagccggttatggaagaatccggaaccaaggcactgggcgcggtgaggccgtgggcgcagagtccgagaatcaacagctgtggctggcctccccgcgcccagagcgaaattaagggcatgcccccagcagctgactcagtcggcgtggcgcttcccccaacgtctgccgtgcccccgccgcgggaagtagtccccggccgcgccgactccaaaggaaaccgagggagggtgccccgagtcagcgcgtgggtcccggcagcggcgatcgcgcagccaatccctggaaaggagggcgtggctatatcggccccgtggatccctccgcccgcgcttgttgtgctgaggccgagggagtcgccattttggatggtgaaccctgaagtcggtgtctgctgcgttcacggcaggattcggttaggtgagtgtggcatcctcggcgtcagaggtctctgtcttcctcttctctctgcgctcctgatttagcggtctctagttagcgctagggcccgggattcaaacgacttcggagggggcagctgaggagaaagggaaggatagtggaagtgggggtcagaccggaggtcaggccctcgagggcccgcggcgcaggaggctgcccaggcctgggtggggggcgtggcagggccgcgagcgggtcggaggcctctggtcctggatcctcgaagccccttaactttcccctagtcttcctgccccgaggtgtgtcttccttggggcggaaacgccgcggcctcggcgagggctcctcggcgacacccctaccccgtcttttctggcccggagagacttcgggaaggtcagagcttccagtgccgcgagaggcggatgccctccagtccgggccgcttccaccgggcggggtggcctcctgggcttgttcctgggttgggggaacggacttgggtccactttggcctgagaaaattacaatttctttcgctgaagtaaggagcggcctctgcccgctttctcggatccctgcgtgtgtagtgagaggtcttggaaggatccttgcgcctctcctctttgtttttctcggtgctcttcttccggggtgctggaggtgacctcttggaactcaacagcataaactttgaggagggtcgggacccaggagctgtaggttaattacaaaagacactgtctgtcgtagtaaacttaaagtctggtcttagatctttaggggaaacttgaattttaaaattatgtgtaatattttaactttttattatggaaaatttcaagcagacaggagtataatgaattctctcatccagcttcaaacacgatcaactcatgcctaatcttgttttatctatacccttcctatgtctgtatttttctaatttaataatagttgaaatatatatgtatatatttccctctcctttcccagtagaagccttttggcttt

SEQ ID NO: 63714 - DNA, 476 bp, Homo sapiens
cctctctctactaaaaatacaaaaattagccaggtgtggtggcatgcgcctgtaatcccagctactcaggaggctgaggcaggagaattgcctgaacccaggaggcagaggtgcagtgagctgagatcacgccaactgcactccagcctgggtgacagagggagactgtctcaaaaaaaaaaaaaaaagtttgtgaactaaggttttctcctgtgttttgatcattttatttttactgccaaaggggatctgagtcatttctctggtatttgtaacgttgtgctccttgccctaattaggtcctggacccaagccagaagcctctgcaaagcttccttccagacctgcagataactatgacaactttgtcctaccagagttgccatctgtgccagacacactaccaactgcatctgctggtgccagcacctcagcatctgaagacattgactttgatgatctttcccggaggtttg

SEQ ID NO: 63715 - DNA, 1443 bp, Homo sapiens
attttttagtagacacggggttttgggtgttgaccaggtctcgaactcctgacctcaagtgatctgcctgcctcagcctcccaaagtgctgggactacaggcgtgagccaccatgcccggcctcaagaaaatgttttaatttccttaaaaaaccttaagaaaaatcaacttttaagttgaaaaagtttatatattaacatattcatctttatatcaacacagcagtaaaatttattttttaaagtgataaaaactgtacaaatatttctggtgtgaaacacagtgttttgatgctcgcggactcttggattcgaggctgcggtagtacggacaaacaccgtgcagcggcatctcatctccgccaacagccggcgatcaagcgggcaggctgggagagggcgggcggaagaggcgtggccgccgctactgcgcacgtgcacccaaccagaacctgggggtggtgccgggccttccccgctgcgcggaggcgtcctctcaacccttctgcccggcgactggtgggttggcggctaaggggcggagacaagaggggccgccaccatctcctccaatggaagggagacaggggcgggcttaatgacggaaggagcatggcgtggagacacctgaaagtgagtcccgcgagtgagcagtgtggatgggggaccagggaccggggagggcgagaacggagagtcaggccgggcgaggcatggaccgaaggcggctccgggagtgtgggcccccctgggacgtgtgcgtgtttccggggtctcctgcaaatgctcgtgcgtgtgcatttgcacgtggactcggtcaggcgtgtgcagacagcgcctgcaggtctgggtgggtgctgatctgagtgtctgcgcctgggccatgtttttgagcctggcacaggggtgcttagtgaacacatgaccgcctagcgttgtgtgccggatccaacggggaatgaaactagagtaggacatgctcccaacccttttaggtaaagttttgttaggggcgggggtctctgtgaaaagttcttagctgtatccccgtatgtaataggtgttcagaggccgggcgcggtggctcacgcctgtaatcccagcactttgggaggccgaggcgggtggatcatgaggtcaggagatcgagaccatcctggctaacaaggtgaaaccccgtctctactaaaaatacaaaaaattagccgggcgcggtggcgggcgcctgtagtcccagctactcgggaggctgaggcaggagaatggcgtgaacccgggaagcggagcttgcagtgagccgagattgcgccactgcagtccgcagtccggcctgggcgacagagcgagactccgtctcaaaaaaaaaaaaaaaaaaaaaaaaaataggtgttcagatatttgttgattgacatggtgggggggagtacagtctccaagggaggca

SEQ ID NO: 63716 - DNA, 651 bp, Homo sapiens
gtaagaactgactgtgatttttttttttctcttgtttgaaaaagtcctaagtgtatgggaagtggctatggtgccgtctcactctgcccctcccgtgtgcttgtgctctgcaggtatggatttaacagtcacgggctttcagtggtggaacacaggttacgggccagacagcagaagcaggccaagctcacagaaggtaaagtggggttgtgtcagtgggcctttcttatttattaggaggaaacgtgggagaaatgctgggaacatttctagtgaaataaacatgattgagcaatagcaaaaaccactgaggacctcaggacacctctcctagagcgattttcctggtcccacacagcttccaagagtttaactggattttgcaatttagcaaatactcactttgcctctgccttgttatgtaacctgttaccgtaactagggaggcctgaaagcaagcgaagcaaagcggctgggcaatgatcacacaggcaatgagggcaggagcaggacttgaatgtcatcctcccgtggcccactctgtcctcccttttttgtcatccattgtgtaaataatgttcattaattatagaagacttagtaaatacagagaagcgtaaagaaagaatgttcaagaaacagatactcctc

SEQ ID NO: 63717 - DNA, 2164 bp, Homo sapiens
tgcgggcctccagggtgccctgcgctctgaaacaggagggctgagtgggaagcccctccgggatttatcaactcaaaccattcgggagatgtatgcactcacccaaggcaaggtttcccgtgtttgtgtcttcagatctgcgtgtggcttgggctcctgggtcgtgatgggaatcatcattccctaatctgtcttgattgtgggggactctggggctgaagccacatccttctttatggtgtcgccatgtgcttctctgtaggccgagttcccataattggggttggtggtgtgagcagcgggcaggacgcgctggagaagatccgggcaggggcctccctggtgcagctgtacacggccctcaccttctgggggccacccgttgtgggcaaagtcaagcgggaactggaggcccttctgaagtgagtgaggtcatgtgtggcttgaaacagaagttaggcagaggttcatttagatcactcaagtcaacgagatactgttgatctgtttcttattcattcaaaaaggagttgaggggtacactctgaaggggagagaaattctgggttactcttttgatgaaggacaaacaatgccaaggagaactgaggattaacctccaaggcaatggtgtttctaaggtggagttgtccatttgctcaagggaggggagcctgaggaatcccatcagcattcccattaattaagcaacactggttcaatgttgggagctgtcaatacttaaaagcaatttccttcctgctctgttcctacctgggtagaaatatccctaggtctctgggtgaagagtgtagaggaaaccagatgtgcctgggccgggatgatgcgtttctgggtgaacgtgggcttcctgtaagagcagggcctgttctccactgtttgctgaaattgctttgtttgctctttttccagagagcagggctttggcggagtcacagatgccattggagcagatcatcggaggtgaggacagcgtctgacgggaagcctgatctggaaccttcccaaggactcaggcaagcctttgtggctggatcatgagaggagggactccatcttgagccatgtcccccagccatggcatggctgcactgtaaacgccaatcggggggtcaccaggatcaaccgcaggctttcttcagtcccttggtcagaccataaactgcatttttgattctttgtggattcaaaccctaggatccatcagtcttgcaaggacattgaatattaggaggaaaaagtcatggaaaaaataaagccatttagaacctgggtttcaacgctagccctttctggtttgccataggccctgccaagatactgcaggtccatccaggcctctgctatctgcatctgcagtgggcttcccaggaacttgactgtctttcatttgatctttatttttgtttatttaatattttaaactttattttaaaaatatttcaaacataagggcggggtgtggtggctcatgcctgtaatcccagcactttgggaggccgaggcgggcggatcacctgaggccaggagttggagaccagccaggccaccatggtgaaaccctgtctctaccaaaaatacaaaaaattagccagatattgtggcaggcacttttaatcccagctactcgggaggctgaggcaggagaattgcttgaacctgggaggcggaggttgcagtgagccaagattgcaccagtgcactccagcttgggcgacagatcaagactctgtcacacacaaaacaaacaaacaaattttcccgtttctctctgtccctttctctataacatggataaaatattcacgtcttatgtatttattattgctgagtcattggtgccttattcttcagtgtttcagtctgtatctcctaagcatcctgatgttagttttttgactataaaattgacctgcattctttactagcaattcaaacggtacagcactcttgaagtgtaaacattcctgttcctcctcaccccactctgcagacatgcctttctgtctgtcctcccagacttttcccctgcataaagatgttcattttgtacatacactcagacatacatgtggctgtattttttgtataccgatttctggatggaatgcacactgttatctgtttagttactttatgtttt

SEQ ID NO: 63718 - DNA, 910 bp, Homo sapiens
cagttaaatataagcagtaagctaatcctattctgtgacttacttttctcacgtgtcatcataatgatatacgtcaatattcatccctcagatcggccttgctctaacagcccttttcacggcataaatgcatcaatgtttgcttatgggaaacacaaaggatattttcaggttttcacatcagacagtgcttcagtgctcagggcttatgtatctttgtggtcttctggtagaatttctgtagattcccagaagtggtattgcttgggcaaaggttatacacactgaacatgttgatacttactgccaaattgccatgcgagagggctgtccaactttgtaagggaaggcctctttcctcttatgttgttccacatgggaatttcaatttcactggtctggaataagctgttcttccttctcaacttttccactaggaatggcttgcattatggctctcccttggttaaaaaaaaaaaaaaaaagagagaaaagaaatggagggtttagcaggttactttgggctgcagccagagtgattgccacatgcatttctctctttatctcctctctctcctaccataggctcagttctgtatcagaaagggctgaggttcctacatgcaccaccttccttcaaaggggcaggtacgtcaggtcacatacactcaagtgttttgaaagaatccatttccccactgactttctgataggctgcttctgggtcaagttctgtagccaatactttttttagtctgttttccccatgaggaaaacatccagtcagaatggcagtctcaaggacaagtggggaactgtgatgtagcgtggagacgatttgcttacttccatcttggaggccaagggtgtaacttggctacctcagtagctccttggtggtgcttactca

SEQ ID NO: 63719 - DNA, 1682 bp, Homo sapiens
aggcatggggtttcactctgttgcccaggctgggaccttgtgtgctttaatccctgttaagtcacttagtcaaatttaatcctagctaataaagaagacagattgaggtctactatagttttatatttgcttggaagagatgttatgtgcttactacttggctaaaacatgtttcaggatttctctttttcctccaggtacagacctccggtcccaacacaccataagaacattctgagatgataatgttacctaccctctagtctgggccacctatgatgttgaatgagtcttggcagccagggaaaatttctgtaagagccttgtggttagacacataggaaataaagtcactgtggcttgtcacatgcaagaggacagcaggggacagggcatagcgctgtgtgtgcaggaacagtgtgggaatgatctggaatttgtgaaatacctgggcagcaatacaaggacgaggctccaaagggcagggcttcaggagaggaaatggataaacactgcacttcttgcattactgccagccacaaagaggtttcctgagtgctgaaaaccccatctggaaagtgtcccataggaaacaaaaggagttacagtgtgtgaaggtcacttggctgctgcaccacctgccaccccattaatcacttgagttggtgggtacaggaacaaagctgtgggcagagggtcagaacacttcctgtctgccccaggcacatggaagacattctcctgagtagtaaccttggcactgccttggctatttgagaagctggccagttacgtatttcagtcactgggtatttgagaagctggccagtcttttgagcttcaaccattctcacagatgttgaatttgcagttcttaatggatctagtgacaccttcctacctcagtagagcaaaaaatgtggatcccaggtctgggaacctaaaagaaatcactctgagtaggttagaatttcacctctatctgagaccctgacagaatcatttaaaaataaaaacacatatatacaaatatctatacacacataggtgtgtgtgtgtgaatagggtggcccaccttcatgttcttttactcccttgttcttccagtcattcactgagatgctgagttttccagcatctctcagtctctcagaagaaccgcctgccagcatccagtgggtcacatcctacgacaagcccagcacctcttcagtggaaggggatttgctttgcggcttggcaagtttatgcaagtccctgatttcttgcactgactgctgaaaagcagagctccatttaaattccattccttctgaagatctgtcctatgaccagggtgcatggttcaactcctctctgcatctggctggcacccagggcactcttgcccaaatgctttgtcaggtagtttacttgatctgtttcctaacgtgcttcccagccatggtccacatggtttcagactgctccagggcccccaaggccaacacaggggtcatgcttggagaaaaccttcaattctttgcagcctcaggcttctccagccttgggtgccagtgctttaaggtcctccttatcctctttgctgggcatcactgcctcagtcatggtttaaatctgatacacaaggttcttaatgggcctccatagccatgtacaattgacacccttagcctggctaa

SEQ ID NO: 63720 - DNA, 772 bp, Homo sapiens
accttcaccccagattcagccagagcagctccatttccatcattgcacacaccagttctactggttaacatctgctacctatgagtgttcctcacgctttgtagcttaggacagtcatcttctatttagcttatgattctgtgggtcagcaatgtgggctgggcttagctggaggtggttttggtcaggatcagtttcagctgatcttggcaggagctcactcatgcatctgtggaggacttctggaaatttggggctggctgtctgtcagctggaatgcctgggttccactctatggggacctttcattctccagcaatggaggaataacttgggctcattcacagggtagcccccagattccgggtgctgtaaaagcagtcaaaccccaattcacaagcatgtttcaagactatccttgttacatctgctactatttcaacatagtcacagagccaaccccagattccaggggtggagaaatgggctcctacttatgactgaagagctgcagtctattgcctcatacctgcagggctggggagaagttatggacgcttgaaatgtagattctcacatccccacacacacctgttggatccaattcatggaaaaggggcctctcactatgtccttcgggtgactccctcctccttaatattttaaaatattttatttgatacttataatatattatatgtgacatatatgtgtgggcatatatgtgttttattaaaaataaagcacaataatataatgtacgttaatgaac

SEQ ID NO: 63721 - DNA, 957 bp, Homo sapiens
tcttgcagagtttattcattttatgctgtataatattccattatatccacatacaatgcagtattgacccttcctcctgttgatgggcatttgtcttgtttctagttactttgctattatatcagtgtcaccatgattatccaaaagtaattcttttgtacactctaatttaagaacaactaaccctttttaatgaataaatcaaccttgtattgagttgctactaagtttcagttgactagtacctgggatacacacaggtgcagacatttgactgagacatattgatttttctcatctgcctatttaggctaatcaccagactataaaaccatgagaaccactgccattgagtatagtctgtgtcagtctacactatagctttaactagttgtgtgatttcttgcaaagagcaatcagagaagacacaataaacacatttactgatttcaggctggagagcttttaagcaatagggagatggccacacacaaggtggagaaaattactgtgaaaaggaagtactttctttagagccccacctaagctaggctgcagaaatgtctacaatgggtttgaaaaaactcaaaatgagcctttctgcagtgtgaaaatcctccaagataaagagacagattgatggttcctgccgccgccctgtcctgcccagttgctgatttcaggaaatactttggcaggtttgtgggtcatagagttgccaggtttcttgggatttgtaatagaacatcacaagaaaatcaagtgtgaagcaagagctcaactcttaacaggggtattgtttgtggttttgttactggaaaagatagtgaccttaccagggccaaagtttgtagacacaggaattacgaaatggagaagggggagaagtgagctagtggcagcataaaaagaccagcagatgccccacagcactgctcttccagaggcaagaccaac

SEQ ID NO: 63722 - DNA, 1965 bp, Homo sapiens
tgtccatagtaaatgatacccacagagaattcccaaaagaagacgtacaaatggacagtaaataaactaaaaagttaagctttaccagtaagcaaagaaaagcaaattaaaacatatgtttacaaagtcactgaattggcaaaaattaaacaagatagtggtaggggcaggcacagggagttcctgctggaatgcagacacaaaacctttctggaaagaaaactgacatactctttgaccaataactccactgctttcctctctccctctctttttctgaggcggggtttcgctatgttgcccaggctggtctcaactccccaggctcaagcaatcctcccgcctcagcctcccgagtagctggaacctcaggcgcgcgccacaactgcagaaacaccaaaaaaagaaaaaaagcttgaactcacttttgtacagaatcttactacaatgtattccagaaaaacaactggaaatcagtggtcatctctgcgtgtgaacgcatgggtgatttttatttacagccgggcgcgcatctccattttccaaaatatccgatatacatatttaaagtcacctgtgttgcgctgctcctggcccacaagcgctaagggaccccagcacttaccttactcgtccacgccgcctcactccctttcactttgtggctgtcagcaaccacttctcggaagagcccgggcgcggacagctcctttcatcagccccaagccggacaggaccctaagaccaagtcacccaggggctgttgcctagcaaccctcgtggccccgctagcgggaaggaaaccgaacagaaaacgcacaagcgcagaaaagaaactcctggccgtcggtcggcccccgctcaacagcccaataaacggaagagcttctagtcaccgcccaccttgctcggctctgaccggaagctaggcgtcacctccgcccgtattaaagatggtcgacctttttcccctccttttcctgcccccagactagaggcgggatgtagtctcttaggctaagagtgattggtcacaaggagactcggaagtgtctgatcagagccccagaggaggccttgagagcctgttggcgtaccgttccacacttggatccaggaatcgggcgtgttccaggctgctctctatggtagctttgggcggatagagggggcgcgcaaagtattaagggacaataatggccgctttcaaggtgtggattttggctccttgagcctgtctgagcgaggggtggcagcgccggcgccccagaatccgggacagaagggtcccaagagtcgcgcttggtgaggtgagagtcccttcttccttcctggcctgcccttctgtaatcatggcggctctaggcggcggatattggtcccctgctcaggtccgggccccagtttggggagttcctctgtcgtccctgtcacccaccttgccttactcacctcagggatgctgcatccgtcctggccgccttggccttcctccttgctctggtcaaatcctgctgcctggagcggcctcgctgagatccagggatgctgcctggagtggccttggtccctctcccaggcctccgctttaacccaccccagactgtcaccgagcccgagtaggactccttgtgtcttcctctgctctctcacagtgtcatttataccaggcaatctggtgggcgatctcttctactagaatgtcagctccaggtgggcggggatttttgtcttgttctctgttgctatcgccgagaacagcaattggctcagggacaccctcagtgaataattgttgaatgaatgaatccaggttctttcttccctggctttctcgtacgccttgtagtttctttgccattaatccttctcaagaatcttgctctttagctccttatttgttcgtctcagcagctaatgaagttctctctggctgtctccttgtcctgtgttgctggaatcttc

SEQ ID NO: 63723 - DNA, 645 bp, Homo sapiens
cccaaagaactgggattagaggtgtgagctagtgtgcctggctcccttttacaacaaaaacagagtttgttatgaggatgaaatgagacataatgaaggtaagagcaatctagttcatgacctgctcagtaaaggtttgaagaatttgaataatgatttcttcatataaatggttagctaatccatgcctctgtcccctgagggcagagaggatgataagggaggttgagaaacacatgttcagcactttgggctatggtcatgccaagtctaaggcagggatagtacaacaaaggtcacagaacaaggactgttttctgacgtttccaactctacactgactttctcgtccaataatacagtatcttgcccatgttactgcatcacctttgaccctggagaaagaccacagggtgctgctcctggctgccttaccgtcataatgagcttctccacgcagtcaggtgccacgctgtggaggtgggtgaggtgcagctggaggtggatcttgttgttgagcatgtcctggcacagggggcagcgaagcatgggttgcaccgagtgctgcgtcatggcatgcacccggagccggttgacatcggcattactgtacttgcagtagggacactggtacatctgtgggga

SEQ ID NO: 63724 - DNA, 686 bp, Homo sapiens
atctttgtggctacaccgatggaggtgggccactccctatgccattctccctctgtgactttcgagcaagtggagtctcatcgaatagtgaccacaagtcctgccagtgactctccatgagccccaagctatatcctacctgtaccgtgacagccagacccagaatgtagcaacctactctgcaacatcccagacacatctcaaatatttactccctggttttattccatggtgttcttccagccctgacaacctggctagatgcccgagaggtaacttccaagcgattaggtcttctgggtaacaatgccctgcctcgggaattttcccttaaatcaaggtggtttttgcttaccacaaatacaaattgttctcatcacacatcgtacactcagcatcttagtaaaggtgactgcatgttctcatgtatgtacacggaaaagggaatttgccaatctccatggaagtcctctgtggataatcatctaaattaaaaaaaaaacaccaaccaactttgcccattccatcttctacttctcagcagagtatatacatttactgaggaaaacgccagatcacaagaggaagggcctgggatccaaaccagcactgatgagtgggacatattgagctaactaaccctatggtagtccaggcaggaaacctcgaaggggtgaagactgagt

SEQ ID NO: 63725 - DNA, 2326 bp, Homo sapiens
ggagtgaattcctttccaggcttgctggggacccaacagggacaccccaaaaggcaaggcctaaagccagagcaaaaacaagcagacgcaaagcaggggagagtaagcgatgggcgaagacataaaagcccaaagatgagagctgaatggaacaggaagcaaaccagggccaaacccatcacggcttaaagcaaacgttaatgtaggttccacattgatctgaagcccgagggggaggaggctgggtgcagccaggctcctcccctcctccatctcattccattcacatcatcaggagaactgtgttttggggaaggggtcaggacaatgattggagcctgaacttagctgctgccttttacagtagcttcccagaataaactgccccaagacttcatccatcaccaaaaaaggcaactgtaaaaacacaggtcgccagccccttgcctcacaccagcacagtggccctccctccgctcctggggatgggggtgctgagggggaatggagggcaggcgctcaggcctggcactaattgctcttggggatgctgtgtggtgtgggggctgttccctgcgctaagcagttaggaacttcctaaatcattaacctttctcggagcgcattgtactgggaggtgctccctctgcagcctattcacgagccctattgatctgccgcacactcggtgccttcaaagttgtttatgatcaatatgcaaattgcccatggcattgatctagtattaattttcaattagggaatccacaaggggtctctgagggtcaatacctaacaatgcaaaggaaactccgctgtggagtatcaggcctgatgctgataaaagcttcctaagcctcctcctcaacagttccaggccctctgggctgtcaccttcactgtggctcatttggttccctcctaagtcagaccccttcggcggcctcccaggctgggtctgcggccatcaccctgtgccccccctcccaccccctatgccactggaacacctcctggcctgccagtgcctgcccctcttgcccgccctcctgatcagatgcccccagacatgcctcctcatctccccatgccacgcccagacccaggaccactctctcccccagctccccaaccacacataccttcttcctccctctttccctttccctcgtttctgcttagtcacggaacgtcaccttggcatgctgccacggctggagctggcgagctgcacggtccccagaaatctcaggcaggcaggcagagcgccgggctgccaggttatgcttggcaaacaacccactgatgtcatttcaaaaaaccaggggggaaggaaaaaggcacagcttcaaatcatctgtttctccttctttctttcgtctagcaaaatttttcttcctaatgaagcccgggggtgggggatgttaattactttaccactcactcatggttcccagaagaggccaacgcccgccctccaggagcacagggcagtgcgtgtgagccactgacggagagtgtccctggggacagtgtgcccagctgggactggaatgacccgggaactcagtcattccatttacgcccctaacagcccctgagagacttgcgtgggaaagctctgcagccagaggagctgcaagagaaaaacgtggcttggtctcctcccagcaggtagggggacaaaagcagggctcagccatactccagcctggggcccagccggctcagcctgacttctctctctgccaggaggttgaaatgtgcttacgtttggaataaacctgcctgaagatgaggccacgatcctgccaagatggtgcccacgatcctgcctaagtcccaacccatgccctgcccactttccacactgccactcatggcactaaccagtgcattagctagccaggctaataggtttatggataacattaattaccacgttcctcattaatggatgaaatctttattggtgccattgatcagcggacttgttagctggcctcctaaccaatggcggatgtaacaagcgttcttattggcatatcaattaatgcaatcaattcctggccaacggctgccattcacttccctggttgttcgagagtaggagacagagccctgtcaagagtgcctttacttagagctccagctctcagctgacttccaggtgggctctctgccacttggagttcacctaccaaaaaaaaaaaaaaaaaaaaaaaaaaaaaaaaaaaaaaaaaaaaaaattcacacctacccttccatctgaaaatcacctttccgtgttccagtgatgacaaaagtgctaagctacgtcagggga

SEQ ID NO: 63726 - DNA, 2458 bp, Homo sapiens
gttggaaagttttattaaccaaatgcttgagggtttctgtatatttatattacctcctcttctctcctgttctacccaggcatgttgaaaaaaaaaaaagttatgatatactttaataaaaacaaaattaaaatgattaaacctttcatatcctttagagataatctctcttctcctggctggtccaatctggaagaaaacaaatgtgaaccatagcttgctgctgcttttcaatttttttcccccctaaagaaacaaacagaaaaagccgcctgtggccagatttttaaaataaattaaatttgtcctcacacacggcagccaggtgtggttgaaacattctttccagatatctatgatatatgccaacatccttccctctgggggtctttcaacgtgagcctgacaatcccaaggggaacagagacttggcgggggagaaaggggggtgattccaaaatagttattgaaaaagaatcactatttcccaattagccctgtaataatgccttacaggaatgactggatgccctgcccctgcacgccatctaccaaaaccaaaaaatagtctacattcctgattaaagcaaagctcagagaaaacagcccggtatggcacaaatctccccggtcttatgtgttctgaggaagtcttcagatccgcccagggtctgggcacaggtccgcagggaatcaaatggctgcagaattcgatcaggcctgtctgtccaaggccagctagatatggaaatcagaagtaggtcatcagccctcaagaatcggataatgacctctggactcgcagcgctggggccaccaagagaacaaaggtgttaaggcactgtgtaggtttttctgttgttgttgttggtgttgttgttacaatatctaatagtgagatcaaattcttattgtggaaataaacatcacggtcttctgtatgaagatggtctgcggaaagtgaccacgcatcagagtgtccagcgtaggaggagaatctcagtttgccttagtcatcatagcacacaccctgagcacagtaagtttctcattcttcgtgtctggtgtttatgttgtagtagagacgactcgtcctcaagttaaaaggacaaaagtctttcctgtgtttcatacttgggcggtgagtcactaggaaaggatttggtttttagaaaaaaaacttctgatccctgggctaaaacagagagccccaaagagctatgttgatcccagacaagcacgtgcgtggattcttcaaagttcaggtcaactcaggcccctcctccttgcagtcagccctgtactcaaggttgctggagacatggcgcctctatttcctgcccaaagaagcccccttaactgggggccacgggttgagtggtgaaggaggcaactcacacctgaattatagtgggcttgtaaacctgaacagggcaagtcacaactttgggaggctgaggcaggaggatcacttgaggccaggagttcaagaacagccctgacaacatagtgagaccctgtctacaaatgaaaaaactagccaggtgtggtggtgcatgcctgtgctacttggaagactgaggcaggaggatcacttgagcccaggagatggaggctacagtgagccatgattgtgccactgcactccagcctgtgtaaagaccctgtctctacaaaaaaagaaaacaaaaacaaaaacaaaaaaacaaaaaaaactcacctaccaaaagtccagctgacatctactacaaaattcccattattgccataaaaacatgtgggctgggttcaaggctgcatagcagatggccaggctacatcctcatcacacacgcacttcactggtgccagtgccggtgacaggctagaagccactccagtgaggacccctgccagggccaatcagatcagggctgccctccccatgctgtggggcttctcaatgcttctgaaatggactcacacaaggaagtcacaaagggctttggacattaggaaaaccatgcaaactgtttccacttctcagagcaacccgaggcacgcgctctggagtgtgcagagtcacagataactgctgctgctttgctcaccgcagtcttaggatttcttcatttctatcctggagagaatccagcaatggatcacactgttatctagacacaaagaatcccacccctggggcaaagtgctacttgtcccgtggatgagtttgtcagcctgcagcaaggaggccagacgcagtgggaagagcacagccctgggccctgggcctctgtaccaagtccctactctgctgctgtctacagcagccctgtcctcaggaaccttctccagggaaggaaatggcttctgtctgcacatccaatacagcagccactagccacatggcactgagacagatgggccgctgcaatgggaacctagcgacatgagacatccaagattgccaggaagggtc

SEQ ID NO: 63727 - DNA, 2837 bp, Homo sapiens
tgcccgtctaccatacgatgattttatagccctgctgggagtgtgaatcccaatgagtttcttatgcatcagggaaagaactgaaaagatgggttctaaagcaatgcaaagtctgatggaagttttcttacattcttccgtactgcacaatcctcctagaatggcaggagcagacatcctctatgtggagaatctggccatgtgcatgaatcaataccacactctgcctcctacctcaggccaagcagagttggcttggacactggcttctcctctcctgtgtgccctgttggcccacagcagctcacatgtggcccagactcaacaccgtggtagacaaccctccttgtacagtatttaagattaacaggtaaccttcagtcttggtccaatcaaaggaaccccagctagaaaccgttttgagtaacagattctggtagggtcttaatctatctgctaaagttgacagatttccactccaatgactctcaggtgaagaaaaacatcaaagtgaaaaacagattctgggagatggtgggagtgtgcactgatttccaactgccctttctgtgccccgccccctccgggtagaaagcagcacacatttcagagagctcaccatggacgtcacttggctgggaatgcaagataaacgtggaagagctggtgccagctctgaacccacacgcctcagacgcaggctgtacactagccgtgggagagggcagagggcaagcatgtgtcagtgacagccgctctcctagttctgaggatcaagggcacccacatctctacgggtggagaagattgagagtggggccagggtgtagtcctctgagaaaggagtgatacatttacatgtgaaagcagaaggatgaggaattaaggaccccggagctcagtcccagttgagagacaagtgccttctgcatttttccatgctggctcagatgtgacactaaggacagaaagagcccagttcccaagcttcactggagcctctgggcttcttgctatgtcagccaatcacggggatcccaagacggtaaatgttaggacgtggacatgtgagcattaggggctaggccagagccggccactgtttcaacccaaaagatcccaaggatttcaatcaggagcactttgcagaagtaacctgaggcccagagacaaggtaagggggcttcccccggatgcctcgggccctgcggcattcccctactccactctacttccaggaggtgcaaaagaaaaacaggttgaacctaatcctgatttaaacattagtatcacacaaaaatcaaaacgacaccattccaggcaacgaagacaatatcatcaggttttgtagattagcacaaccctctctcatttctggattaaaaattatctcacgctttcagaaagttcactcttacagcaatctacgcactagcatgcgtgacagcaagggcagtgactccggcccagggtgaggtcagatgacacaccgaaagccatgccactgcttgaatctcctgagaatgcagctctgtctcctccaacatgaaaaaggaacaggaggagaataaaagcctcggctgaaagagaggtctgggagggccaccgggaagccacatacatcactgccacttcactaggtgccgcggagagcagctttggagagccgccctggctgatcatgaataatttgccagggaaccgggacagggtggggtggggaaggggtgaggaaggagggttgtgtgtgagaagcccggtcagctccccgggtcagctgcatctggagcggtttctctagcagacagtaaagaactcgattacatccagttaactgtgctctaaactgattatgcatgtgccgggctaatggattacattagcaagaggaaaaataacatgcaatcaatctccatttactacaggccacaccagggcctagagaaaaagtgactctcaaaccacctccaatccccaccccaaatccgtggaatgacgaaaccttgagagggagccttccttagtggcaagagaagtttgatcttagtcgtactgagggaccaaagggctgagggcgagcactggaatgacaatcccagcggtgtcatccaggagtgagcgggagagctccccgccccctgtggcgaagcccgggcaggcacagggccattcattacccaaggactaatgagactagactaatgacctttggctcctgacggaggcaattctgccctgaacctcaggctggtcactccggggatgtgccggccagatgcaccatttcaggatctctccttcaggtgctgggtccacgttctaccctgcatcccaacgctcaggacccttctacccacgccatctttttgagcaacagtttcctctaccttaaaaaaagaaatgagaaaaaagtcccaggatgacaggccagcagtgcagaaacatgcaaataaacctcgtctcttccaaccacacctcaccctgactctctgggtgtgatccgtggacacagtttggggaccaaaacaggatgttctcagcaaatccgccgagttccaggcccgtaagaagcaaagtcaagtgcctgacagactcttattcaagactccagccgcacggaggatgcagcatgagagttaatcgccaccgtgtgcattttagagtctaaagggcaattttttccttggatgcaagaggccagcttcatgccacctctaaacgaccttcatcaaagttgcatgcaaccttcaatggccacgccgagtcctttgtacaaattttactcagttgggtcctttggaaattcttttttccactggtttttccatcaggttttc

SEQ ID NO: 63728 - DNA, 590 bp, Homo sapiens
gcacctgggaaacaccattcaacgttgctggacagaggtacgtcctcgcaatgattccgccaaatggcacacacaggacaatggggaaaacctgtaagggtgaggtgagagctggccttgggcgaaggaaagtttcccacagcagttatctccaaaatgactctgaaacaaggagtgtgttttcctctcggcaggaagaaaaccactcggtgggctcaccatcggcagcttgctctggcacgaggctccggaactggcaccatgacaaaacaaacaaggattgccctttggaggctcactgatagggcaacacacacacacacacacacacacacacacacacagcctctcaccaacacgggcacagcgagttcttcagatatccctggcctgctggcataaagagcttttcaagcagtgggaagccaaagggacactcaacaaagcagtaatggccactgtaaggtagagacattggtaaaggcatgaaaaggggatgcctactgcaaaagcaaaatcgtacacggggtcttccccatgccttgactgggcaccctcgagagacccctttgggatgtgcgtactaagct

SEQ ID NO: 63729 - DNA, 532 bp, Homo sapiens
tttctaaggaactctttcccgagcattcacgacccagccctttctgctctgggatggaaagtgttactcagctacaaggcctcttgttaattgtgggtttttatttttatttcctattaccctctcacacgcctgatgagattattttaccggaactgacacagctggaagcagcaggcatacgtggagcctctgaggaggtgatgcaatttcattttcattgatcagaaatcagcagggcagtaagtgatgggaaattccattagaagaaaacttgcaggccataagcctcaacttcccagccacacccaggaccccttcccccactccctgaccgaggtctcgccttcctctgggctaagtccacactgcccagaggattggaagtgctctcctcccagaaaaataaaagaccagcgccacgctgctggcctaggagagcatcggccgggggtgggagacatcgttggactctgaaccaacaaggcacctcggtgcttctctatggattacagcaaagtcttccagggat

SEQ ID NO: 63730 - DNA, 790 bp, Homo sapiens
agaatccctggatccacagttccttttatcaattcacaaaagccaggccgagccaaccttacccaatatattccacaggtgggcccgcctgaagcctcgctgtgatgccaggcagccagcctgaagaactggaaagccagggcccgtgcacgctgggctcctgaagacaaaggaaacagaatggctcgggaaggccgtggcaccctgcccgcctccgtggtagcctggggccactggatcttgctgtctccgcagcacctgagaggtgtgagccaggcagccaaccacatcagaagctggctgccggctgccccaattgcacaacacctccaggggagccagctttccaggactgggttttacacaccatacgggcactggccatgttgacccagtcaaggcatggcaccttgaagaatggcccacgcaaagaccggccatatggacagaaggcatcctgccacagagcgatttctgaatcacctctatgcaaagaatagtcttctctcttacgcaaaggagatcccatcaccaccatctcatttctatcccaggctcctccagttctctttcaatcacaagccagactacccaaccacttaactctctaggcccagatatgacttaattctcccactcctgcatgtttgttgccacttccccattttgtgttaacaattaacctgaagtattatgttaacaattaacatgaattgtgttttggtttttaaggtcggagtaactaggattactcaataggatttaaatgttcaattttagcacacatgta

SEQ ID NO: 63731 - DNA, 2186 bp, Homo sapiens
gaacacacatacacttccttaccaaggtgcccaccggaaacccctgcctggacccctgcagccctcccagccacactgcagcatcgagggaacagcactttgcctccccaaacctgccctggctactgggtgaccccgctctgctatccccaccttcaccctgagatgcacagactgtctgctctaaagggcatgaacctggagattgtgagtcatcacgacgcgcaggaagcaacgtctcagtccaaaccctgagcccgttcctagagagccttctccgctctctcacccctcatcccacgtagagcaatcagggctcacccgcccccttccctttctctatggcttcttcaagatctcctcatccatctgcccacaactggaactgtttatttgtttagcccactggtaagaaaaatgagagagcgggctggcattcctggctgggcataaacacgtttttaaaaaatgtctgttccaactctgtctgggtcccgtactgagccctttaacctcctgcaagcaccatggagacattccatgggaactatcaccattcgttatcatcgctgaaagacaaaatccactgtaccctgcaacatctcacacagatccttcacattcttggtttgagagctgactatgcaagaaaaaggaagcaccatgactgtgggaaaggccactgtcaccaggacaagaggcaccagcaagagccctgcatcaattactctacagaggcaccgggaggcctgattttaattttttaaaaatacatttaatgaatcacatacgcaaactttacattggcagaacactcccttaggatcatgagcaaatttctgatcagatcaaatagcaaactgcccaaggaaaccacgaagaggggtgatgttgctatcacactatcaaaaagtaaagacatacttctgatttctcacaagaaatttcccaacaaaagctctctgtcttagattccgaaagaaaaacatcccccacacagagtgtaagggccaagaatggcctcaccatatgggacagcttctgaaatacacagaaaacgggcaacgcgggacccatgggacaaaccactgtgtagccagctgccccggccaggcccgtggtgttgactttggcagtgcttgtcgaccatgactcagcaatagtcatcgaaactgaaatcaagtggaactgatcagttcagacctccaatgttgagtttgactcaacgattcttcaatgcccctggtcttcctgaaattctccatttaaatatttactggtttaagggtaaagtcagggaggcacgggcatggttgttggaccttttctgtcttatcctattcaaatctggctgaactgagtaaaacgttatgcagcaggatgtcttcctatataatccacttcatcccgcccccccaatactcttccataggggttcaaatgcagatctgaaccaactgctcgatgatcccccaaagccatttagtctctgagcttttctcatctacaaaatgagatgtgtccccactctgcataccgtatagagcacctgcaaggattagttgaaagggtataggcccaaggactttgaaaaatgaagctccttaaattattttcccgatgtcctcagacagacttggcaccttacccttttactcataattaaagatttgagcagctaactcagaggcctaattgtgatgctaagtagacatatagtggctcaataaaaggaaagactgaaggggtttagagcagcgaggaaagacaatcgaggaaacggggctcgaggttctgggacgagggcctgctgagctggccagcccagccaaggccacagggatacagtccttccagtcactcaagttaaaaatcttgcagtcacccttgactctatgtcctgtcttgtcccatatctcccttcaaaatctatccagaggataagcacctggagcagatcgaatagcatccctcctagaactcatgtctaccaagaacctcagaacatggccttatttggaaatagagtctttgaagtaatttataactaaattgagctcagactagatcggggtaggccttaaatcaatgactgagccaggtgtggtggctcacacctataataccatcactttgggaggctgaggtgggtagatcacctgaggtcaggagtttgagaccagcct

SEQ ID NO: 63732 - DNA, 799 bp, Homo sapiens
ctaactgcagaaggcatttccgaaagcagcatgtgaagagtcctccttaaatacagcgttagggaaaatgacaccctctatcctccccactgcccccaccaccaagaaggaatttgggtctgtgttcagtaagaagaaatctggccagaaaggggttaatgcccttccaggctgggatctgataaatggctgtgcagaaagcaggttccctcactttgagatatgatgtcactaacctttattgatccactatcagagaactttgcttatctctctcctgtgatatactgcccctcctgtgctcaactagtgtttaatacactgccgggtgccttgcactcctcatcgctcagcactgcagagagaggctgccacggggaccatatttcacagagccgggccttcccagcacagacgcctcccagagtcaaggggagccagcacccacctcccacctcctcccaggccgccaggtcccagctgcaccgagacagtgggtcgggtcagggcagggcaggataggacacggcccctccgggaccctgcggcttctcctttttttgggggagtgtggggacagagcttcagtcccaagattccccttttttccaccatgaagacaactgtcagccatgttcatgtgggaaaacataagcacctccgagtcagacctcctatttagagaaatgagcttcctgtttttccccttccaaggtctcaagacctcagtccaccgggaggtggaaaacaccatccatcaaggtgccggacagttgttcgggagaagtcctgccaggaa

SEQ ID NO: 63733 - DNA, 2060 bp, Homo sapiens
agctccccaccccgcccctgcccaaggaaataaatgctctgacttttccaagagtgcgaaaaaactaaaattagagggtggacaagatgatctccaaaggtgccctccagctccaaaactctgattctccctttaattactccacaagcgcattcttcacattgtttcgaactgaccagcgacttctccagggctgaaaagggtgcatttttaggcggaggcacccaaacttctaaatgacaccagtaccacaagtattcagaaggcaggaactaatccaaaagcagactcaggaaaggaggagggaggggaggacagagggaagggaaggaaggaggaaggaagagctttactgtgtgcccagcagaatttaggcgctctcaccctaggtaggtggcaactggagtctgggagttcaagtgcatccagcctgcccttcccccacacgccccaagagaatgggaagttcagccaagactcgcagcacctgcccgcggctccaggccggctgcgcggacccggagggaggctgcactcacctggcacaccaagcctccgcgcacctccggagggaggcggcacttgcaggtccgggggccgcgccgccatgcgcaacaacgggaaattccagtggcacccgagccccgagctcacccaccccaggcggcatgctccccacctcccgctggccccaggactcggaggtggctctggtcaggagcagggggcccggagacaggggaggggagctcatggtggcggcagggctggcggtcggcccgtccccggagggaggtccccgggacgcggcggggattcacccacggggcgcggcgctggcgtccgggtccccggcctgcccgccgccgccgcctcctcctctgccgccgcccgcccggaatcgctttatgtaaatgaagcccaactcgcagtttgcagcgcgcaccgcccggggaaggggggcgggcggggcggggggccttcggggatccacattacacagcaacaaagcggaaggttaatttgaaactcacagccccgctgccgctcggctccccgggcaaagcctgacatctacagtcgtgccgggcgcaggccgggttgctcggcggcgaccgcgcccgcccgcccgcagggacccggggacgcacagggacgcgcgggacccgggcgctcagctgcgctcgctccgcttggggcgcgggccttggggcaggccgggggtcccgcgcacccgcctggggccaggaaccctcgccgctcggcctgcgccgccccgggaaccggccccggcgggaacaaagcccaggccctcccggaggcgctgacccctcgctcatcaaaggtcaggggccggcctagaatcgggcgagaagaaagggacgcgccctcggccactaaaaggagcctgaggcctccgaaccggagccatcgctccctgggccccgtccacgtcacagccaggccactcaagcatggggacaggagccaatgtggacaggaatttattggaaacacacacccatcctattaactgctttacagagcacttctgtttttcagttgcagaaacttataaaaacatccccctgctctccgttgagagtttaaggatagtttttgaggccagagaaagagaaaaggagagatcactagaaagataggaagaaaagaagtgggaagaaaaggagatgcagtctaccatgtaagcctccaggctccttagcctcaccttataaagccacatcaccgcagagatagcaaagatcgtgccctttcccagggagttcctaccgccagggtaagatttaaagcggccaccccagttggtcaaagtgattgctgggcgcctttctatctccccaagttcaccttttccagttggtcaaagcgattgctgggcgccttctatctccccaagtccacctttttccattctcatctgaaagccagccccaaagaaatctcaccggaagtcctctgtcctccctgtcagaatcccaccctcagtctgaatttactcccgattctcacagcacagaaaggcacctgcttttacc

SEQ ID NO: 63734 - DNA, 2637 bp, Homo sapiens
tctctgcagacaaatagaaactgtgaaatttaaagaatggatgaaaaaaagaagtctaaaacaaagaggttaaaaaaataggacaaatgtttttgcttttctgtctccccggagcaattgtgtggggaagtctgcattgacaataaccatgagaaggccatctaaaggcgatgcgtacacaaggggactccttccctgctgcctttggtctgggagaaaaagtaccttagctccgttctccagaaacaaaaggccagggccacggaaggggggagaggtgacaggggctttcacatggagccaagtgtcaatgctggttcatttttcacccgtcttacttggaaagcggctcagggaacttcctaatgactgctttttccctctctccctattatttctaaacctaaaagaacaaaacaataattttttttttaacctaaaacccatcattctattagaggaaagcctttggggcctatgcagtcagattttcctctttcctttcctcatcctgcttttcttttcttttttggaggggggttccaattgtagatcacatggaaataagagacactggacactatagtcatttttagtgacaccagaacggcctttatatctacgaaaaggcaggaaacggggagaaacacacatgcacaaacaacccaacagggatggaaggcggtggtggggaggctgcgggggcaaggccttgaaacactttctttttttcacagcatgaggtccactaatgccagcttcagatttgcaactgaatcaaagtctccgagtcgtcattacaaggtttttcggtgggtgggggcatggagaagtggacaataaggatgtattaaagacacagacaaggtgtggcaggggcaaagtggggggaggtgttacaaagaaaggaagctgagatgaatcactgcgtgccatgaaaataccagggcgagtggatgtcggagtgtttaaccagatttgaagctggaagcatcttccccagcgggcaaaccctaggacgaggcacagccacgcgaccctcagcctttgaacccagacctggcagcttaggagcacactcccccttccccaggcagccacaggctctgagctgaaaggcaaggcgggggtagggataagagggccctgcaaagaagcacaatcaacaactcaaatatgaacggaaatgacgtcagcaaagtgaaggacctgtttactgcagatcaaaacaaaacaaacttccaaaccttttgtgtacacaagaaaactctataaaaagccttcctaaaatgtcaccagggtcgacacatcagcagccccacaagaaaacgcatgacagttaccatggagggaggggggaggaaaggggctgaagggaagatgatctggggggctggggggaggagtgataaaaccagaaggagcccaaaacccagttactactgccccctctgctgatccttaatatttattggtgtttataatctaaaagccatgctccacgtttcacttaatacaaggccagacagtgttgtctaatgaggtagcattacaatcagcttgtaatactgaatttttaatgctgccaaggattctgttacataataatatgaaaaacagaagctgaaagtgggctcgcaggggacaggacattcgaggttccaggcaggcgagcgccaccagcccggttcccctcccccacacccgcccccctactttctgacgtgcaatcaaccctccatcccgatacaggaggtcggtatggaaaccaggaggattttttttttttttttttttttttttaggaaatccacacttttcattattattgttattatactctcatccgaagtttatagctcaagagtttgaattctagcttttctggggttaaaggtctaaaatgaaaattaatttttttggaagaggtggcgaagagacaatacaggggaagagaggggtagcttattttaagcaaaccaagaaatttgggagaaaaatcacagagggagaaagaacttggtgggggagggaatagatgtctgccgaccatattcacagctgccgcactcagtttacattggtgtaatttaaaggcatatatatagccgccgttgctcctctctgtaataccccaagactgtaaatctataaccactgcaatgatttagtgattaaaaacatgataacatattgtgtaactgcaaaccacagaacccctgccaactctctctctctaagataaaggggaaaaaaatacagaaaatgtgttgcttgcagccatcttcctaaacccaaaagattttaataaaagaacctatacagcagacgaattggaaaggggtgagtgaattctgtgtgaagccagcaaagggagagaaaaaaaaaaaaggcagctttatgtgggattcttttccttgtactaacaaattacgacctaaacatgccttttcttttctctctctttttttttttaatagtttgttgtaactggaataactggtcttgtgcactgtcttgcatattcaaagctgctttgtaaccggatctagagacccaaccttatttgcctgaactcaatagggtttttttctccccctcctcccgggttttgttttggattcggtattgtgggtt

SEQ ID NO: 63735 - DNA, 4355 bp, Homo sapiens
ctgggagcctatgtctatgcaggcataggctctggtgcctttaaaccacagaccaaacacctgaaagggggaggcacaatttgtacaatggcaggaggagcctaaaatatacaccaaaaaataaaatcaaagcagctgtaggggttttggcctctgagcagctgacctgaccccgttctgtatattcttttatttccccattgcaggattcctgcaccttgggtcagattcaaactcaatgtgaccctgaggagaaggcagtcacagagtcctgaaaagctgctccatatttaataggggtgggggaagtaagtgcatatgcatccagactcccccagtgaagacacccacacggtgcagacgtacgcgcgcgcgcgcgcgcgcgcacacacacacacacacacacacatacacacacacacacgtcaggactgccaggccatgggaccagctccaccccagttttcttggcccacaccactgagagcctgaactctctttgcgggccccccaaatcctcatacctacaactctacacacacacacacacacacacacacgcagagaacaccactcctccagagactttgtatgtttaaaaagtccacagatctgaatcgcctcctctctggaccggagcagggcagtttattcagagaaatcaataggaaagagcatttgcaaatatttatataagccctgtgcgtttcagcattaagtaattaaaaactaaaacccgaggagggggaagggagacacacagacagaggaaggctgctggcctagagtaggttttcctgcccacacctcatcttcccaaaccgcagtcttttcaaaactgactccgtgtacactttttacgaaatcctcttcgtacaccatttgctagactatttcaaaatcatctccaaatatggattcacctaccaccaagctttcaagactgactgtgtctgtattctatctctcttctcatacacacacagcaactcatacttttgacactgcgtcaatctctagtatattctcttttattttcctatctctaatatacctgcactagttaaaaaaaaaacaacaaacctaacattgtaagataagaagagggccccccaagtgcccattcaagaagcaaactcccaacccctaggtctcctgaataccccccactcccctcaacccacaggatgtctacactttgggggttcagctcctgaaacccccacatgtaaacagatttggaaaaaaaaacaacttcagcaaaatggagttttagaatgagctactatggagtggacttccctatattgttccggagggcagggcagtaaattctggttgttctccctctaaatcctctctaagaagccaagcaaggcgctggagcacccacgctgcagatattgtagaaatttacagtaaatgtaggtacacgattgcagcacgctgccctattgattatgcagattgtgatcaatcttctcccctcgcccactgcccaagcctctttcggaggacctccaaataagttggtctgcaactagctattctcccaaagtagggaggaaaaaaagtaattttttaaaaaacataataaatcctcaattgtccccactgaaagggctcgagtcttttttaaattccaaagtgaatttatgttctgtaatttgcattacagccaagcgatcaccgtctgtcatattcttcaaaggtacttaacaaactgccttttaaaagtcactagaactggaggccagaaaaaggcaatcagcatgctccgtccatacagtgcttagatcaagtttcaataattgagaccaataaaaattgtcatatttaccctacttgaaagcaacaagggggaaaagttaagactgggtgccttttgaaagcgcttgtaatcaaagaatttgccacagtccaaagaatagcacaacattgaacaaaagtcagattctgagcaacagcttcactcgcaaagtgatatatacatattttaattcaatagttatacaagaaccctccgagtactgagtccatacacaacttaattatatacactgcatgaaatacacttagatctactctccaatagatatgcaaaaagacggacattaaaatgcataatgtaaaattcaggaacacggtttttgcatcgagtggagccgggcgaggggtgagagtggggaacccaacgtaaacaatcccagattcgcgagagcaaaaaaaaaaaaaaagaagaagaagaagaaagaaaagaaaaagaaaaaaggcatcctcggatgtctctgagctcagctggcggaagaaggccggccgggcgaggtctggccctggccagcggcgcagccccgagcccccgggagcccctagtgtccagggcagagtcccctctgggcgctcgcggcgctgccagtggggcagggcggagagcgcacaggtagaggatcgcgcggccgcctcgccccctccgggaccccgtggctccgaacgggctcccgcgtcgccggcaagtcgagccccagcgcggaaggcgctcgcccggccagcggtggcggccgcggcagcagcagtggctgcgaccgcggcgactgctccgggccgggtgcgcgccccgcgcggctgctcagcccggggccccggcgcctctcggggtggggcaaagttgggggccgggagcggcgggggcgggggcactcggcaccgcggacccccccatactccccccaccgccggccgccgcctttgtctccgagctggtaccccggccgccctcccgccctcggcccgcgccccggccggccctgcctggcggcgcctccaaactcgccgcgcgggcctcgccccgggcgcctccaccctcccgggggtcgccggcggccggcggcggcggcgcggggccggggaggagggggcggcccgggctcggcggcggcggcggcggcagcggcgggaggaggaggaagaagaagagaaagagaaagtttggcgtagggggaaggcgagcgggacgcagcgagcgagcagggcgcgggcgcggggagcgcgggcggcggcggccgggcgcgagagccgggagggggcaggacgagccccatgcaaagcagcccgggcgccccgaggagccccgcgtccgggcggtggcggcgggaggaggaggaggagcaggcggcggcggcggcgggaaaaaaaaaagagggaaaagttgccacttacgcggttgcttctccggcggcggcggctgcagcggcgctgctggcgacggcggcggcggcgggagctggcggcgcttttaatcccgaaaagaggcgctcgggccgcggagcccatcaaggcagcagcggcggctggcgggggtcggcggcggcggaggacgcgctgctggcggcggcggcggcggcggcggcggcggcggagctggagcgcgctcggcggagcccggggcgggaggcggccgcagccggggagccggagccgccgccgccgctgccgccgagcagcatggttggcggggagtttacagcccccggagcgggcaggggccacggaagagaagcggcggcggcggcggcagcggctctaggctgtaattgggatgcaaagcaggcggcggcggcggctgcggccgggaggaggaggaggaggaggcggcggcggtggcggctgcagcggtcggaggggacgcgctggaagtgggagctgatgagtgaaaagaaaaaaaagtctttggatctttattctgctaattagtttcctgcaaaaaatggctgtgattaattcagtgcgcatgtgcttcattacccaggcacgacgggaagggctaattagccaccttctggatcaataagattcagcaaaaaagaaaagggggaggtggagggaggcagaggggaggaagggaggaaaaaaaaaaaaaaacaggggaaagtgatgagcagggcaaggagagcaggaagagaggatgggagaagagcctagaagagggagagaggctccaaaagtttatgcatgtattaaaaacacacacacacacacacacgacacacacacgagcgcgcgcacacacacacacacacacacacacgcacacacacaccgagaagtggaatgcataggagcaacaataggaacctggctaagaatctttttaagattttttttttcctttcttcttcccccccttctcttttctttcttattattttcccctttctctctctctctctctctctctctctctctctctctctaagcaaacgcagcaatgtttaaattaactaggaaaagagcatctccaaagaatgggggcattagtggagggggacagcttagagtaaaggtttaagtgaaagagc

SEQ ID NO: 63736 - DNA, 1986 bp, Homo sapiens
caatccaaaattgttcgaagagtgatctaaatgagatatttcatcatggacgcaaaagccttatttccaggcatttgaagaaagatccatacacttcttcctcccactaccattttggattctagagctttccaggtggaaaaattacctgcttcattcagtttgctttcagataaagtttccagaggtccctttcccattttaaagtgccccgaactcctgccatgttttgcttgagaatcctttcataccatttttaaagaacactgcttgaaagtcattgtaccttttttcaacttcttttctgttgtggggtctccattccttcctggggcaccagggtcacacactgaactgtatcaaactcttttaatgtattctcattgaatctgttagcattttctgtttcctaatgttgataattattgcatctgatcctttcactctaaactgcggccgtgcaattcatccttaatctagatccatctgagccccttccaaagaagacacaaagataagctatccctggcccaagacactcatagcatctgagcttagattcacatttgtccccacctctattatttttttttaatcaaaatgtttccaaaccccttgagctaattataaaagcgaatagcttttcctctccgaatcatattccttgacttgtaagaatgcaattccactctgagaccaccttgtcgcagacgtgaaaacctgcttgccgaggacgcagcagagaggaaagggtgaagcgggattcgtctcccgccctccctcggcaggcactgcctttatggagtctatttccagtctgtttacctggcaaggaccacgtgaccaatccagaaggaaatgctgacatcattgtctctctctctctctctctcgcacatgtgagcctccctccctccccaggccgcctgcattccggtatccatcctctctgcctctctccagcgcccggtcccctcccccaccactcacgccttccaccacttatttctctgtctttctcatgtcacactttcctttgttttcttttccccttgcgggctggttcctagaccgtcttgcgcgcgcgcgcgcgcgcgcgcgcacacacacacacacacacacacacacacacacatctgggtgcccttttctttctccctcccctaccccgccccccaaccctcccccccgccccccgcttttcagttttttcagatctgtggccattgagccctcactcttttaaaaacacctttcctctttctctctagatttgagatttctaaattaaaaaaaaaaaaaaaagtctggaggcctaaaaagtcttctgggccaggggtagggggaggagggccaggcaaggctgcggagtccagccattcaatttcctgctccactgagcttcgagatttcggtgttgggggtttggtcaaacatgctttctttctttatttatgtacagcttctcttcttctagtctccattccacgttttcccaccctgctgctgaccaggctcccctgccttccccactgccagaccacaggtcccagcagctcctggccttgagcggagggagggagggagggagcacgtgcaactcgctcctggtcttttctctgctgctgctgctgctgctgccgccgccgccgccgccgccgatactgctgctcattctatcaggggctggggaggctgctcagcatcctcccagcctgagacccggggagctgggaaagccaggatgcagagaggaggggaggagtggcagtccatgcaggtgcctcctgcctgttcaaaggcctatttataggaagaaccagcaggcagggctctggggtttggctgctcctgggcagctttcttggtgcacgtgggcacagagccagagcatgcagtttagaggaaatgtttaataaagacatgggagcctcaaagtgtttatttattctcacagaaaggtggagatagggtgtgcctggaaac

SEQ ID NO: 63737 - DNA, 876 bp, Homo sapiens
tgcccttgttagaattcataaatgtggccaaaacctgggctagactcaatatttctgagcccttgaaactctctagaatgaacaccattaaaagaatgtgttcattttgaatcacccatctcttagttatttcctaaccatctctttctgaaattaactgttggccaaaatagaataccaatcaaaagccacatggaagagaaatatgaagcctgagaagaaaatatgaacctcacccagggtgaatagctcaaagagtttctgtactaaggcagcccagccatatggccagtttggcccagaatcaaaatcaaagttgtaaaaccatcgctatggcaggggaagatgttcgggctgctggagtcgaaatgactacactgtaatgctgagactgggccaaccagatggtgctgagggaaccagacaggaattccacagcaggaagatggacttcggccccagtctagctttccaggctcacctctctgctaccctctgctccagccacactccactgctcgttggccttctttcatgtgatgcacttttcacatctctttgcctttgattttgcaggtccttctctctggaacgaccacctcctttgctctcctccacccccatcaaagtcatgaccatcccacccaccttactgtgcttttatccccagccctcctgcacactctgaactacctggggtgccacaaggcttcatctttctttctttcttttttttttttttttttttgcctccacgccttgacataacttttttttttctttttcgttcctatcttctaccctcttcttgatcttcccagcctagtcttctaaatttagctgaagcatcacctcctcctggaagccttccctgat

SEQ ID NO: 63738 - DNA, 1074 bp, Homo sapiens
aatctaatgtcactgctcttgtgacaggaggcggagcccagtggtaatgcgagtgacggggaatggctgtaaatacagatgaagctttgcttgctcacctgccactcacctcctgctgtgtgacctggttcctaacaggccatggactggtaccagtccctgagggaaccctgctgtcttgggagctctataccccttgtatcaggaaccttccaccttgcaaggatatagtgcagattaaacacagcaaagagcataaatagcctagcacaacacttggatggggagctgttgctagttgaaccttcacaataacctcagcagggtagtcacggctttcctcattttaaagaggttgaaagtgctacaaaaggagttaggcaacttgcccatagtcgttgcatgagtagactgctgagtttggatttcaatccatgcttatctgagtctgtattaaccattaacttacaagggagcctaatcttactactactaaattgttttatgaccccaggaaggtgatttcctctctgggctgcagtgtttattgtggggtaagacactagcaagtggaataacgagtgtgggctgctcagagattcagagtcctaggactccaagtgaccctgattgatggtctggaccatactcttgagtgaagggctgagtcccaaaatgtaggtatctaatgcaatttcagaggcctctcgagaaagggtatatctaacccaccttgagatctcacagggttgttactagaaataactaataaaaaagcctaggacatgtccaagtgccacagtgacagatatgactatacataaattagtcttgcagaaagctacttgcctggggtcatcataaatttctgatggcgcaacacaagactgattgtatttacttttgctctctgttgggttcagaagtatgataggccagtaaaacgatttagttagctggtaaattatctgcaagattgattaaaaataggaagcgagcaattggcaaattgtcaatgcacagaaaaaagaatcctcaataacgagatccagagattaaattaatttaacatgg

SEQ ID NO: 63739 - DNA, 1413 bp, Homo sapiens
tattcttttctctctgtgattaccacttctttgcatatttcttctggagctctctacataggctccaaagccctgccttggaggtaaatccttagcctcgatgagtaggcagcaagcccctcttgcacacaacaaagacttctatttttttttctatcttttgggcgacacgataaaaaataaccctgtatttatgcaaattgcaaagtagcgtgtgataatgaaaacaaaacagtgctggcccgcagccaagacatggcgctgacgggagctccccgaccatttggctcttgattcttcggggaaagcagctgtagagaaatgagaatacaggaccccctcctcacactcgcacaccctggttcgcacgcattccggtacccgtcacctcggagccagcgagacctgggatccaaatgcggttctgcctcctccggccgtggagcactgcagtgtcgtcctccacgagcctccctgcccctgctcctgattccctttcaggaatttacaaacattttccccagatcaatatccgtattgattattcattgtgagtgagtcgtgtgtctttggtgatccagcttgcagaggtagcaggcaaaggctgctgcgggggaaaaaaataacagaaggcgagagggacccagctcttgctgggtctgcggctgtcggcaacacagaagggaagagaaaaagagaaaagcacctcaaaaccaaggaatggacacgggtggaagagaaagagggagcaatagcaagaaaaaaggaatcgatgactggacatctggtcccagggaatctcgatggcttggaggaaacccccatcttgggtctgctgttacgtgcaggacgcaatggactttgctctgggagtgcaaagtgactcacagttttggtatctcctacgtaagagctttggggggattccttggcttgctgacaggcaaggaagacagcggcagcagtgaggtaaaacacgattacttccaactgccttgcggaggaggcgcagtcgtgcggtgtgacttggacagcttgctgctctctgatggcacgcggagggagaataattaaaaaggccagcatcacttactaagtgagtaaacacagagccgttccaatcgtgctctccagctaatgagaagctgtaatttcttatacttcaaggcaagatgagacagtgatgggttcagtggagggtgtgtttgcgtggatatgggggtggggggtagtggtggtggtagagttagatcgactaattgttggcaatgtttaagaaagggattactggaaaagacagtgaaatgatgacaggaaaacatcttggaccagagccaaaaaaaaaaaaaaaaaaaatcgaggcaaatcaagtctgcagctcggagaaaacacccgtcgctccggtgggaagct

SEQ ID NO: 63740 - DNA, 899 bp, Homo sapiens
gctgatgggaggagccatgctggtgggaggagccagctggagtcagctttgctgcagttttcttcttgccagggctagtttctatgctgcctaacttggtgctggatacagttctcagaattccatcacccttgaactctgaaatggtgggggtttttttgtttgttttttgtgaatgctaattttctacccaggactcttggaataagctgagatgcattgaccacgcagtttggagcaaagtggtttcacccgttcccatctacctgtcgggcatttggtacttttgagaaatgctttagaagaggaatgaggaaatctgtgtcatcgcctggaaattctggtccatgacctcaacagccctcctggaatttccctggccagttttctgtcctaaatgcagatcacctacattaatagaagattctgggcatttgtataaaaatggctgcagcgattcacaacgttttgtttggtgatagaggagagcagttcaggctctattctatagggacattaaggtatgctggtcaaagcataaagggtcctgaagggaaaagcaagcattcccaaggagaataaggaaaatgtaaacagctaccaggcgtgggtgccatctgatcgatttcatcttccagcaggaatttcccaaacctgatcactttctccattgctaacagagagtagaggaaacacagcaatggggaagtccgtttcgaaaacaaaccacttactctttacagcaaagggactgaagtttttcaggagaaagatctagctgctctcccattcatcaaaatgtggcagggcagtgattacaaatgcaaatgtaacctttaggtcctataggcaaagacaatgctcaccgcctgtatccagtgggcagttgcgactgggtt

SEQ ID NO: 63741 - DNA, 407 bp, Homo sapiens
tagctatctttaaagagaacaagcagatctgagtaatccaatttaggagagataagagcctgctgctagtactgtcctttaactggacaaacgccttcgttcaagtgtcaaccccaatccgggagaggtcaccgcactgggcctgctgcctaatatactcctgaattggctgagtggctttccgaacaaacacactggtccaacagaattgattttcaacaggccgtattggtccctaacgtaattatccagcagtgagtcagttcacggcggcccctgcatttaaacgctgctggtcagcctgggagaggggacagctgtgcagaggggccttctccaaacttcacttgggaacctgtttctttccccccagctgcttttctcccagcttcctaaataatttaaag

SEQ ID NO: 63742 - DNA, 470 bp, Homo sapiens
atctgtaagcaccttgatattggactccccagccttgagaactgtaagaaatatgtgtttactgtttaagccacccactctataatttgttacagatgctctagctgactaaaacaaaaaacaaaacaaaacaaaatccaaattgatttctcaaatgttattactgcccaggacaagccaaggagtttggacggcatcccatggatgactggggatgattgcaatgtttatgcagggcatgaacccatgcatgtttgctttgaaaaactatcatgtgtagcagtgggttgagaaagtctagagcagtggttctcaaaatgggatccccagaccgcgacatcagcatcacctgggaaacttgttagaagcaattctcaggctctacctcagacctgctgagtcagaaaccatgagtgggacccagatgctatttaacaagctctccaggtgattccgatgcgctgaaggcg

SEQ ID NO: 63743 - DNA, 585 bp, Homo sapiens
atgtcacctctaaaaagtccactctcttcttgcatgagatgacaggtcagaccagatgatctcaaaaatccctgtgcgtccaacatgctgggattacatggttctaatctactggcagaacttccctccctcattcttgcaggcctctgcacctggaaatttcctcctcggtaagtagagcagttgctacctaacgatcagaaatgcttcctaacgtccagaagccagatttcttgcctgcatggctaacaacagcaagcgcaatcctacctccccctgctggtgggggagggataacagggtcattactagctcgtctttcctttcacttccacctcctcaaataaaaatcaacttccaaatccgtgagtcagtctcgacacgtttatgtgccaagacactattatgaggaaattgcattcccaaatgaactttaaggacagctctcagcagcttaatttgcaaatgccagtattttccctctccataaagggctcaccttcttcggttcaacgtcaaatagaagcaaacagaaattttgcttctaagaagcacagattatttcgggggagtaaagttctctgc

SEQ ID NO: 63744 - DNA, 941 bp, Homo sapiens
gaaaaatccacttgtgtgcttaagtaataccattcttactaatgaacggacattgtaatttgagactgctatgacacaggattgtcagttctagagcagagggcatttaatatttttacagctgcttaagagtacttctattaaaaagactgctcaatataggcttcctgaacaagaaattgaccttgtatactccaataatatactataaaagacaaaatcatagaattcttgaagccagaagaaatgtcaataagctagtaattcaaattcccacctatgagtaggacttcatctaaagtcagttgttcagcaaatgtctaggaaggagttgtccgatattcccttggctggtccagtacttcatcagatctattgttagaaaagtcatccttgttattcctcagctttgtctctgaccctttaaacaccctaggtactttctggcattgaacaaaccaataaaagacaaggtaggccagacgaactcatgtctgtattaggataacccaagtgacccagggccacttgcctggaggtggccttttgccacctgtttccatagcctggttccatgctttggaatttggtctctgactctgatttcttcactcattcaatgatctatttggcctatgaaccttggatttctgatgaaatcttactatgcacactcctgatttcagcatcacctgctgctttacaggaaatagccaatccatcagccagcctctttctatggctctcccatcagccagcttagttttctctaaaacctttattcttttctttgcctgcccaccctgcagagctgattctgccccaccaaccagagacaggtactcagacaatttgtcagcttagtgtcattacttcagatgaattttgcattctctgattatatattctattaagatacagaatatttggagatcatcctt

SEQ ID NO: 63745 - DNA, 1753 bp, Homo sapiens
ctcactactctcttaaatatgtctctgctcaggacagcccagtagtctcccatccctggctcccctcacccgagtcaggcactattattatccctcttttacatagaggaaattgaggtgtagagagattaagtgacccatttaaaatatcctagccagtgaataggaaaagcaaaattcaaatctagatctgactcacagcccacgctcttttctattaccttcacagtcggagacgacagggagaaagattacagggaagggtgccagaggcatcaagaatttattctctaccatgttccagtttctccacactctcaaactcagtcctgctggaatgtttccaaaatgctacctagcttgaggaacctcttcagattctgatcatatcacttgagctgagcgatattccatgacaggcctaaataaccctcaaatgaaagagtaaatgcagcaaataacagagaaagtaagtgacggagctcacatttagggagcagctatataaccaagcattgagtggcagataatggatttaccaagaaccttaggttcacaaagaattcacaaattgcctagtgtttctgttatctgttgctgcacaacaaaccacccaaaacttagtgacttaaaacagcaacgatgacttattatttcacagaattttataacctgggctgggctcagctgggcagttcttctgctccacatgctatctactagggctggaatatccacagtggttttttcactctcatttcttgggaccctgcctgtaatggctggaatagctggggaatggccaagcattcctcttctattccatatggtctctcctgcaaagtagccagatttttctacatgactcagggttccaagagtgggcattccaagagaacaagctgcaacatgagagtgttactcaagcctctgtttgtattacacttgctaatatctcatgtgccagagcaagtcacatgcccaagctcacagtcaattttggaggagataaccagggcatgaaggccagatgcatgattcattggggcctggcacatttgatcatggtgagcatgtctgacagactgagcacactttctgacaccatatgggatattatacaggatttacatttattatttgcttatagtctatctcctctaacaagactataagttcaaagagggcaagagctttgttttgtttattcctatataaccagtatttagaagagtggcacagagttaaattgttaagtgagtattgagaaaaacatcagagatactggttatagaagactgccaaagtttacagtgcaaaagagtcattatctaagtggaaaaattaaagattctagaaacaccgttggcacagcttttgccctttccaggcctacagaggctgatggagaatgatgttgtagctgggcctctgagtagatgaaggcatctattatgaagaaatcaaatccattctatgcagctattaatgatgatgtagacctagatttgctataaggaagtgtgttaatgataaattattaactcaaaagagcaaatttcagaactttatgtagagttaaactccatttgcattttttttttttttgagatgaagtctcactctgtcacccaggctagagtgcagtggcaggatcttagctcactgcaacctccgcctcccaggttcaagtgattctcctacctcagcctcccaagcagctgggattacaggcaccgaccatcatgcatgg

SEQ ID NO: 63746 - DNA, 2433 bp, Homo sapiens
tcaataattcttagttttctttccccattaacataacccttatatctttctagttataattaagaatgaatggccaggcacagtagctcacacctgtaatcccagcagtttgggaggctgaggtgggaggattgcttgaggctgggggtttaagaccagcttggacaacatagtgagacaccaactgtaccaaaaaaaaaaatgaaaaaataaagatagcattgagtctcttcaattaattatgaatattaagcatatcctgccatttacttccttgcagatctagcagaaaatctgaaaataaagccaagttgcagacagaagacaaagataaattcacatgcagacaaattcaaactcctgactacattaatgtctctcattggtggccaaatttcagtctaatctttgctaatgtttttcaccacccacaaataagagagactgagtgtgtcccttgacatttggagatcaggaagtccaccttaaaaagacaagaggccaaaatgttgggaaaatcctctggtgataaagggaaagcaaaaattgtttaaaaacagaacaaaatataagtaaataattcaggttgcttaagtactgttttcgtttacagaaacagcaacttcaaatgagacgatataaacctgtatgatttttcttataatttgcctcctgcaaataagcttaagtctttgtctaccttagtcttctctttcctagctacatatcacaacatacttccttactgccttccttccgtcttttcttcaacgcttctgtaaattttgatttcaaaagcaacggcacaattgcgttcttctagccctagttacgcagtaatataacgacaggtggaaacctgcaggttgccacgttcattgcaaagtgtccacagtaaagataaaggagaaattcccccggcaatgaaaacgagaatgagataaattaccaaattacattaaaagcgtgctcttatgttagagatttaaagttcctctcagaaatcgcggaggattttgacctgaagcaaaagtgaacttcttccgggtggtagaaaagtaaactgtcaactatttactttgggggggtggcggggggagggtgctgggaaggaattgaggcgaaaagcctctgcaggtgacggtacaggccaataccaggaggtcaagtcgccggtgtcccttcggcccttaagtccagggaaacgcacggcgagggacgaggggcgattcccgcctttctccagccctttctccgcccacaaatgacggcggtggcgaagatccgggcccgccgcgcgaggcactctgggagcggaagaaggaggccgcgcgagggctgacgaaccggaagaagaggaactgggcctgaaagggtaccggtgaccgctactgctgccggtgtttgcgtgtggcagggagccaggcctggcgagcggggtgtgtcgcgatgccggagctggcagtgcagaaggtggtggtccaccccctggtgctgctcagtgtggtggatcatttcaaccggtgagcgagcgccctatagctgggccggcggcgcagccgctgctgagtcacgggcacgctggagatggcgcggcggccgcggacgagctggggacgcagatagggcggctggtgacccttacttgttcacgagtccagaccagcgtcggctcacgatgccggagtcatccagcctcccgcccctgccccagccgccgccacttcggggccttggctgcctgttccgtttagcctgtttgttttacagagttccctttccgagttcgttttgccgaagttcgttttaccgaaatctggatgatgctgggggtcgggagatgcggctagctttagttggccctgacccccgcccccaagctcgtgtctgtcacttcgttttgaagttcgttttgccgaaatctggataaagccagggtggggcggaggcgggctagcttcatttggctctgacccccgaccccagggtcgtatcttcatttgactcagttgatttcactgaaatgtgaataatgcaaagtgactgatgtctggatgatgcttgggtggggcggagtgggctagctccatttagccccgccccaaggctatgtttatcttcgtttgaccgaattggtttcaccgaaatatggatgatgctggagtggggtgcagggtggctaccttcatttggccctgaccccggccccagggtcgtatttatgtttatcctcgtttaaccaagttgatttcaccgaaatgtgaatgatgcaaagtgaatgatgcctggatgatgccggagtggggctaagggggctagcttcaatttggccctgacccccgcccccagggtcgtatctatgtttgtcttcatttgaccgagttcctgttatcgaaatctggatgatgctcagcaccccgaagggcttcctgg

SEQ ID NO: 63747 - DNA, 2114 bp, Homo sapiens
tctctactggtaccagcaaactaccaggtatttgtctctttacatttatcttttaattcacataataattgtgaagcatttctcagcctcagaaaatcttaaaagaagctataggaataaactgctcaatagcaaaaatgaaagccaaaagacagtggaataaaaaaaaatgcactgaaagaaaaatatattccaacctaaaattctatactgtgatggattttttcaaggccacaaatcccacctgcccccctttctgaaagcacagccctttgaatgtgacattgttgctcatgccatcaacagatggagtcaggccaggcacagtggctctcatctgtaatcacaacactttgggacgccagggcaggagcatcacttgagatcaggagtttgagaccagcttggtcaacatagtgggaccctgtctctataaaaaatcagccaggtgtggtggcacacgcctacagacacagccacttggaaggctgaagtgggagaatgggttgagcccaggagtttgaggctacagcaagctacaatcatgccactgcattccagcttggatgacagcataagaccctgtccgcctaccacccgctggcccctcaaaaaacagatggattataattccttcactctttgtgtttttttggtctttttttttttttaaccacacctcacttggcactttaaccttttgaatctgggcatggctacctgacctgctttggtcagtaaaacattagcaaatgtgacatcagaggactgaaaagtgcttgtacactggagcttgtcctttccgtattgatttttggacccagccatgtgaaggagtgagacagcaagctagatgatgagacatggagcccagttgcttttttcacccaacaaactaccagacatgtaagtgaggccatctgggtctgtccaacccacagctgacctgccaagtgactacagatacatgaatgagcccaactataaccatgtataccagagagataagggatcccattgagtactgcccaaaaatctgacccacagattcaggggcaaatatgtagttgttgttcttgagtcattaagtttgggaccgggtacagaggctcacgcaagtaatccatgttttgggcaactgaggtgggaagatcacttgagcccagaagctagagaccagactgggcaacattcagagaccttgtctttataaataataataaaattagccaggtgccagctactttcaggagactgaggcaagagaatcgctcgtacccaggaggcagaggctgcagagagctgagatacagccaccgcactccagcctgggcaacagagcaaggctccatctcaaaaaggaaaaaaaaaaaaaaattagccgggcacagtggtgcacgcctgtggtcccagctatttgggaggctgatgtgggaagatagcctaagcccagaagatcgaggtgtgactgcaccactgcactgaagcctgggtgacagagaccctgtctcaaaaaataaaaataaaaatactaaaaagattagaaaacaaaatgaaagtaactaacaataaaatgcaaaagaagtttggggtggtgtgttcccagcatgtgatactgtggaatagatacttggtctctgtgcctgtttcctgacgcacagatctaactaaaagccttggagtctcagaagagataactgtcttttgcatgctactgaatgaattgaatggtggtgttgggggtggtggtggcgcttaaaaagctaatttaggatggggctagtcactggaaaaaccaaggcatgattggagggttgggactttcaggcccacccccaatctccagggaggggaaaggggctgaaggttaagttgatcaccaaagggcaatgatgcctaagtaatgaagactccataaaaaccccaaaggggctgggcacggtggctcgcacctgtaatcccagcacttggggaggccgaaatgggtggatcacctgaggtcaggagttcaagacaagcctggccaacacagtgaaaccccgtctctaccaaagatataaaatttagctgggcatggtgacacccacctgtaatcccagctactcgcaaggctg

SEQ ID NO: 63748 - DNA, 2080 bp, Homo sapiens
aattgtcattatggtctgcagcattaaacctagattataaattatcaatgtcacttgattataaattatcaatgtcactcaactgaatcacaccaagcaacgacaaatgtagatttcattaagagatactgttaaaatcacattcagacctcagaaaggcaagatcccataacccagtcacaaacacagcttcaaacgcttccccaacttttcaagctttggggcgccaagtcactgggagttaacagcttaaacatggggttcaatacaactgaccaaaggaagtgaagaaaacaaagcatacattaatttcagcaccaaaaatatggatttgcgaattacatctactgctaataaacagatcattctttacagcctaagtacgccaggcatttttttatgtttaaatggcttgccacaaattgtcctagtcgaaactgatggcaaaatcctaaactgatcttcggcgaggagacactctgcatagagcatcacacaaaagacaggagcgaacagacacgctctgggcctcggcggattgcggccaggagcccaggttttcgtcccagaccccggcaacagggagggaaataagggcgggggaaagaaggagtgggagtggtatccttttccctgaaagcgcctgggagtgaggagcaaagagggaaggagcgagtgcagcacagaggaagcaaggaaagcagccgaccggcgtcagcggcttccaaggccggcaacaccctcgggcccgcaccaggcctggccctcccggcttcgtcccacctcctcacctccctcacatcctgcaggcactcgagcaccgccaggttgttgctccaggtgtgcttagggcacacgcgggtcacgtcctccctgcaggactcttcctccgccagcttccagcccccaccagcccccgctcctccccgccgggccggaggcccacccgccgggaaaggcggctgcggcggctgaggctgctgttgctgttgctgctgctgctgttgctgctgaagctgcgatgactgaggcagctggggcagctgctgacccgccgggccgccgcctccggcctgccctacgaaggacacaaagttggccccgggaccctggccctggctgtggacgccctggccggggagtttctcggccccggccgcgaatagcagcagcagatgcagcgccgccgacaagcggaacatcctccgtacacgtccacacgccgccatcttgagtccgcggcgagctcgacgcactcgccggcgccgcgtatttaaatgagggggtggagacgctgggcgtggcagcgtggccctgccgagccccgccccgccggcgccgacccgcgaacccagagtggggcgaaggaggaggccgtgctggaaaccgcacacaccctggaccggcgggcgggagagcggcgctccttacccgggggggttgctggggtttcttaaaaagcccgggcagggcggcctactctaattccatttgctgtcacaaaaaaaaaaatcaagggaattggggttgccacaaccaaaatggccggtagaatatgtcgccggttcaatgacttggaaaacaaaaactttatatgtagaggtgaactttgcacaaccaggtgtattacggaatcggaaagcctctccttgtatcgctccctccttccttccttccttccatctgcctcagaagtctttcttagccaaagagagagacagcattgaatagggttaagagcataagttctggggtaagaaaaaaaattaaggttataatccttgctctggcagggtacgcaagagctcaaatgtaaagtaccattggcaagattcgaaataataatttaagtgcctggcccacaacactgaactcaaaaagtcacagccagtattgttaataaactgggaagccgtttatgcatgaatcctgattttaagccagcatttagattcatgtttaaaggatgaaaaaataataataaaacacatctttgaggactcgggttaagtctgtgtgtcggtaactgttctcattgacctgcatgcaacaccgcaggcaccccacactagcatcccct

SEQ ID NO: 63749 - DNA, 2035 bp, Homo sapiens
attctgctgggaggcaaacaaaagcaagataacaaaataggacccccaggctttgtacaccagtcacaacaaatcacagtcttggagacagccgagctgtgggatgatgaagagccaaagggtctgaagtggtactgggatgtttctcagctcaaacaaaacttaaaaacatgagtagacccacccacaactagcagaagtgtgagcatttaatgactaactctgactatacatctgcctgactgttacaaatgtgtttaatacagttgttacctcagcatctgtttttagggctagcataaattatttgaaacccagatgtaccctgtcaactttggcctagttaaaacatcccttccctgagcagaggtttgaaatatagcccacttgtccctcccctccacccctaccccacccctaagggagcaggcctgtcctggatggctcccccttcttcccattggcccctgaagcatgctgccctcttctctgtgggatctgtcaagtaagctgattccgttatttcctgtgttttgtgcactgcctcctttgtgtctcacctgaccaacacacctgaacctaacttgtttcctagtcagggctcttctagagagtcactatctcaagggaaatgaactagacacagttcagacaagagccacaagggtacctgccagtacaaacaagtttcctgtgagagggacatctggtcatgggtcaggcaggcattaggccatctgccaggacagaggagtatcctgtgaaaggcaaactatgaacacccacaacgaactccctagtgtttggcaggacagggctagagtttatagccactctcctgacagagacctcaagaccaaattagaaagaaaaaacctagaacactgaccatcagtacagtttaccaggaatttagattcatgccgcttagcctagaaagaacctgtgaatgaagcacagtctgctgttatgcgttccacctctgattccagaggcagagatgttcagctggctgggcacacacagccactgttgtccatttcagtatgccagccgggctactacatggctgccctaatctgggcctttctctcaggggaagtaagaggcaggcagaagatacgaaagtgatctcaaggtggctcaatgacctagagctggcccccttgttccactactgttctaaactgtaggggctcctaagtggctaattcacttccaggagtacctggcagaatatgctccagtcctcacacgtaaggagcagggaggcaggctctgtgggggagcttggagccaccatactccctgtagtagcaagagctacaacacacctcgttagcctgtgagcggtaccacagccacccaaagggtaggatcaaaccctccttcccttttctctaccactgtgctcccaaataagctatgggagaccccagcactacttaccaggcctgtaggtcacaagacagtgccgggagctgttctctgtctgaaagtctatgcagccccctggctccaagggcagcacatgaggccaatgagaaaagtccattttctgttcccagaatgaagcatcctccaaggttccagccagcaccccaccatatggaaatgcagctgaggcagctctgggcatgtatgacagggagaccagtgggcatctgaaaggaaagtaaggaaactgtatctcacactccaaaactcggacggctccagaccccactaccagacctcaagcacattcccacctctgcagaggaggttaaacgcctttagtcactatcctctgatatctgataaaaattatcaaccctctctgtagaaacaaaaggacatacatataatattctgcaactaatttcaggtgagataccagatgctctaaaagaaaaggaaaaaaagaactaggaaatttaagggatacaagatcacaattactatgaagcttgactgatgtgaagcttctggaaatgggtttagccacataagaaaagtcagaaaagaaacaaagcttatatacataacaaaataa

SEQ ID NO: 63750 - DNA, 347 bp, Homo sapiens
gaatccaggaggcagaggttgcagtgagctgagatcaggccactgcactccagcctgcgcaaaagagtgagactccatctcaaaagaaaaaaaaaaaatcaacaaggtaacagaaatacacaccgagttaatcattaaggggaacaaggacaaatcaacaccagcacactatcaagcggactggaatggacacgttaagaaaaaaagaacagaacacattcccaatttggggaacattaggaaatagctatttttccaatttgttggttttatttgatgataaatctttttattaaaaacttagatgggataaaggaacattatataaccatgctaaagcaaagggg

SEQ ID NO: 63751 - DNA, 1206 bp, Homo sapiens
agatagacagattagatagatagatagatagatagatagatagatagatagattgattagatacatagatattaaatccctgttcttttactacatggggaaactttgggcgggtttcctaaactcggctcaacttgttctcctgtaaaacagggataatacaagtctttactccacagtttccgtgatgaaattaaaaatgaagttcttccatcaactttaaagtgatgaagtaatcggcgctcagagcgggcgcaggcaacgccgctgaggagcccgaggctaggctctcgggggaagggccgggcgacctcccaccccggccagggcaggccccgcagcagcgaactcggctccttcagtgatcgccccgagctctcgcctgcccagcccccacgcccagcaacccagatacgcgcgggggttcgggctccttagccccgaccactggcgccgccccgagggcccgaatcccctcaggccgccgggttccaagcccgcgtgcagcccacctcgtggggtgtctcctgaatcccaatccaggaatcaggcgtggggaggtttatcccgaagctagaggcccaaggcctgaggagaagcaacacccctcctcacctgaaaccagcaggccgcggccgggctcgcgagcccgccgaagactcggtagttacctcggccgcactccgaatgcacctacgccaactgccacttccggagccgctcaagctcccgccagagccgccggcaggcatgctcctattggacagaagccctacgctgtggccaatacccactcttcttcttcaatgggtcccccgatagctgaagcagcggtgctctcattggctggtagttcgtcctgacgaggcgggaccgcgcttgaggaagcctcctacaattggcaggaatctacgtccgtcaccttgcacccgccccggaaaaaatgggaggtttttttgttttttttttgtttggtttttttttttttttttagcgcgttttatttgaactttctggcgggagaaagttatatgatttctcggtccattttggaatggggatgatgatattaaaactgactcctgctgcttatccctaacgctttagtgaaggagttatctgtatccaaaggatagcagctaatcgaataatttcaaaatatttcaatattttgaatttcggagcctgtaaagaggcgtaggacag

SEQ ID NO: 63752 - DNA, 1721 bp, Homo sapiens
gagctatgattgtgccactgcgctccagcctgggcaacagaggaagactccatctctcaaaataaataaataaaaagaaaaaggggattatgttcatatgttacgatgagaaaacaggttactaattttaaaagtgaaaaatctttaaatggtaataacaatgcaaattcacctcttccctccaaaaaataaaaaataaaaataaaataaaataagtaaaggttatcaggcatttccctcttctctctctctcactctgtctctctctcacgccttcagcctgcaaacctgaagacttcctttttctgagaagacatcaggtaacttgttcccgtgcccctgccctccacgacccccactgctactgggcgtctcgctttggcggaaggtagtgcgagatccgagcaggcagctccaccatcagagctgaggaaatgaaaccaactcggtcctgagttccaggaactcggaccgggccaccctcacccctggttcttcccatcaccgtccaggaattcggctgcagcccctcggccccgccgcctcctgggaagaccccatgctcaccttcgcgcctcccgaggggtgtgcgtccaatctgtcccgtgcacagttccaaaaagctcgctcttccaccttctttcccacgaccgcctcctgcccaggcgagaagtttgcaaacgcgaggcccgcgggagttcccctgcgccccctttcctggtgcccgcaccctgcactctgctgactgtaccggacgccacacgtggctggcggcgacaaggcgccccgatccctacctgagggaaaccccggccactgcagctgcacttgagcagggtccctccactcagccacttggatggctgtttctgtccagtgccctccggaggccactgcctcaggtctgtgatgcctgcagagaatgctgcgacacttccccctccgacgtggctccagctgccaaccaccaggctcacggtgccctggctccctggagccgctttctaggcagctcggagccacggcccctcccttccttcctcctgtcctttccacactcttcctgccttccccaaagtcactgggtaactacgctgtacacgtcagtaccaagccttctttaggggctggggattcagaatagaataaggtcccagcaactattataaccaggacacagtatgagaaggactggaagtttagagaaaaactgaaagttggagagaagcttctggtgtttgcttctctgtgctggataatattggcggggtggggagggtacgagggaagagacaccaaagtgggaaaaaagtcacttcctcttctaaggtcattgcagaacatcctgttacagtgtgagtcaggttttcttaagattaactacatcttcagctagaaagtctaagtagtgttatgcatttactcaacagactatttgcctctaaaagaacagaactgggagctgggtgtggtggctcatgcctgtaattccagcactttgggaggcggaggtggccagatcacctgaggtcaggagttcaagaccatcctggccaacatggggaaaccctgtctctactaaaaatacaaaaattagccaggcgtggtggtgcatgcctgtaatcccagctactcgggagcctgagaggggagaatcgcttgaagccggccttggagattcatttcttcgccttgctattgttcttcgtctcctgcatcat

SEQ ID NO: 63753 - DNA, 624 bp, Homo sapiens
cattcatcttgtggcattctttatagataacatttattcattggagcctggtgtggtctttgggcaaaacacctaactgtaaagaaaactccagttgaaattttgcaaccattatggcttttttgaaagttagaactattcatatacatatttccaacttcctctcaaaaatggcagatgagtcaagaatgtaagtcaacagaacgggtaaattgggaaaggctagaattttgaaatcacagatacctgcttccaaaacagtccccgcgagggcagtaataatggagtagggctgcatgctgccaccagagggcagcagaggccgggaacaggtggagaggcaaggcccagttattcttaccgtctgagatctgatgcagacaagacaagcatttattgggctctgttacaagttggtcattgtgctgggcacaataaaaaatcacacaaagttcaaaggcagagatcagaggtcagagccaacgggggagtggaacagagcagaattaagagggctgttcttcagatcaactaaggaactcccaaagacagcatgtctggaaatacaaacacaataccagaaataaatatgatggctattttttggtctgttcttgaccatgg

SEQ ID NO: 63754 - DNA, 1888 bp, Homo sapiens
tcaggataaaaggcagttctttccaaggaaggcagttggcaactttatactgacatttaccaaaaaaggttctattttattattttttaattattttctttttatagatatagggtctctcactatgttgtccagtctggtcttgaactcctgtgctcaagtgatcctcctgcctctgcctcccaaagtgctacgattactggtgtgaggcaccatgcccgacctctattttacagtatttatgaatgcagaacaattacaacaacattctgtttttatgagcattaactacacataattgttcttttggctcaagctggttgatgtggggctcgatgatctatctgtaacaggaagtaaatcaaatgttcaccatgtcctggttctaaggttctacttcaaaaattacaaaaatcctgtttcttagagagatgctggctaaatagaaacagcacattgaaagcttcattcaactggaagtatcctgagtgacatgaagaaaccggaggagtccctgctctgtggatttctgtcctgctcctgggagacagggggaagggcagtgggtcatgcctcgagcggctccatcccccgcacagaggggccagggattctctctccagaattcctctgaatcatggaccagcaccagtcaagggctggaagagggggcaccctctctatggaggctgaggaaaagagggacaaaggggaagggggtcggcatggcctctttctatcctccttcctgcttctgctctcgggtcctagggccaccccagggagcaatgtcaggactgatatgcttctggcaaataagccccagactgactaagcaaggtgctttcctgggtggcttcattgggaccacacccctccttggcagaagcccaggttcttatcacaagatgggacacacctccaacatgggaggagactccaaggaaaaccagagccagcgtcacgcggtgtcagtagcaggaatactcctaggtacagggacacgtcctccggtgcattgttcattaatcgattttctcaagtctagttgtgagattctaggtctaaaaaccctccctacacacagctaagacaaagacccttctgaagaaggtctcccattcccacctggggcacgccaggactccaggaactgggtcctgccaggagcagctgtgccgcacgcatgccacacacgttgatctgggccacgttttccagactcccgccccggtgtttattttatagttgagccagctcacccttgaattccacaggcgaacaccatccatgaatcaggagtgtgtagaggtcattcctgggaactagggtacaaccccagctttaaaaggcttttagaaagtttcttggaaactttcacattcattatttaaaaggttctcctggtcctggaagcaagccaaagggtggtttttaaacactttaaaaaccaaaaagtgcctcaaatgaagatatgtgtgctttcttttttccagtatttggaaattattccagatgatgcctttttttttttttttttttgaaacaaggtctcagtctgttacccaggctggagggcagtggcatgatcttggctcactgcagcctcaacctcctgggctcaagcaatcctcacacctcagcctcccaagtagctgggatgatgggtgttcaccatcatgcccagctaatttttaatttttttgtagagatggggtcttgatctattgctcaggctgctcttgaactcccacgttcaagtgatcctcccacctcagcctcccaaatagctgggactataggtgtgcaccaccatgtccaccaaattttttattttttatagagacggggtcttgctatgttgcccaggctggtctcaaactcctaa

SEQ ID NO: 63755 - DNA, 582 bp, Homo sapiens
cgggctccttctttttggaacacccaaaaagaagtttcttatcaagaggcagggtggctcactcactgtgtatctggccttccagacaggcacctggcaaggaagaatattgaggtatttccgaggctggcggtaatcccagaactagaagagagcaagcaagatcatttgtgaaataaatgccattaaaaaattctactgaaataagcacagcctttgaactcattgcttctggtcctctaaagatacacttcaacaacatatttttagttcagctcctataaccacgcactgtgacagagacacaaagaaacctccctttctatttctaaaacattacaggagaatttctggactttatgaggaccactaaacgcggcaggtcactgtcaacaggtttgattacgaaatgacctttagagctgaaaattcagagtgacgtgtttgattttgtatcacgtttacatcttgcaggtaatttaagaacaagagctgaagtgtcctgactactcattacatttcagacatatatttagaacttttttttcccatttaatctttgtaacaaccatatatgttatt

SEQ ID NO: 63756 - DNA, 1300 bp, Homo sapiens
tgcttgaatcccggaggcggaggttgcagtgagccaagatggcaccactgcactccagcctgggcaacagagtgactctccatctcaaaaaaaataaattaaattaaattaaatagaaaattaaaaaataaaatctttaagccaatcttgtaagtacgaccatctcccttctacaggtgagaaaactgacgtgtacggagtgatgacagggtaggggctgcgggattcgaactcgggcaacacgtgcagtgtcactcctatccactacacggtattttccagtatgatggcattaagaaccacttaaccgcgtagacgctgcaacaggcactttgcaaacagtgtttcatcgaattcaccccaacagggttacgtccacgcagctgagacttagaaaagtcccgcgacttgccttaagtcgccacacgcggctagggcctcgggaagccgtcacgccctcgctccgtaccctgattgtgggaagcctcccctcagcactcacgatgcgcagtctctgcctcagtgtcacaaggcggaccccactcccctacccgcgtagggagccccgaaactccgtccatgctcgccccgattgcccccgatggtcgtcttccctcccccgacggggcctaagaggtcggctaagccccgcccacctcctcagtacggggcctagggtctccccgtagccccccgggacggaagcagccgcgtgggggaggggaagcggggaggacgcatgcccagagggctccactcggcctctagctcacctgggagtcacggaactctacaaccacgttttcgctgctccatcgcgccgccatctcccccgcccggccgccgcggccccaggacggcgccctcccaccccgccgtccccagtatcccgggaccgtgcgccccacacagccagagaatcagccccgacacgccccgtgccctggttgctcctgagctcaagccattggttgacccaagcataggctccgccccttcttcctgggtcctccaattgctacaccgcgcctgcaacaaacaggcacgccctcgctcacttccgtcacttggtttgagtcacccacgctcctcgcgattgcgggcacaccccctgccgcgagctctgccgggagttgtagtccaagctcgagcaagcgtgggtgacctgggaagggctcgcaggtttgggtttgggtgaggtgaggtgcctgttgtcctgactagctcctcgctggagtccccagcattcgtccagacccagtctcaaatcaaaatcaacgttcggggcgggtgcggtgac

SEQ ID NO: 63757 - DNA, 1411 bp, Homo sapiens
aggtttctctggagtccccttggcctgggggagggtggtccattctgtaacttgggggacttaggattttgcatctgaatcagaggctggggaccactgagggtcctttgtcaagtagatcccactttgccacagaggatttatcatgaaactgtgttttttcaggacacttgctagccaagcggcaggaaagcagggtacacagcaaacccagaaatccagggcctgggctgggctcttatcagcaactagccatgcaatttgaacatgatcctttatctttctagtcttctgtttgctcttctgcagaatttggagctagctgactactcagttcatttacatctgggaaccttggaccctggccctgagtcccagtaataatttccctctcttcatcaatcaacaaatatttatgaacatggtcctgtgctcagcctcccggccatgtgtatttggttactcattatcctgatttctctaagctgtctcctttcaagcaaaacaataaaatttaaagagctccgagagggcctgggaggaagtttctcactaaaaggcatttgtccacccccagtggggtgataggggtgctggggatgccctccaaagccatgggaaaccctcgccttcctctggctcacagaaacagggaggtggacgggagttccccactgcttctcaggagtaggccctcacaagccctttcccctattttctgaatagtgaaagtcccaggctttctataatagaatagatatgcactcgcatttccaaagggctttggcagcaaaaattttatcagctcttcctcctgactgttgtggtaagtggatcagtggtttattgttagtacaaaacaagataacaggacattttcttttcttttttttttttgagacagagtcgccctttgttgcccaggctggggtgcagtagcgcgatctccgctcacggcaacctctgcctcccgggttcaagcgattctcccgcctcagcctcccgagtagctgggattacaggcaactgacaccatgcctggctaatttttgtatttttactagagacagggtttcaccatgttggtcaggcatgagccgctgtgcccagccataacaggacattttctgagataggctaccattcggggtcccacagggcacctaagctgagtgcaatcacattgcacagagcaggggcttcacctttgcagtacaagatctcagctgttcagtggtgccagctatgagagaggtgacttataataatcagcacactagaatgtaaatcttaaggccaaataattaattcacaaaaagaaatacagctgttaagtagatctagtctttttcacccctttggaaagtatacagagaaaacaaaattgtcattggaagaattcctctgctgg

SEQ ID NO: 63758 - DNA, 2231 bp, Homo sapiens
gcatgtgcctgtaatcccagctactcgggaggctgaggcaggagaatcacttgaatccgggaggcggaggttgcggtgagccgaggttacgccacaccactccagcctgggtgacagggcgagattacgtctcaaaaacaaaaacaaaacaaaacaaaaaaaacagttgttcaataaatgaatgtgaatataggagaaagacggcttgaggtagcaaaggaacactcccttgcaaatgattcaggcttggtcaacaatacacctattgagtacccaccgtgtccttggcccgtggtgagggccgaaacacagcacatggtaaacaaaacagggctccagccttggacagaaggtttctataatcacttctagctgcgttgttctatttccatacccatatctattcactttttatggtacatctattgattctgaaaattacattttagctaaggaatctactcatttgcttaagcccaaaataggaagttatgatctagtgtcagcaaaacgccggattcacaagtgtccccatggcgctgtttacccccaaataactaaaccccgccaaatgttgagattccggacgtgaggggtgcttggatggggaacccccgaaagaatggacatcacgtccaccagagggtgctgtgggggcaaatttgtgccaggaggggagctcgaccggtgaccctcagagccaggtaggcgtaaggagtaaatctccttcttcccggtgtttccttcccaccccctcgaaccattgctgcccctcccccatacttggttccccctgaataatttgccactttcggggacttaagaagtgtttgcttttgaaagacatctggtttctgtggctaacgcccagtggtcaggccgcccaggtcacaggccggccgggggcgggcggtgggtggggactgctggggcgtcagcggcccaggcgccgcagggaccgcgaaagggttaacccggcggggggagggggagggggcgcgggccgcgcctgcgctctgccgccctccattgtctccacggcggcgaggagcgccggcgagcgcagcccgggaccgagcggggcggcgcggctggcggggccggcggcggctgaagcgagagcgcgacgcgacgcgaccgcggcttcccgagctgcgcctggccgcccagcgccgcggcccgcccgaggcctggaggggtccgggccgccgtccatggtcgcggcgtcctgaggcgggggacgcgcccggcgcccccggccctcctccgcctcctcccgcggggcgggcggcctcctccggcgcctccccgcgcccgcccgccgctcgccgccgcctccctccctccttccctgcggctcccccggctttcggagcccgggggcggcctgtggcgcgcggagcccgcgccggactgcgcctctttggaccttgaggggaaacatgcgtttgccttggatcgtttgaaattctgagtttgggatccccgcccgcccgcctgcctcttccgccccgcgggttttttccttttttccttttgctttttttccttttctccctccgggtctcctttttgactccctccccctttatgctcgcccagccctccccctgctgctgagaagtgggggagggtctcggcctccaggttcccgccccaccggggcccgggcgagcatggggggcaagcagagcacggcggcccgctcccggggccccttcccgggggtctccaccgatgacagcgccgtgccgccgccgggaggggcgccccatttcgggcactaccggacgggcggcggggccatggggctgcgcagccgctcggtcagctcggtggcaggcatgggcatggaccccagcacggccgggggggtgccctttggcctctacacccccgcctcccggggcaccggcgactccgagagggcgcccggcggcggagggtctgcgtccgactccacctatgcccatggcaatggttaccaggagacgggcggcggtcaccatagagacgggatgctgtacctgggctcccgagcctcgctggcggatgctctacctctgcacatcgcacccaggtggttcagctcgcatagtggtgagtccgcgggtggtggaggcctcggagggagggcgcgccggggcgccccaagccttcgcgtgcgtgccaaggtttgggaatgtagtgcacgaccgggatctgtctgcattccctttggttcccgatgc

SEQ ID NO: 63759 - DNA, 1364 bp, Homo sapiens
ttttccctgtggagaaggtgccttttttggagagagccattaagattcttttatcctgctgcctgcctgagtattctgggaatcctacaaggatttgagggagcccttgggattccaacctaacaaattagttttctgtaatattgttctagtccatttagattgtgtaaatgatctaaatggtgtaaccatttaatatcaaaagtataacagcatttaagtcagcttttcgaagaaacttttattttttaactaaaaacaaactttttttcagagacaaggtctcactatgttgcccaggctggacatgaactcctgggcttaagacatcctcctaccctagcctcctgagtagctgggactgtgggcacacgccaccatgcctggccaaagacacttttttatagctctgcctgctgctataacaagtgttcctaaatacccatgtacatcctatattattagatttcctcaactctggttagctatgactgaaacattcatgccattgcagccagtgccctggaaagctataagcaagtcttaagacctgtgataagggctgacttgcaagctagctgccatccatcttaatatctgacgagcccagtcatgttggctgtgtttaattgatccatttcctacttgcttcctcaacccagaggccaagggcagcacaaaaggatagtgaatctaaatgtctccagttttttgaggtataggaatctcctatgaagtggcagacctttgagaaatagtattatgagctgttctgttttgctgtggctttggaaaacctttggattcctctactgaaaatttgtttgaaaaaaaaatctttttaatgaaacagtgtgagtcataaagcagccaccaccccttctcataatagcatttctcaccaggggaatttttggtagctgttgggggagggatttgagtaggttgtggatgataaatcccttgaggggaacataaccaaaggctgccatatcagaacgctggtgctttccatgctgacaccaagccctgaattcaaagtgcaggacagcagaatagaacagagaagcctgtgctcagtgaattgctgcagtagcatgaccagtgagactggagtttcaattaaaacaccgttgtagtgtaaaaggatcatgagatggaaggaggccttgggttagagagccagaagccatttataggcagaacatcagctttctggattaaaggatggctgtggacctaatgatgagaatctagaggtcatggggaatttccttactgtctgtgccccccttttccatatggtcagcttggtgcttggcactgatcatggcacactttacaaaaagtggattcatataagg

SEQ ID NO: 63760 - DNA, 748 bp, Homo sapiens
aaagcagtgaaagtgggcatccttgttttgttcctgaccatagagagatttaaaagagaatgctcttaaaatttcgcctttacaagtggcagttgatgtgggtttctagatacctttcactgagttgaagaaattcccttttgtaacttgtcggctctcgagaatagaaccattagggcctgcctttaccagttaagcatttttggcagaaggactgcacagatgatgatgtgtccttcccactgcatcctatcaggaagctcatgatgtcagtctgtccgtggcttggttcgggtgatctctactaggcaaaggtgatctgtagctgccaactctgaaatggtgcgcagatctcgtttcccagtaacctttgaccggtggtttttaaaacctgtggataatccttacattcattgaattaaaaaaattttaatgactatccttttcatttcaagaaattgtttagttattttttttgtctactttgtccttccttccattctttattagttttttatttgctggaatttggaatccctttttttttttttgagatggagtctctcactttgtcacccaggctggaatgcaatggtgcaatctcagctcactgcaaactccgcctccagagttcaagcaattctcctgcctcagcctcctgaatagctgggactacaggtgtgcaccaccacacccagcttctttttgtatttttagtagagacagggtttcaccatcttggcctggc

SEQ ID NO: 63761 - DNA, 1100 bp, Homo sapiens
aggggctatttgtgagcttccctaatgcccatgatagatgtgccccatgctgtaaaacacatccacctattaaataagcagagtggactcacataagtagtaatttcctcacaagctcagaaaatgtcttttcagtttgtactttggtgtgtacacatcacattttggagaaagtctagactttagaaaagagcctttagggtattcccaggttgttcctgggctcctgtactccctgttcaggtcacctctgctggctttggctcattgtggccacgcaagttctttgttacatattccctttggtgatcagagtcttcccaagccatggtcaaaactttacttttcgtatgaactatgtgtcttccccttcagggaataggactgatgccatttgagattatttcttccttccttgttgacaattccctttgtactcccccaaggccctaagcaaggacccttagtttcctctggtttcgtggttcctgtgaaaaaggcagaagcccatgtggaaaatcctcatcctgctgtgtttcaacaagcaaagtgcattttgtctttcagagtgggaaggaccttaactgtgttgaccagaagtgcagttcctggcttcagccattttgctttggagaaggaaaataaatgcagtgacctttgttgtgagggtagggtactcttgttctaaaagtccatttgtggtgaggcgtggccctgctgggagaagctgatgccactttgcctccctggcaccctgccagttctgtctgctttgttgactttggtggctcaagggacaagccaggcactggctcatcttttcctgcctgattctctgggcagatttctccatagggtctgcagggaagtgggggaaagctgggtatggtcagagtggaggtcactatgtgggcttctcagtcctcatgctggtctgtgtcaggtgcctttaattcagggcctaaggaaccattgctttttagcctaagcagcaatttaataatttagcaatcaggtaatactggcactttgttctcccctggctgttttctcaagctaagttctgtgttagcatttcttgatttctcccctgatactaa

SEQ ID NO: 63762 - DNA, 914 bp, Homo sapiens
catgtctccacaaaaaccaccatttacccagttgcccaagcgagctgcttgagtatcattaacttctacacccctaaatctctgacttctaagctaataacatgtccaagagagtaaaccctttaaaaatccttttaatccatacactttctgccagagccaggcagaaaatataaggggatgccaaaaaaactcagtaatcaagacaaataattgttcagagtcgggttgaccagatgtcccttctggattctaagtccagcagatggcccattgggcagccagcccactggccccaggagcatagggaccttcatgtttggcagggcagcagggccgcctagcccaggccggcctctccattcacaccaccgatagcctgaatgactgcagtaactccccactgctctgcaagcttttcgactcctcccaatccatttactgcaccatggccaaagtaatatttctgaaatataagccacctctgaactgttcaacagttctgcagtgtttctggaatgatgcacctaaaccctcaatggaccttgcccccgatcctgctttcctctttagcatccacatccacatttttttgcaactctgtcagcattttttaaaaggaaacctatttattgcagtttactctccatacaaaggagtgcttatattacatcataagcatacatcctgatgcattcacaaactaagtacctctgtgtactgacatcctaggaaccctcccccaaccccgcccaccataccccttcccagttgcagctcccatggaggtactgctttcctgacttgtaacagcgtggacttgccttgcctgttttgtatcttaagtagatcggatcagatagtgatcctcgtgcactcatgtgtctgcttccttcattcacatcatgtgtggg

SEQ ID NO: 63763 - DNA, 3459 bp, Homo sapiens
gttccggtcagttcagaggatttaacaatcacaagtgtcctgcaaaaatgcctgaacattattcttaggccctcgtggattttttttttcagaaaacttaaacaaaaaaagacttactaagaaatatgtacagctacccctgttttcaggcactatgtttgagaacattttagccattgatgttcacacgtggcatcagcccatgcaagataggtttctgtatttatatattaaaatacaaaaaaaaacttataaaatgtttaaaaaaatgttcaaagcttgggagaaaagctttcttcattagtcaaggtgttttgatatggtattaaaatgtctaataaaagatggcactgcgtgattttattttaatgaagtgttatacaatcaagaaatgggggcaagggcctgccccccactccctcacctacctccttagcattccttcaggctgctactcggggctccaggtgtgtgaattggtcctcagatagtcaggcctgggtggagggagtggcaagtcaggcgtgcctcctacaagcttcctaacctcttaagcatcatggaaccagtcagccctctgtggagtcattgtgctggacctctgaaaagatctgcaggggccaagatgttgcagccaccggaggctgcaaggatgtgggttcttccaggtgtgggcccagcccccctccttccagcctttgctccccatcccacgttccactcgccctgcctgttgttcagtttgcgtctcagtgctgactcacgggcatgcttcattgaggcccaggaagaggccctggtttggggctgtgccagctcagagcccttgaaccagaaccaactgctcaggctcacaaaagttggcaaaatgcgggctgggcaggcagctcggggcagggagcagcagtgcaggcctggcctgtgtccccgtgcccagcgggctcccggagcagcattccagagcctcctgcagagccagcgaaggaaagctctagagggagacgactccaccgcctctctgctctgacccttctcaggcccgcctgatgtgctggaccatccccctgctgccacggcccctggctccgcagtcaccctccatcagatgcttccagaagcacctactctgtgcaagggcattcacaacaggccagtgggcaaacgtgagccagggccagcggagaaacactaaagaagactcggtggttcagagcctgggtctcagcgcgggacccgtctggggtgaagaccttggggctgttgtgagtcggtggcaggaacgtgggctctagactgtgcattcaggctctcctacttggcagaatgatcttggggaaacgacttcatctgaacttcagatatttcacatgtgaagcggggacaaaaccatgcagctcagaggtccctgtgggggctgggggagctgccctgcaggtcttggcacatgcacagcaggctccccatagctttgtcaccacaaagggcactgttctattcacagcacctcctgcttctgcctggcaactgtgtctccctgtgctatatttaattccaccagcaaagctggcgaggcagggcccagccctgaaggagatctccttgcctgacccctggacctggaaatggaggcttcatgtgcccgccttggcggcttaagcctgctgctttggcagtgccatgggtgagccgagcagctgtgaggtgggtggggcagggctgtagcccacgccgggtgctattccaggctctaggggctggtgctcatccccacccccagcgacttccgtcctacctggcatgctgcagccctctgccggctgtggtgtcctctgaatttggacccaggttgcctgctcttgttgtgggggtgggattggggctgtctgtgtttcccaggtggagctcatgtttgtgatcctctatctggacagctctccagaatcctgtgttgcccctgttctgcctttctgggatgggagagaaggtgagggagccggcgagcaggttctaccctctctgctaagggcctagcacactttgatgaggttcctggacgtgagaccctcacaaagaccaaccattcctctaatagccatttaacggtactgcagttcatgggaaaatgtcctcattcttaggagatagatgctggattatataggtgaatgccttcaagaaatgtgtaatttaattccaaatagttccccccaaaatacacaaagcaaataaggccaaaatgttcattgttgaatctgcagtggctggtatttcagtgaacagtgtacttgttctttcaacttttctgtatgtttggaatttttcttaataaaagattgtgggaaatggtcatttgctgagcgcctcctagttgccaggcactggagggcgcatcaaagaagagtcctacccaggagggagagcgcagctgctgcaggattctcgcctggaagagtgggtggctggctggctggctggaaggggaggggcgagagggctgtctcggtgatgagcacacgcgtgctggggtggtttggggagagggctgagatttgtcaccagtgagcccttggcacggtctctgctccccaccagggcagcacgggacagaaacgtcacggaggagtagcctccaggctcaggttggtgtaactgctgtcggctggagcccagtattagcacggaggaggggttccaagaactgaagttggactggggcgtctcagcgcagctgcctctgcctaaggcctagcagcctgcctgagcactgacagctgatgggaggaggagaggggcggaggccagggagggcgtggggtgtgacatgcctctttccaaaagggaccgaaggctagaggggcaaggaagatgagacagcactgcaggttcctgggacctgcaggggatggaggactagcttggcttccaggctgccaggacttacctgaccctaggaggaggtttgcccagggctgagtgccgcaggccctgggcagaggagtcgtgagctgcagatgccgcgtggtatctgagcttcatgatttcgggcgccctcctgtgggcttaggggggaacaactgccaaggtctcaagacgggctccggcccaagacaggggcaggccctcgggtggacagaccttgagggcaaaacagctggtggtacgatacatcaccccatgaagaggtgggtgcaaaaatagtctcatctctgtttctagagacgtggcagctgctgaggaacacattcagtgtgttcagaggcccggttcaggcccagttggggagcccatcctgagtgacatgtgccgtgggcaggtcctcagctctgaggcggagtagctgggacagggacctgggttcctttccgaaccctgagcaccaacctcctccccaggctataagaagtcagaggacagccccaaaacaaaggggtcactgaccaaaggacagagaccctggag

SEQ ID NO: 63764 - DNA, 1282 bp, Homo sapiens
tcccctgcgcccgccccgctgacaacatccttgccaggtgggcccactttaaacaaacccactatccagaaatgcctcttttccaaacagagccattgggggtcaaagtttcccctcagaaaaaaacgccaccagaatttttttaatgttttcttttttaataaaaacagggtcttactatgttgcccaggatggtttcaaactcctgggctcaagcgatccacctgcctcggcctcccaaagtgctggggttacaggcgtgagccacagcgcccagccatccaaataaaaaaccagaattcactctccaaaaaggctatcagcagggttccttcaatagccagcccagcctgagcaaccgaaaagatccctcacttcctcctttctccagggccaaccaagcaccaccccagccacagggaactcagagcttgataagggaattagggggaggaaaagcttccactgccccctccccactctacgttgcctggggcttctgggcccttcgtggggggcggggcgcggcggggcgggggatgtgtttcttcccattttacagatgagaaatggaggccaagttaaggacagagcctggcctggaacccaggccctttccttcagggccttcttccacaggtgtgttttattccaggggcatccatttgactcccccagccccactcatggtagcagtggggactcagctgatctcactctacacccacccacagttgccacagggtaagcccagtgcccttttgcccaaggtcaggtcacttggtgctggggcgtcacagagcccaggaaacttgggatcagaaccccctgctccccgctccccacctcatccctccagaggacttctcttctctcccggtacctttgccttctgggagcagtagcccctccaggggaacagctcccaggttgcagacctgagcagtcgggccatagccaggcactggccagagggtgtgagcactgggtggcagggtgaccagtcagctactgtggcagcagctactgctgctgtcagcccattggctaggccaggggtggggcctgcttaaggtggcacgggctttaaggtggcccttgcagatcttgcagacattttcgtgggctccagggacgacacttctaaaggagaggcgaggttcactggacgttttgggaaactgtaaggcaaaaataaaattctaagcctcccaaccgactgaatggacctccctctcagcccagggcattccaaaataaacctgaaaaattaattcaggct

SEQ ID NO: 63765 - DNA, 1002 bp, Homo sapiens
aaaaaagaaaacagtgcaggctaaggagattattttggtcggctcatcagaccgcctaacaaggcgaagactttcctgagagtccctaaagccgcggccccggaggcttgtgggaaatgtagtcccgaacgtggatggtccacccctccgaggaccctgggaacggcccgcgcccctgtttctgcgcatgtgcagtgctgcgagcgcgccggtggccgcccttcccccaccaccagcggcgagtgggtgacagagcccccgtctccgcgcgtcttcgccgccctgcgccgtgacccgctgtggcactgggccacgagtggaggctgcgcccctccaggtacgagaggggcttccaggtagctccgcgcggcctggggccgaggggaaggagatgagggatgggctcgtgcccgcgcagggtgggagcccaaacttcggctactcgtaggcggcagtgaccctcagggcggcgtccggggttgcccggcgctcgcctctgaacggggccggcggggcacgcctggccgaacgtgcgggggcggggacggcggagggaagggcggctatgaggcttcgccttcttctctttgtcaggagatgcgcctcagacgggcggcgaagggctcgggccgcgcgggagcgagttctggagccccggcgggcgcgcgcgcgcgggacgaggccccgccggggcgtggtgggggcgtggcctgacacacctggccacgccccgatgcccggtgcctcgtgggtggaggaaggactggagcctggtcagttgccggtggtgaaggagaaccgtgatccctttgtcagagggtcttcagtgaggtgttcccctgatcctcgcatccaccccgtgacttccagcgttatcatctccgtcgctatcccaggaacacgggaggttcagaaggggaaagtgatttccctaaggtctcacaacccggtggtactttatgtgagcagcagatattttttcatttatcttttgattttact

SEQ ID NO: 63766 - DNA, 1196 bp, Homo sapiens
aattccctaaatgtctccaacaattactcttgaaaactttaaaataaaccaagtgaaaagatgaagatggtcaggaggcaggggggtggcaggccgggcccagctctgagcactgtcagacaacatgagaagctggggacccggggtcggccctgcagggcaagagctgggggctcagggggtcagcgggcaaagctgggccttgctctgctccggggcctcacctgctgcaactccagctggctcttgccctgccgcgtgatgctgcccttttccagcagctccttctgggtcttctcaaactcctccttcccctggagggcagagacaggggctgcgctgaggccagttttctgagccagaagcacaggccagccctgtggcgggcgcagtgagctgagtggccaccaggtggtgctgcgtgtgcgcgcacacacacgcacacgtggacgcacacacacactagcacacgtggacacacacacacacacaagcacacgtgaacacacacacagactggcacgtgcaggggcaggcagacagacacacacacacacacacacacacacacacacacacactcccccaggctggcatatgtgggacacagcccccccaggctggcacatgcggggacacacagagaaggtggcttcctaggaagcaaccctggcagcccctttcaccgcctgccagctcaggaagagactgggcagagggtggggtacccgcagaaagtccgcaagctccaccctgccttcccaggctccaacaccaggaatcacacccaatccctcccccttggcctaaaggcctggccacctggtccctgcccctggatgcctctctggcccagctcagcctggaatgttccttaccaggactcccacccggctagcacccaggcctctgctccaggggccagcctgggaggagcagtcccagccacctcccaccacctcctgctgctcccccacgctcagagcatccttgtgtgtgtgcacatttctgcagatctgtctccccacacagaacagcagagtcaccgctgctggtcaccagagataccagcccgagggactcaacgaagggctcgatgacatggccaccctagcacatggggccaatgtggggtgagggaggtcaaagtgagaggagggtgcagggccttgccagggaccaggccccagctgaga

SEQ ID NO: 63767 - DNA, 2742 bp, Homo sapiens
agacttcacacacagggaagccgggtgtgagaacagtgccaggctggctggacagtgaccggcactgggctccagccaccccaccagcctggcctcagctctgggctgccctgcaaggtccctcctcagagtctcctggcgtcttagatgtgcagcctggtcgagactctgactcggaaatgggacctgggttctggccagccagtagctgtgtgaccatccccacttgggcccaagtcccactttctggactccatctgcaaggagtgaaacaaggaagaaagggccacgcccccttgggcagaaacaggaagcaggagcctgtgccttggggcagaggagtgggggtgaggcctctttcaagtccctagggcccaccctcctcccctatatgagcaggggctggacagtgcccctctgagcgccatctccctggccggcatcagagggcgatggcataccaggcagcggcctgggtaggcagtagttgccccaggtcccaggatcagacattcagaccccatggttcacttgccctgggtggacatcatcagcagggagcccatttctccagagcagctaggagcctccagtccctaaaagggccagaggctggagtgtggagagccaggaggagcaaggcccaagggaggggccagggggcagctaggagagggcaggcccaggtggagtcatattggagccaaggtgagcacaagggcagaggccctggatggctgcaacactgtccacaccatgattacaacaaaatgaaaaaggcactcaagtgaaaagcacatctcaagaaaatgtcctgtgaaacgtaaagacaagagagggtcaggaagacaccagagatgtctgagacaatggagatagtttctcttcctgtttttcaggaatgagtgtttcttgctttggggctgaaaaactacacaaaaagaaaaaaaaagaaaacggtggactatgtcccaggctctgaggcaggacgggacaggcagtgcggcaggtctaggggccagagccccacagaggagcgggagggcgggggctgtcctgcagcccaccgggctcagggcccccatcccaggcggccagcaagacaagcatttcccaaatatggtctgcagcctgcctctgggaatcacagcccatcgggggcgggccacccttccccagtgaccctacacaccacagagctgcccctccgggtcccccagcccctgccctggtgaccacaggaagtgccagcagagtgagtcacaggaaaattcccctccagccaagtcagagaaggtgggggtttagacagaggggaccgccccgcgaaggcccctcacctcctaggagggtggcccaggaaaggctggcagaggccccatcaggcagggccaggcactcagagaggctgagggagcacaggcagggaggccgggggctctgtggagggaagggccctgcagggagggaaagcccggcccaggtgagcggctggggcctctggcctcacagcccagccctgccaggcatgagctcactgatcggccacagcccagtctggggccgctgaagccaggctgggaagcatctcacaggctgggcacgtggcaccaggcgcctggcaccaggagcttccccgcctgcgtcagctggtgtgcccccgcccagcctgagctctggacgctgctggtacacaaccgaccactccagctggccagggcccccgcctctccgggcctctctgcctcctgttctgttccctaaggacatgcactccttcttcctcactaggcagactcagacctgggcccggctgtgggactttgggcaaatcccttagcctctctgagcatctagatcctctctgctggatgacagccctcatttcataggattgttctttttttttttttttttttttttttttttgagactgggttctgctctattgcccagtagcgcgatcatggctctcactgcaacaacctcccaggctcaagtgatcctcccacctcagccacctcccaccttagcctcccaagtagctaggactacaggcatacaccaccacgcccagctaattttgtgtagagatgggttctccttatgttgcccagggtggtctcaaactcttgggctcaagtgatcctccagcttcggactcccaaagtgctgggattacaggcgtgagccactgtgcccagcgcgcattgttcttttaacaaaagattcgcctggcccctgctttggctgggctccgcagagatagcgcaggcctagtggacaaggcctctgtctgaaccgggcctatactgtagtgggacagaaagacaccaaacaatttgctttcacggggaagaaagtggggtgccaaaaataatgtgggagaaggcctttgcatacagggtcagagacggcctccccaaagagatgacattccacaggattcctgtctgagaagagcatggggcagaggaagggcctcagccagggggctggagcagggaggcaggctgtgaccctggagcggcaaaaggactcacaccgcagactccatggatgatgcgtgcacagctcagtgaacgtcatccgcacaaccagcttccccacggccagataagcccagacgagcaaagcacacaccaccccaagcattcctgctctggacatgctcgcaggccccccagcagcctcccccggaacccctgccatgcttcaaactggaggagaggccagcctccc

SEQ ID NO: 63768 - DNA, 2138 bp, Homo sapiens
accatccgtataatgggaaaggggtttgaggagctgtctcagggcccctcctgtacagacaggaggccctagtggcactgtccttatttccatccctcgcctagacctggggccatggtaccagtacacagtgctcaccctcctgctcagacaaacagtaacggccagaagctccaagcctcctgccccagcccaaggtgactttcctggcagaacctgggactgccctgccctgccctgcctccacccagctcccgggcaagcagtgccaggaggaagtgtcagcagctcctccccaaagctcttttccccacagccccgccacccccgtacctgggccccgattctccaggcaccccgacacctgctctcacaggccggccagcccccaccacccaactctccaccgagggaaaggaatgggcacaagagggggcgtgtcccggcccagggcgatgggaaacatctcactagcaaagaagagatcaacccatggtcattctgagaaggtgaccaaagctgcggcgggccccgggaggggtgtgggaaaggaaaccagggactctcaggagggaacgggagccttgtggtagaaaaggagctgctgtccccgatctggaactcgaaaccccaacatcttccaggccgtaagcccctcaccccgcacccctaggcaaatctccgctttcccaactccctcacctcggtccagcgatcagcctctcggaccctcgagagggagctccgaccctgctctagctcttgcgggtcccccaaccatggactccaaagccttcatgtccacactgcagaacccggccctggccccctcccgcgacactcgcgtgcggctaggactcctgtggccaggacccggcttccaccggcgctcggcgtgcggggctgcaaagcccgcggcgcgcccgcccccactcccgctccgctcccggaaccccgcgccggcggccggagtgaatcattaactggagccgggtgctccggctgcgcagccttccccgctggcgccacgcacttgcccgcccggcctcggtcccccggagctcctccctctccgggagccggtgggcagtccccacgccacaccagccggaccacccgccagaggctcaacggcccctcctcgcagccgaggaaactgaggctcggaggcagggcgcagaggcccaaggtgacacagcaggcggccgtcggccggggagcgcgggccccgccagccactttcccgacacaggaaccctcctaccggctggcggcccccgcgcccggccccgccaacgcacccgaggcgcacaggctccggagcccccgcggttcctgcctcccggcttcccggccagggcagaaggagatcccagggccgcggaccccggccggcggttcccaggccccgcaggtccggcaggaaatgccgctcgcttaaccccttccagcccgctgccgcctccaagcccgtacgcggcccggccccacctggcgccctcaccaggtggttcatggtgtccggcgggcctggggccccggctctcgcgggggcgcacaccgagctgcccgggccgcgtgccctcggggctccgagcgcgccgcagccgccccggtgccgccgcgcagctgccgcctcggccacccagagccggtccagccgctctccgcctgccgccacggcccagccggcccagcccgatcccagcatgcccggccgcgcgcgcccattggccgccgccgctctccatgcaaataagccgcctgtcgggggcgcgggcgcgcagacagaagcccgcccagtaggggccgccccccgccccgccccccacctccaaccccgaggctccaggcccctgcccgaggccaggcttccagcctagggcgcaggacaccgctctccaacaaatgcacgtccccgccttccacccaggcgagaacgcaccgaaggcctacgcaaactcctccacttctgggaaggctgcccggtttgccttcttcctccagagccgagacatggcctcaagtcgacttgtctttcccgctaaccaaccccagggcattcatcgcgtgtccatgggccgtgggactcaaatctgaatctagagggaaaggggagggggcgtgccccagcctgt

SEQ ID NO: 63769 - DNA, 4989 bp, Homo sapiens
tcaccctccttctaacagctctggtcacccctcaccaaattctcacaaaatcccaggagctctgtgctcttaacatccccatgacacagaggaggaaactgaggctcagggaggttcagtaactcactcaaggcacagagccaacactgttcactctagagcccttgaccttgacccaccaaaacactctccccaccccgcagcagcctctccaggaacccctttcagcctcaagcaaggctctgaggagagtggctgagatcccaggctctgcacggggatacagccactggcctgtgggggctccacggtactcctggggccacatactcagcaggcggccaggggcaagctgcagccagaaggcacgagagacagcggggcaagcagtcatgggttctgcagtgtgaagagggagcctgacacaaccacatcaccccaccaacaaatggacaatggcagacggcgccgggaaggcttcctatggatgatggcgcagagcttgaggtgaatgggaatgacctggtgaacgaggcagctggctggagatcacttcctacagagggagggacaggctgagccaaggcccagcggcagaagagggtgcggcaggggcagtggggcctgagctgcggactttgaacctggacactgcctcatcccactctctctgtccactgcctggctgccaggccagctatgaaccccagggcaggcctcatggctccttgggcagctcccccactcacaccactgcctggcacagagccagttccaggattgctggccaaggtttcaaccagatgctaaggctggtctactcatctccatctaccactgctggggctggctggggctagacccaccctgctgcacagccttgggtgctacctgctctgagcccagggtgctttgcctcccagggacgcagaagaggtgacacaaactcatcttcgggaagccacaggtagagggctggctgctgtccaccgctcaacaggctgcagcccccacaagtagaggccatgcaggacgatgcttattttatggctttggatcctgccatatctggctcccaccctggctccacctctcactggccaggtgaccctggcaagacacaggccctctgtgggcctgtgaggtcctgagcccagtgcccagcacacagggcggcatccctgaaaggagccatccctcaacgaaggggcacaggaggagctggagtggccacactcacttcacagatgggaagcaagaagcagaacagacagcagggaggcctctctgcagctggaagctggcctcttacctggcagggctgggggtggccagcacctgccacccctaaacatggactcccaagccaatgccagccagaggtctgaggtgggtggcacatttccttccaaatgtgtcctctcagctgcaggaagagtcaggcccagagcgctgggcgagaggaaggcatgggaatacccacagggtgtccaggcagcacacgagcactgcactgctctatgcctggagcagaggaaggggcactgagcaggtagcagggacgccctggctccttcccctctctgggtccgggactgcatgtgagtcaaatgacaaggtgacaccagctgatccccggcatctcccctcccccaacactcagggggtcgctacccgcacaaccagcccaccaatctctcaccctgcttcccctcccatccccttctgaagcatcttataatttctgtgggccaaagtgcctgctgcgtcagcccatctaggaaaagactgcccaaatggatgggtgtgcttaaaacccagacgtgtccctgagcagtcgccactctgggttccaagggcagggcttgagcaggcagctcagtctggaagcctccgcagggcctcctcagcacatgaaagcaattttccgaacacttcaagactgttccaaaaatgaattctcctcttggccccaccacctcacacactgcccaaggtcccaggagagagagccacggtgatctgccagccagccacgtagggggcagatggcaaagacctctgcccacccccagcagaattctcctgggctgtgactacaagggagagggtaggagatgactcagagcccgtgatggtgtggccaggctgcaggtccccacgacagtgcctatctgtccaagtcctacccagcccgctgttcctctcttgttacagatgaggcacagtgccaaagaaggctgcccaaagtcctgtaaggcaaggggtcagggtgccatcccagactccatgcccagagcttggctctgactgtggacaaccaaaccaaatcaaacggggacctccccatagaggcccgcccaggctgggatgtggccagagtgacattccctaatcactactgccctgggataccggccctccagcaggctcaggtggtccgccttgtccctctgcccagtgcccacaggagcagggctggccagtcccctgaggccctgggccagagaagtccagaactttccaggagagcagaacagaagagaggaagggcttggcaggcatgttctgtcttccttctttctgaagacgagacgattatgctctgaaccagaacggatggcggggctcacatcagcacagtctggaagccctcattttttcatctgtaaatacattaccacttctggaggcgagcaggagcgggctctttaattccacaataacaatgctttgcacttggccagcttccctctggtcatctgcactcactctgggatagttaatgaagaggccacttgccagaaagcccccactgcctgcttcacggaaaggatggggtcctccgggtgaggagcagttccagaaacaaggccagagtggacagggctctggagggaaaagcccctaactaggcagggaaacgatggctggaggccacagctcgccaggtgcagatggtgtcccttcctggcaggacgccggggtgtccgcctcccacctcccacttcagtctgtccatctgtcatgtggggcctgcacctgaggcctggttacccggggtagccaggatcacttgctgttctcaggaggtgagactgagatgctcagagatgccagtgcccaagtgtggaaacatggcccgggggtctgccgaagccaggctgcccggccaggaagagggggtgtcggacagaaaactccctacggccagcggggaggaagcggccagtcagggccccgggggttccgcagcgagaggaaaacttcccaggaaagtgagcccatccgccgtggagggcaggcacggctcccatccagccaagccgtcctgggggaggggtggctccggcgactggcagagaccgcgccccaacctggccaccccgggggagtcccgggagcgccgcagggcagcaatccgagggaggtcttgcgggacagcacaggcctcccaccccctcatccggcccagcagtcccggaggggagtcgcgggagcggcagagacccctccccgctaggcctagccgtcctggtgcggggtcctggcgggcaacagactcctgcctggcccagctgtcccaggggtttcccggggaccaacaaagagtcttcccgacctagccatcttggggggctccccgaggggacagtacggaccccagcccgatccagctctcctgaaagaggatggaaaggcgggggcagagaggccggcttgggggagcctcccccagccggtgcgctctcccccggggccgaggaggccccagtgaggcgacccccagtccgggagccaacgcggcatcaggcccgcagcgggcggggcgaggtcgcagccgggcgggggacagccggcccggggtcccgggcggcgcggtactcacaggcacggacatcttggccgccgcccccggggcctggcgggcagcggcgccagcgggctgggggctcgggtccgcccgcgccgctcagaggccccgcgaggggtcccggcgctttccggctcctccggctcctgagcgttcccggacgccggactgtccggccgctccagccgcgccgcgcatgcgccgcccgcgccgccccccccaccgtctccgcggccagggacgcgttaaaggtgaggaccccggacctaggcctttttctgtcggcccaacgcggcggggaggcgcggtctcctccgctcctcgccgatccctcgcgggccacctccagtcgcaccagctctgggtcgcccaaccagtcccctcccccaacactacactgccctgtggccctggccgggctcctaggccctgtgtccgggcgcagaccgggagggctcggccggcggaaggtgatcgcggggcagcatagcaggcctcccggagcccctctgccctcccccagctgagagcgagccccgagacccccagggaagaggagctccccaccccggaaacagtctagctcatcctggggtcgccctgacagtgacatctgacctggcttctagggaggatcctgtgtccctgtaacccccactcctgggcccaccctcagcccaccgtcctcccagaggctggaagacgagccttcgtgggcctgagacttcctttccccaggctaaacacccccaatttcagctgtttcgcatctaccatggtgcccacacatggcacctgcagccactgggcacgtgcatgttcgtccccatcgctccactcctgccaggcaggccttgctgatgccccgttacatttcataggcccaggcactgagatccctcacccactcaaaggaaggaccaggggtccgacccctctgttctgcttcctggggacggtgggtgagcatctagagcaagtggggctggggtccagagcactgtcccggaggtcagcgctgcccaccccagggaggaaagacggagccagctccatgaggctggtttgccgcagcccgggctcatggcggggacctgggggcagaaagctccagc

SEQ ID NO: 63770 - DNA, 636 bp, Homo sapiens
ggtggagaaagatcccttctacctgcctgggcacagggaaaggagagcccaagggaggggcgcagatggagctggaccctccaatccatctcatcctgcctcttaccgccccaggggctgcttatttagggcatcagtaactcagcccttagcagggagagaggggaccctggctagagccctcacttactctgaggcagggatccttgggtgtgggcctgggggcagccagaggagcctcaccagggcagtgcatgccctctcctgacactaccaggtgtctgtgaaggcggcggctgctcctccctcacccactcctggcaggcaaatgatcccaggatgactcactccgtcctatagggaacagcctctggggcttcaaggctggcagttccaaccagaagcaacagctgggctgccagagcaggtgccagcgccctgagagggtccttgagagctaagcgaggccctcacaccgggactatttttgtccctggcctctggagggaaaggaatttggacctggccatggagtaaatctgtgcagagacaagcttcacaaccagctctcctgacatccaagctggcctctgtccccagggccttgccatgtctagaggggctgagggctgggaa

SEQ ID NO: 63771 - DNA, 550 bp, Homo sapiens
taattagagcactgcattcctcaggaaataggtgagcagagcacatcaagaggcttattttacttttgacattatcctgttttagggcagtttttttcagtaatgagaaggtaccagatgccctggaaatctgacacacccatttgggacttggagaggacaagagcaaggccaggaaagtcaactccaggggagtctctggactccacaggaccagctaagaaggtgtccttggactgtccttgtcagccattcacaccacagcaggggacaagcactatgccctgcagaaggctgccaaacacctcttagcactgactcactctttccacttcccacttcctgcaaacagtttccttgacaatttccaactcctggataaagggacatcacttcctttgggagttagatgagttttcactaaatgtggatgtgagagctagataaaatattagtcacttgttcttaaaaattgtgggcaggatagtgtctgtcatggttcaaatcagacttgtaattttaaaaaaggtgatttttttgtttgtttgtt

SEQ ID NO: 63772 - DNA, 3137 bp, Homo sapiens
tgcccgcctcggcctccgaaagtgccaagattacaggtgtgaaccaccatgcctggccaccatttctttcttgattttttgtttaatcaccagtaagacaaatatgacaaggaaaggaccctttttacaactgaatacgtaggttatgaacattctctttgtattccacagcgaagagaaagaggtgcaagtgatggcctggggtgctgtctgagggcctggcctatcacacaggctatagccaagggtaaagccccaccccaggccataatgacacagacaaaaaaaaattcacaataatgcaacatctaggcattccattggctcagtttttgacggatctgaactagtttggtttctcagaaggacaaatgattcagataaggccaaggctgctaccacaggccagatccaaccactaggcaacttacagttcactggagctgtaattcagcaaattcagcttggcagatgtgactggcccctgagagtactcctcacatgccccgccttccctccacccgcagtggccttcccagtgacaggccctgccccacactggaacagagacttactgacaaaccaaagtgctcacatttttagttccatcatgaaaagctcctgcttgcttacagtgggcagtttgtctccaataaatcatttgatttcagggttctgaggattttccaaggcataaaacctactccttcttacccctctttccctcgattatggatggccagttcttcaccaatcccctcttcctccttgaagctctcccagtccagtttggacttctcaagggtgctcattttctgcttcttggcaccaattttccccaaaaggctgctcatgccacttgatctttttaacctaaggaaagaaaatatgaaagatgtagcaggtaaaaactctgatctctatattaacagtttttctgatgcaaatgggaatcccctagattggggccatttatcttagtggaagccatgttcatatttggggcatttccttcctggtgtggagagcactgtaagtaaactggaattctaatgtgcttttcctgcttaacaccactgtctgctctcctgagctacgaacaggaaatcctgccttcttcagacctctgtgggctctgtgtggcaggtctctgcttgcaaggaggggaggagcagcgcttcaggcagggctttggagtcacatgccaaggtccaacttccagcttaactgtgtgactctaggccagttatttactgcatgttccttggtttcctaatctacaaagcaaatgcttactcacaggctgtggtgtatcttacacgtaaagggctaaaacagcacttggcacagcgtcaaggtgcaataagcatgagccactctgagtcactgtcatcgtttaagcttaaagccccagggggttcttttaagagaaagagaaccagttcccaacactgatgagtgaaaagtcacagtactgtaagagggttctaaaatcagtttccttttaactcctgtgagttgggccctgttttttccaggaggtggagaacattcctcactccgaaagctcacacggggaatgtacagcctgtgctccacttgctggtgatgctatcatggacagtgggagaaaccccagatgcccaaattcaagtcttggcaggtcaaatgtttccagtcattgttaaacatatgaaataaaataagaaaagcaaaatgcagttaagatggtatgaggaaaggtttggtctctttatgaaatgaaacgaaatcatctaccagcatgtaggaacttggaagttattttccgcctcacggggatatgcaagaaagttaaacatttaaaaactatgagctaatgtcacatggtctactgataataatacctttacttgtctagaatgtttgttctccaagtgcttttgtagccatgatctcatctaactctcactaaggcctgtgacacaggacccagtctcagagttggaagggatcatctttgaaataacctagtatcaccctaacccattctgaaaccccacgtccctgccgcaaagcagcgtgaacgactactcaccccctctgcctggtgtgagccaacaggccaacgtccacactgaacaccagactgctgggactgaacaatgaccctgaacattctcattctattaactttagtagagaggatgtcaacttccctgtttgggtcacaccccagtacatgctgagcttaagatcaactcagaatgggctgggcaagcttcatcatccttgtattaagttggacaaataaacaaagttcagagaggttaaatgataaaacaagggtcaaaacaatagacaatgcagatccgggacaaaggaagatctctcccaactctcagggtggtgcactgtgctatctcgcctccagatgagaagtgacttgagagattttctcattagttactttacttcccagtttgcttaagagaactccaaatagctctttatgagctttcaattcatatcttctaagcactgttttccagacaactcaacccctacaatgtcatatgtgcgcgtgatcacacacacacacacacacacacacgcacacacacacactttctttttcaccattttaccaggaacggagcatgagtggggatatggaaacttactgtgtctcaaatctttttccttctcatcttccttactgctactgcccgaattctcattcttatatcacctggataattgaacagcctctttactggtctccctgacctgtttttccccatcctcactcagtggccctatcctggtatctagtgacatgctgtaattagactgaattttccaaaacacaaagcttagcatgtctttctgcttaaatgtctcttcactgacccctttttatttttatttatttttattttttgagacggagtttctctcttgttgcccaggctggagtgcagatgcgtgatctcggctcactgcaacctccgcctcccgggttcaagcgattctcctgtctcagcctcccaagtagctgggattacaggcgcctgccaccacacctggctaattttttgtatttttagtagagacggggttttgccatgttgggcaggctggtctcaaactcctga

SEQ ID NO: 63773 - DNA, 771 bp, Homo sapiens
cacagccgcagaggccaagaaaagctgaggcagagtcagcatctggcattaaaagtcaatgacctggccaggtgtggtagctcacccctgtaatcccagcactttgggaggctgaggtgggtagattacctaacgtcaggagttcgagaccagtctggccaacatggtgagaccccaccccccatctctactaaaaaaatacaaaaaattggccaagcatggtggtacatacctgtaatcccagctactcaggaggatgaggcaggagaattgcttgaacttgggaggcagaggttgcagtgtgccgagatcgcgccactgcactccagcgcgccactgcactccagcctgggtgacagagtgagactccgtatcacaaaaaaaagaaaaaggtcaatgacccttctcaaggagaactgtgctctgctgtgactgtgactggtctgtgctggtctgacggctggagccacacactctcatgaacattcccctgatcgttcccatcagggacaacatggccaggcaaatagcacatctcgccaactaagtcaacaggacaaagcactgggcagaagatcaatatgcctcagtggtgtgttgtttggctgactgttgattagggagttggcatgctttctttctttctttttttttttttttgagatgaagtctcactctgtcgcccaggctggagtgcagtggcacagtctcggctcactgcaacctccgcctcctgggttcacgccattctcctgcctcagcctccccagc

SEQ ID NO: 63774 - DNA, 546 bp, Homo sapiens
aagaaataaaaataagacaaagcaaaacataattatttactctatgtattgataaatccttgaaacaataaccaactcagtagcaactggcattcttatccctaatgtcttgaaataatgtttcccacagaaagaaagcagggcttccagattagatgactaataccaggtctgggacaggaaatgtactaaaggggcctggaatgttttgttatgccatacagggatggaagctagcaaagactattaaggtcactatcaaaataactaactaatttgaagaacttatttgtcaaatataaaacactttgagaatcaataaggataatgactgcaatggactgaaacaacatcaaatgtttaaattcatgagttcataataaaaaaatacaaattagttactatggaggaggttagtgtaccaatcaattttgaaaatgaaagggaaaatacttatctttcctatatgaattgggaaaataaaaggatatgaaaaggtaaatagccaagtgtggtggctcacgcctgtaattccagcactttggg

SEQ ID NO: 63775 - DNA, 709 bp, Homo sapiens
tgaaccactgatatacacagcaacatgataagtctcaaatacatgttctttcactgtaggtaaaagaatccaggcacaaaaatttaaaaaatgtatgctttgatttccatgacgttctggaaaagcaaaactaatctatcatgataaaaatcagtagttgcctggggcaaagagcatagggcaaaagcaactggaaaggggcatgagggaactttctggagtgacggaatcatactataccttatcttggatagtggctatgaagtagtaggcaggacaggattccagaggcagggcttggataccaaaccaaattgatgactagctaaaacaggtatggggcagaagcggctttctgtaagacacacccaccagtgtgctatgtcagtttaccattggtatgacaacacctgagagttaccgccccttcccagagcaatgacctgacgatccagaagttattacccttttcctagaaatttctgcataaactgccccttaatctgcatgtaattaaaagtagatataaatatgactgcagaactgccctgagctgctactctcagcacaatgcctatgcggtaaccctgctctgcaggagcagtcaaggagctgttaacactgccgcttcaataaagctgttttcttctaccaccagctagctcttgaattacttcctgagcaaagccaagaccctccagggctaagc

SEQ ID NO: 63776 - DNA, 2016 bp, Homo sapiens
aacagaacaaagtaaaacaaagagaatagggacgactcctgggttgtgttttgttagtctgtttgtttcttgtttgtctagtctttcaactgaagatgtgaatgggtgaagatactttcaacgagacggtttgtctggggaagaccaagaagggggaacagaaagatttcttcagtaagattcattctcaccccgttcgggttgagatccctaaggaaagaaagttctgagaggagaggatgggtggacgtcacaatgaggcaaaaagcatcaaagggggaactttctatcagaactttctaacaaccaggcggagagcggacagctctatcttggacggggtggtggccagcagctctctcgggccagggctgaaaaaaacctccaaggctcggactgccgccccgacttctgaagcagcggtgtcgttcggggctgaccgacgagcgtccctagcgacaaggggccgtgtccatgtgccggttcccgcgctgcaagagggggcggcggccggagctgcccaacgggaggggagcacagaaccgccacgcgcacacgcctcgggccggagcggccgaggatgaggggcctgagggagcggacgctcgagaacaggagcccccctggaccacctgggccacagggcagacgcccgcgggggcagagcgcgcctcacgtgaggcgtggggcggggcaattcgcttctcgcctcaggcggaatcgctcacccgacggcacgtagtcctcgtcctcctccgacgtagagaagtcttcggagtcgaattcctccatgttgctgccgctcgacgctggtcaaactcacaagaccgcagcagccgcctccaacggcaaagctctagggagagaccatagagccccggcggcggcgacggcagctagggcggcccccgacagcgctttgcacatgcgcagagagtactacgtggttgccctacgacacttccggccgatgcctccgggctggcgtccctgaagccctcgctgggagcccgaacccgcccggacgcggtgcatgctggaacttgtagtcttcggcgctgcctcgccgccttaatataataaacctgcttaaataaaattacatatctatggaaatacaggtgaccttcattaatcattaattcgtaatgccaaattcacttacttgctaaaatgtatttgtaaccctaaaatcaatcatcacggtactgtctggggttcttcccgggcatgcgcagagggtgaaaatttggagttggcggaggtaaggttcccagctgaagtttgaactgggagaagcgccgccttctagtcgcagctcctgtgctgtaaacaaagagtcctttccgcagtctgtttactgacacttttttttctgctttttgtgggtggttttgctttctaaaatggcccccaagcgtagtgcttaagctctgcccagtgttcctaagcgaaagaagaccgtgatgtgccttacggagaaagtccgcgtgttggataagctccaatcaggcatgagttacagtgctgttggccatgagctcaatgttaacgagtcgacaatccggtacatcaagaaaaaggaaaaggaaattcaccgatctgtccgtgaggccgctccggatagtgctgaagtgacctccatcgtgcgtgatgaagctatgacaaagatggaaaagatggaaaagcggctaaatttgtggattcatgagatgtcaatcgattaaaaaaaacatagtggacagcattgtggtgaggctgaaagccaaagatatctgtggtcacgttacccagagtcaaagaaatgctaagcccttctcggcgagtgctggccggctcgcgcgtttcaaaaggcgatacggggtgaaaaatgttaaacttgcaggtgaggcgagctctgcagatcaggaggctgcggaagaattttaaaaatacttgctaagtgttatacaggaaaagggttatgtgaaagagcaggttttcaatgcggatgagactggcttattttacaaggat

SEQ ID NO: 63777 - DNA, 1413 bp, Homo sapiens
ctccagctttcagggcacggagcgctcttcctggcattagaattctgagcaaccctcctagcaggcccagctcaagccgcagcggggaggaagagttcaaaggaagctgtgccaaagatctcgaaggcttagtgggagacccagcaacaggtggcaccaggtctgggaaagattcctagaaagcggagcgggtctcggagggggaggatttagccccaggcgcccgcgatcagcgaacgagcgcctgcgcggaggggccgggctgcagccccggggcaaggggagcgcgagctctgactcctcagcgcggccgggccgctccgagacccctcgaaggaggccgggcgccgtggggcaacccaggcagggcggggaccacagcctcccgggctcgtggggtgcagctctgaacctgaggcgctcggaagctcaaggccaagacccgctcgggtggcggccgagcgccctccagccccgggcccacctgcggccgctctctgcatctcacgcccagcgggactccggggctccgcctcagggaccgccgaagaagtgatggggaaaggggctccgggcgagcagcacggcccccctcccggaggacagcgcccacgccgccagcaggctgcgcacccgggaccccgcccagactcggggcgcccacagcacggcagcggcgacggcggggcgcgcagtgcgcaggcgcggggcgggccgtacctgggaaggagcagagggaagtagagttggggcacagggtcccgttgcccacccgcggcacaaccttcaggctcaggatctgctgcaggagcccggccgacccgccgctgccgccgctcccctcgcgctccatcccgtcgccattcaccacagagaaatgagggacgagcgcccgaagtgcggtagcggccggcgccgactcaccctcgccgcctcagcgtcacctccagccggggtcctcttcccccaatcccaacggcgctgccaagtgaccgttgcctcctccaatcacaaggcgccgcagcgctcgggcgcagggccagggttgttcccgcccccaacgttgcgcagggctcgcagagacacagccccacggacgcgccccctcctggacggcgcgctctgggaccgcgcgctctgctctgcccttctctgcagcgccccctgtgagaaagtagggaattgcatgcgccccaacagagccgcgctatggagttaccagggatctggaaaaatacagtgatggaacggatatgtaaagttctagttatgactggactccagcatttatgaaaccttcatgaacagaacaagaacgttctctatttaaagctgatagtagaaagagcccatgcaaagtctggtgtgggaccagaatgggagggaggctatgtagcctctatagagctcgac

SEQ ID NO: 63778 - DNA, 1199 bp, Homo sapiens
agtcctctctcctccctccagctttcagggcacggagcgttctttctggcattggaattctgagcaaccctcctagcaggcccagctcaagccgcagcggggaggaagagttcaaaggaagctatgccaaagatctcgaaggcttagtgggagacccagcaacaggtggcaccaggtctgggaaagagactcctagaaagcggagcgggtctcggagggggtggatttggcccgaggtgcccgcgatcagcgaacgagcgcccgcacggaggagccgggctgcagctcccgggcaaggggagcgcgagctctgactcctcagccgggccgggccgggccgctccgaggcccctcgaaggaggccgggcgccgtggggcaacccaggcagggcgcggaccaccgcctcccgggctcgtggggtgcagctctgaacctgaggcgctcggaagctcaaggccaagacccgctcgggtggtggccgagcgccctccagccccgggtccacctgcggccgctccctgcacctcacgcccagcggggctccggggacctgcctcagggaccggcgaggaagtgacgggtaaaggggtccgggagagcaaagggacccccctccgggaggacagcgcccacccagcaggtcagcggcacaccggggacgccgcccggactcggggcgcccataacccggcccacccgccgctgctgtcgcttccctagagctccatccggtcgccattcaccactgagttaagggaccagctaccgaagggcagcagcggccagccaccagccccctcgccgcctcagcgtcactccacccgagaccctcttcctccaatcccaacggcgctgccaagtgaccgttccctcctccaatgagaaggcgctccagccggcgggggcagagccagagttgttcccgcccctgaggttgcgcagggctagcacagacccaccccctcggacgcgcgctatcctggagaagcggcccctgcccgcgaactgcgcgctctgctctgcccttctctgcagcgccccctgtaggaaagaagggaattgcatgcggcccccccgcccccggccagagctgtggatttaccagggatctggcaaagcagtgatcagaacagatttgtaacgttgtagtatctaggtctggaccccaatatttacgaagtcttcatgagtagaatac

SEQ ID NO: 63779 - DNA, 542 bp, Homo sapiens
ttctgagctcaagcgatctgcctgccttggcctcctaaagtgctgggattacaggcgtgagtcactgtgcccgaccagggagactattatgatggctatgagtggacaatgccaagaaactgaagtacactccttatcaggagtttcaacaaacaactagtcaaaatcaaataactcaaagtccatgcaataaagatagttcaatagcatttgagtccaattggtcagtctttgttcagggatgatggtgattaaaggccaaaccctccccattaaatgagagatctacattagagaggtttcagagacctccacccagcaacagtgggcaagcagcgtttataaacagaaaaaggaagtggcattggatataggctgattggttacagctcaacctttgtctaatttggacacatctggtcagtctgcagtctgcccctggctgaaggctggctgctatgattggagaagactcctttcttcttacaagaatatactgcctggtcaagttgtagtttgtttacataataaataaggttaca

SEQ ID NO: 63780 - DNA, 610 bp, Homo sapiens
agaggcctcgaagagctgagcctcagacttcaagaagggaccgcggcccagatggggccaggacctctgagcttggaggaagcatgcactagagggaaccttgaagccggtaggagaggcgtcctgctccttcctgtttgctggttgtccctgtttgtggcatccacagtggttcttcaccctggcagtggtgactggtttcatttctttttttctgcactcccagaacaaggctcatcatgcctcctactggcagaacctaacaggaagctgcaggggaagaaggtggtttccagcatctcagcaggaacctggaagctgagcgtaggagggtgggtttggagctgagacaatacctcataaccagcacaccacctgactgcaggaattgccagaaattcaagtgccattgtttccagagtatcctgatgtgtgacttttttccccgtcaggaattcccagcatctgacggtttgttggaattttgtttggtttctgttttgtttgcgtacatttcattcatttaagtcgtattcttttttttttttttttgagatgcagtctggctctgttgcccaggttggagtatgggtggtgcaatctcagctca

SEQ ID NO: 63781 - DNA, 1380 bp, Homo sapiens
ctcagtgccgcttccaacagtgtcctcaaacaccctcccctcccataatgagcccccaacctgtcaccactccgagcaatactccccaaactgtcaacgccctaaacagctcccttgttatcgccaagctctagaaagccctccttatgtcattcttacccctaaagaccgttcttgtcaccaattccccagacttcccctatgaaccgctctaagagccctcagctatcagccacacccccaaacagccctcagtaagagccctacactatcagccagacgttttccgccaccaacgctcccgagaccccactcctgtcaccagttccccgaacattcctgcgagcaatgtcgcagatactgctcacagacgtccccataaccaacttcttcgccaccgcagcccaggagcccccaaaggggtcctccgcggccccgcccctttacgtgcggccccgccccttggcgtggcgccctgacaaatggcgccggaagccccgcccccggccggttgctaggctccgacagccggaagtcccgcctgccgtgtagtcgccgccgtcgctgccgctgccgctgccgccgtcgttgttgttgtgctcggtgcgctgagctccgcggctccgcgagccggttccgtccccttcccgccgccgccatgaagtggatgttcaaggaggaccactcgctgggtaagcacttggtcgtcggcccggctgctgggggctggggcggcgggtgggccccctcccccactcgggcggccctgggccgagtggagcggggcggatgccctgctgcgggctggagtcgcccatgccctggtgcctcgggcagcggccccctgaccccatgtcaccctccgcgggccttgctgggagctagtaggggacaggaccgcggccccggggacgccggaaccagggcctgggttgtacgcagggcgcaggaggaggagggccgggggccgggaaccgaccggtgggcaggcgcggccgtcagccccgtttgtttctcccacagaacacagatgcgtggagtccgcgaagattcgagcgaaatatcccgacagggttccggtgagtggactctccgccccctcacctcgctgtcacctctgtcgtctgggacccgtgataggccccaggccattcaacagttgacaagttgaggttccagtcccagttacagtagctgacgggccagaccgggatgaggccgcccagggccggggcgtgaggggctcgggctggtgctgttcagggtgcctcagtgctgaatctcccgatctaggccagcgagccgtctgcagcctcggggctccctggccaattatgtaaggaacgatgttctaggacagggcaacaggtcactgccact

SEQ ID NO: 63782 - DNA, 1478 bp, Homo sapiens
ttcctgagctccagtgcatgcagcttttgaaagatggtattgttatgaatcccctgcagcgcaacgtgcaggctcgctactgtagtgaatgctactggtaaatcagaccacagtgatttaaaacaaaaatctgcaggaagtgagaccctgtgacttgaaagtcagagggccagggcaagccttgtcaagaaaagaaagcatgagatcctagaatcctcgtttggaagggactcacctctcatttctagggaggcatcacaaggcagtatagtttatgaagaccacctggccatcgacctgaaattaaaccagaggtgcaattcacaaacctcgataggcaaggcaggtagaagttgccagaagaaacagtgactctctttaagatgaagcagcccagaacggcatcatctcactcaggtagtgcgtctgaatgagcatgcacaattgtttaaatgaataaatgttttgctacactgggtccattataattcgagcctacaccccctcctagatcttgaaaacttgaagaacttcttagctgaaaataacagctcagctaaacaggcatttatttgcccacaagaccgcatctctgaacagtttcaacaagctaaaaaaactgacgtcctttccaaagaaaaggaagtcggctgccaggggagaaaaggcttcagcgatgcttggaggaagggactctggtttacgctggctcccttcctaaacacttccggaagcagagccccttcccggccgctggagaagcctgggtgggaccccgagtcggccagttacaggataggaggtgccaggcaaggcactgaagccatgcagtgagaacagcgtgagcgcctgatccattgggtcctgcggctgccaggccagaggccccgcgccaggagctcttcaggcgccggctgctgacagttccaggcgtggagcgccttcccacgtgaaacgcgtcccggaagatacgatcctcacaacctcttccctcaaaaacagactcggcaaagttagcccggataaacctgccccgtcgccccagcgcctcgcggacgctcccctcccaccttcaggaaacgcgcctagaagaaagcgagcttaatccgccggtaaggcggacgtgacgtcacaaagcgccggttcctttcggctcccgctcccagaggcgcgcagtgcatgccgggccctgtagtttttccggggagtcggtgccagggccgagattcccgcgcttcaagtcccgcagccctggctgcgtcttagagaggcgtgaaaccggatgatgggagccgcttgttggcttagatattccttcaactagaatgacgtatcttgcagcactcggctgaatttttttctttttcttttttttttttgagacggagtcttgctctgttgctcaggctggagtgtagaggcgcgatctcggctcactgcaaccttcgcctcccggttcaagcgattctcctgactat

SEQ ID NO: 63783 - DNA, 2804 bp, Homo sapiens
acggggattaagccctctcgtatgcctctggaatggtactatgtaccatcttcctagcaatgataaaacactcaattacctgtgttctgtggttcaaatggggaacgctaatgagaatataagacagccagttaaagggtggctaatcctgacttatctatgttaacctacatactccagggatttgggagtggttaacaaagatatcaggctgaattaagatggtctctactgttagacgttgatcacttaatactcacaggtatctactgaataacccatacgggtagatgcatgacagttttagaactgatcccttttaatacataacgttcagaatgaccttagtgaggcccagaaaattttgaaggtctttctgaaaagctagggtatttaacatttctccaacttccacgtttactgagtggctcaacaaaagaatgcatttctcagaaaggaggatgaagctaagcaggaagtttcgcttttcttttctgataactcttagttctcgtcctagttcctcctccacagtctcttaactctaggagtatgatagggagcatcccgccggtgccagctgggaacggggagccggcgtgcccggggtatcccggggtacgtggtctgcagggcgcagccaccacgtctcagcatgtgcgtacccacgagagccggcaagaaggccccggcacagcagccttggtgggaacctcgcggcgcttcccagcccagactctcctaccgcaaaggctttaaagactcgcagcgacactcacttcttgctcagtttcggctcgctgccatccactttcacctcggccgcctgcacggccgccatcttcccggagggcccgacccaaaagtaaggaggatagtacgttaatttccaggtcaaggtgcgaagccccacctcttccgggggagagggggcgggcactctcgatgcgccgcggctgctgctgcgcaggcccagtgctgcgcttcgcggcagaggcgtctgcggtgacagctcagtcagttgagctctgtgtgccaggcgctcgcgagggggtagctcttctagtagtgctcggcgtcagacatggcggaggcgatggatttgggcaaagaccccaacgggcccacccattcctcgactctgttcgtgagggacgacggcagctccatgtccttctacgtgcggcccagcccggccaagcgtcggctgtcgacgctcatcctgcacggcggcggcaccgtgtgccgagtgcaggagcccggggccgtgctgctggcccagcccggggaggcgctggccgaggcctcgggtgatttcatctccacgcagtacatcctggactgcgtggagcgcaacgagaggctggagctggaggcctatcggctgggccccgcctcggcggcggacaccggctcggaagcaaagcccggggccctggccgagggcgccgcggagccggagccgcagcggcacgccgggcggatcgccttcacggatgcggacgacgtagccatccttacctacgtgaaggaaaatgcccgctcgcccagctccgtcaccggtaacgccttgtggaaagcgatggagaagagctcgctcacgcagcactcgtggcagtccctgaaggaccgctacctcaagcacctgcggggccaggagcataagtacctgctgggggacgcgccggtgagcccctcctcccagaagctcaagcggaaggcggaggaggacccggaggccgcggatagcgggggtgaggaggctgagcgcggggcctcgcggatatctgcgcgggtggggttgggatctttctcctggctgcctggcgtccatcttggcatcttcggtagcagcgcttggccccgccccctgttgacatccgggtaaatttgcaccattttcttgccttctcgctcccttgttgtttattattgttctttttttgcgatgggtctctgttacctaagctggtctgaactcctgagctcaagcgatcctcctgcctcggccacccaaagtgttgggattacaggagtgagccaccacgtctggcctctcgtcgtttttattttttaatttttgagtgggggctcgctccgtcgcccaggctgtgatgcagccgcgcgatcacgacctactgcatcctggacctcctgggctcaagcgaatctccggcttcagcctcccaagtagctggaactacactcccgcgccaccacgtcccgctaaattaaaaaaaaaattgttgtagagatgggggtctcgttgtgttgccctgacaggtctcgaactcttgggctcaagcgatcctcccgtctcggtgtcccaaagtgttgggattacaggcgtgagccatcacacccagcttcttggtctagttttaatttactttaccattgactagaatattgacatggttctatattcaaaagttacaaaaagtatatagaaaattctctcttggccgggcgcggcggctcaagcttgtaatcccagcactttgggaggccgaggcgggcggatcacctgaggtaaggagatcgagacgagcctgaccaacatggcgaaatgccgcccctactaaaaatacaaaaattagccggccgtggcggagagttcctgtagtcccagctactcaggaggctgaggcaggagaattgcttgaacccggggggcggaggttgcagtgagccgagactgcgccactgctctccagcgtgggtgacagagcaagactccatctcaaaaaaaaaaaaaaattatctcgtccttcctgtccaccagctacccacgggctaactgg

SEQ ID NO: 63784 - DNA, 1037 bp, Homo sapiens
atcagaagcaacatatttatgattaatgatggaaaatatgctttgaagatgtttttatttgcatttatagatataatttgctaaaggatttatgtgagcactactcataaatgttctgatcagatgtttgactataaaacatttctaaatgccacactccacaggctaatgacctatccatctgaaatagtattccgactcctataaatgttacacattttagatcttttagagatagcttttatatcttcatgtttgaggaaatatccagaaaaagagtaacttccctgaacagttaggacactgtagaggataaagatgatgaagaacgctgacctatgaatcagcacttaatagaaggctagaggtcaacccccaaagtccaggtcagaatgctcacggacagccaggaaagcaaatagcacatggtacaatcggagtgaaagggacatagtgaggaagtcacaagatgacagggtatgtatataattaggacattcctgagaaattgaaagacatcctaggcagattaaaaaggagtgagatgcctggaccttctcaatttataaataaggttatacacttcaggggaatatttgttaactcatttttcccacaaaaatactgttgccttaaattagctcataacatcctaactcatgttttagctgacttttttttttttttcttagtcacctctttcagactttccaaggcagtttggctggcaccattatatgtcttaatctttatttttctcttttttctttaaatcctatacttcatgcttattacttagctctattttatttcctgcattatttttggaacaaggaaaattatactgtaaccaagtgtgccaaataaagcaaaacaggaaaggaaggaaggctttattcagtctattgaagtaggggagacagactgaacgtgactccactgaaacaaaggtgagagggtttttaaaggctaaggtgagcaagtagaaaagtagccgtggatgttaagggagaagttgatcaatggtatgtgttgag

SEQ ID NO: 63785 - DNA, 782 bp, Homo sapiens
cttgttgaagttgtctaaactctatccgacagagagatcacattgcatggtttgcgtgggtactctcctgtattttgtgatgttttcagtgtccatctctaccatcaaacatatttgacagacctgattcctccagggcctacagaataatactaataaaagtattaatataatattaatagcaataatagcagtaacactaatagtaatattaatagcattcctttctataactgtagaaatagcaccgtttccttagtgcttattatatgcactattccaagcagtttacgattcctcaaaatagccccgataaatattactgggtaactactccatttacctcttttgaaaatgagaaagctaaagcttagagaggttgacttgctcaagccacacagaaaggaagtggcagagctgggtttgcagccaagtttgccaaactccagaaagcaagcttatattgacatttcctctagttgttgaataacagagatgagtcagtggccaactaacctctcactatctgtccgccttaattgcaggctttcgtggcttcaacaatccagcttagctacaccatgttagttcctcacgtcacaattagtatacctgaataaaatcacgcattaaaaaaatcctacccccaattatgatcctgcaaactagaagttggacagtagtcttatttgtctttggatcgtagagcttagcaaagctcatgccacatgatggacaactagtaaaaccaatttcaaagtgcttcctgtttacagttatat

SEQ ID NO: 63786 - DNA, 4582 bp, Homo sapiens
ctttactttctgagaaaaatcagtaaaaataaatagaaagcacttttaaaaaatgtgatccagttgggcagcagttatatatgacaattgaaataggaataaggaaatgataaatggagtttcagagatgcagctagcattagcctacatcacccgagcaatacagatcagaaggcttttgagcaatccctgacgtttcaaatattagaacaattaacttcaactaatctaaactgtaggatgtcatgcaaagtaaaggaagaataaaataatgcacaaaacccttgtatgactaagtgataagaattaacatcagcgtaatgtgatagattagacacaatgagcagcaacgcaatgaacatctcctcctctcctccagataattccagccatcacatcacattgctttttataataaaatggattcgccttctctttgtagcctgtctttctccatttttgttcttagttgtgacattgggtctttactatccttttcatgttctttcactttgtcctttgtgtgtgtgtgtgtgatttatgcctatcttaaagagtcctattcagaactgcctcttattgtcttctaaaaaatgttttaggacctaatgctaatcagtgtattgaacacgtgcccttgacttgctaacactgaggacttagcatccagtcactgctgttatcgtagactcacaaacattgtccagccacagaaatgatggagagaaaagaatcaatcatttttaaagctgaaatgtgacagtggtcattttctattttggtttgtaaactcagcattttcgtagaagcttcttaaattagccttgaattgatttttattcaaccagctccgcaatttttgtttccagtctcaattcttttactgacaggttttcaaacggggctaaatttatttcagtactttgtgactctcacctggaggagaagtaaggacccctgacatagtcagaagtaacttgctttgcatttgaattgcatggaatctataaatatttatcgactttttagagtgaacaatttctaaaaaccacatgcaaaggttgatgttgaactctaaacatattgaagctctgagactgtagtgatgaatctcagctgtgtgtgtgtgtgtgtgtgtgtgtgtgtaaacatgtgtgtatttctgtgatttcacctgggagtgaaatttctaggtcacggcatatgcataggctaagcacaggaaatagtgccatatctctattcaccattggatagcttcctttataaagtggctgttcagatctgttgcccgttttctatgagattgtcttattttttttaaaaaaaacttcataagaattctttatatattttaggtgagtccttttcatataaatttattataagatcttcgacctctctgtgagttgattgtgctttcatattgttaatagtgtctttgaatggacacaagttattaattataatatattccagatttttatttttttaatttcggttttttatatgctaaaatgtagttatgggaagagaatatcaagcagccttaggtttgaattcagtacaatagaggtcgcatttctctttaatataatcaaattgtttatcttaattacgcacttctcccatccttgaggcatctttttcatgattagcctaagacgccccgagtgtacttttctatatccagtaggtaaatcttagcgatcattgactgaggtcagaattcagatgggatgtctggggacaagagaatgtgattattcatcagtgaacaacagctgatttctctaaaataggccttagcatggtcaaactagagactcgctctggcttcagtgtgtgcgaagtctaaatagactcgttctttctgctgctactacgactggggcacgttttcacccctgactttggttcagggaaaagtgactgaattttcttcccatgacactgtcacttgcaacagctgcctctttgaaccacgatagttctttgaacacaaggaagaatagtcctgttcctcccctcctttccaggactttgcttaatgaagaacattgcgtgacaaacttagagctgggcctccagattccctaccttctatgttaaccaacagcactatttctgcaaggcagagttttccaccaggaagcgaacagggttgacggtccaatgcttgacatatagaagacaactttttcccttcaatctcctgacttggtcctgggcccagcctgcatgccctgtcactattctgccccaagttaatttgtggttgaggctttgcctgtttttctttgccatagtgtcaaagtcaggcagtgtccttgtactgtgccaggcaaatctctatagctttgaattttaaagagaaggttgaggatcttgatttctttatttctgtaaggcccctgggtgagtgggtgagttatgcagttgttcccaattaattctcaataatattcaagcacagcacatgaataatttgccattaaaaatttaaagtgtaatctcaaaggtctttctgccacaaaaatagtggaaaattggcataggaaagaaccagcttctactccatgacaataacgtctgtcgcttatagtaatttcctgagaataataaacatgaggaaagggtttggtgctgggtctctactcagcacccagagaaattattcagatgcaggccctcaataccattgcataagtggacaggttcagttaaactcaataaacacggaaaggttgggcatttgtttcacaggatactcagtgtttgtgaagtcccgaaattcattatatctgatataacatggcaggtaaattgatagaaaattaattggaagacagttccaaacgtaatagctcagtggaaacatccagaatcaattaaccaaactgcaactcattttaattggacacactctaaccctgaaaaggcactggaatctttaattaagctttcaagcccagtcctatttacattagccacgtttttcaaatagttacatctgaaaataaagttactgacttgaaacctaacagtaaaggaaaaattctaaatacatgtatgacacaacggtttgtgtctaattagacattatgttttctggtcatttagagtgtggcttaaaactatttggttaggtaaataacgaaagtacagaattaagatgtcatgtttttaaagttgtgtactgattttcttctcactcttacaaatattatctaagcatatatttcacatgtatatacatttattttcttctgctactcaccccacactctgaccttcttctttactgtgtatttatttttattatcttgtagtaatcttgtgtttccccatctaaatttattactagagctttttgtcagcaagattgatttcatatagtttcataccttcagtgcccagaaagagctgctaaataaagcttggagagctgaagtgttgttcaatccaaagatgagctgatgcatacaagaaaacggataagtcttcttttaccagatagtggtgtgaagtgcaaagaaacttccttggaatggaaggctatctgtgggtctgaatcctgcctctgcctctaacgaaatgtgtttattctagtatttcctcagatggacctgtggaccaatctttgaaattctctatgcccctagtttcccatcatccaaaacaaactaaacaaacacaaaaaaatcagaacagctggaaatggactttagtcagttgttggaccccaagttatttagttacgttgttactggcagaatgagataagcctgtgagttagggagactgtgcatgtttcagagcagcaaatgtataacaatgtgatttaatgttactgtatactgtagactgtataccatgatttaatgtgggataatacaaagtaaattaaatacaccaagagcacacctttaattcagagttcacagaatgtggcccccctgcaaaaagttcctgtgccaaagtgaaaaccaagatgtgagctggaccttacccagggaagaaatatccaacaaggacgccaaaagaatcctggccaaagactttgagccctgggagctcactgagttgagtcaacagagtggaagaatagggaggtgtgaagataaagaagtagcagctctggtaaggaagaaaaagaaaaatcctgaggataagggcagaagagagacttcaagaacggcaggtcctcaaaaaactacaaatagaactacaatgtgatccagcaatctcaataatgggcatttatccaaagaaaagaaaatcagtgtattgaaaagacagctgcacccctaagtttattgcaacactattgacaatagccaagatgtggaatcaacccagttgtccaataacaaatgaatcgataaaaaaaaagtggtgtatatatgtaatggaatacaattcaggcataaaaaagaataaaatcctgtcactcacagcaacatggatggaactgaagggcattatgtttagtgaaataaaccaggaacagaaagttaaacacagcatggtatcactcatataaggaagctaaggaaagggtgatctcataagtaaaaag

SEQ ID NO: 63787 - DNA, 1268 bp, Homo sapiens
ggagcttgcagtgagccgagatcgcgccactgcactccaacctggacgagagcgagacgccatctcaaaagaaaaaaaaaaaaaggtataactacgtgtattgtgaatgcattttattagtaattgggctggactctgactcatcaatgtacctggcagtttacatgggaggagatgtccatttgtataccactagcaactttcagaagaataaactcaaatgtgtaccaggagggagataaaatgcctcagtaatgtttttggtttactttgcaaatagcacaaggaaggacaggtccacaggaaaatgctacatttctctcttttaaaaaatatttttattaaaataatttcagatttacaaaatgttgcaaagctgttacagagagcccacatttaccctgcacccagcttctataatgttaacagctgacatgatctgacttcaacatcaaagccagaaagttaacatgagttactaacctacaaatctaatgcgaattcctccagttttgttctgacatccagtttgggtgtacttggtccttgtgtctttttaatatccttcaatttgtcacacttccttagtgtttcctcacctttcacgaccttgacacttcaaagtttttaaaataactgatcagctcttttgtagaatgtcacacaattttggtttgcctgatgttttctcatgattaaaacaaacttatgcattgtttggcaagaataccacagaggtgatgtagccttctcagtatatgatatcctggagtgcttatgtcaatatgtcctattacgtgtgcaatggaccttgaactcttggtcagtgtggtatctgacagatttctttgtaaagttactttgagcctacactgatagcttgtcttcaaaatttccttcactcattttaacatccatcagtggatcttgctaacaacaattattatggtggtatatccctaatagtgattttggattttcctcactctttctgaatttattaatttttattttctataaggaagagctgcccctctccaccatttaattataaattaatttatttatgtgtgttagtacggaaatgtgcatatttactttattcctgagttgtaatccagtgtgatgcccatttactttgttgcccaaattgctctacatttggcctccttagtgacctccagttgtggctttcggatggacacagtgtatcacgttatcaagtcaggtgggttattgttaaataaattgaagtatagatactagta

SEQ ID NO: 63788 - DNA, 722 bp, Homo sapiens
acttatgctacacaaatgattaatattctgaaattataaagggttcttaaatttttaaaaagatagaaaataggacaaaggacacaaagaaatatttcaaaaaataaatttagaatgtcaaacccatgcaaacatgtcttgcttgaacagcaagccaggacatgggaatgaaattggtgtgagacggttttgcgctccttagactcacagtacagaaacgggtaacatccagcaatgctggtgtgtcatcaatctcagcccagtcccactgccttaatttggtgttgcagttgacattatttggatccacagtgcagagtccaccttgttgccaaggtattgcttacagtccctggaaaccttgatcctattttgttctgcagaataaattctcaaaggggaagaaattgagtggcagggtctgttttcctctttgctaatcatcccccaacactcgctttcatgtgttcctttctggaacctagatgttaacagatatataggaaaggggaggtacataatgatacgtgtacttacacatttgaatagttcagagaactcttctccccctttctcaccgatacctgaattttctggttataagaagctaatggcaaacaacagcatgcaagtaaacattgtttaaggttatcagtcataagctaccttgaacactgaattctattaacttttaaaagatacttttatatgtattctaccca

SEQ ID NO: 63789 - DNA, 1178 bp, Homo sapiens
aactgacgggtagataagcaacatgagatctatccatacaacacaatatcattcagcaagaaaagtaagtactaacacatgcaaccacatggattaaccctgaaaacatgctaagtgaaagaagtcagtctcaaagtgtcacatattatttgattccatttgtatgaagtgtccagaatagacaaatctgtagatctatagatctagaaattcagttagtgattgtctgttggcttggggtggagggaatggaatgggcctggttttttgttttgttttgttttgtttttttgggaagcggagacaaaatattttaagatagtggtgatggttgtataaccttgcgaatattcctaaaaaacatcaaattgcacattttgaatgaatgaattatatagtaattgtaaaccaaaagggctatttggaaaaagaaaaaaaaaaaaacagagctaacaggcttataggtgtagtaacataacacacccttagtcatgttcccagtaagtggcaaaactggaatttaactatgattctccaagtgcaaactctattcttctactgcagatctctcaggctgctttctaattctaaaataaaaatgtctatagaccaactttttgcaaggagggtttcaaagaagctgatgttgcttcccttacacattggaggacttttcattcaaagcacagatgcccttcagtgaagtctcacactattatttattgaacaataggaaatcatgacagagtgacacagaagtcatgtgggcagttttcaaggtaactgaagctggtgtcagctctgaaataccctgggatgcaagcaaattcttcttagagatttcaagtgtccctccaataaagggcttgtttccattgcctctctttctggcaaaaacccttaccacagatcaatcctcaaaatactctccccagtctaacccatagccacagcccatggcagccctgtcaataaattggcattaaggatagctttaagatgcaccaatgtggctgggtgccatggctcacacctgtaatcccagcacttttgggaggccgaggcaggcagatcacctgagttcaggagttcaagaccagcctgaccagcatggcaaaaccctgtctctactaaaaatacaaaaattagaccagagtggcaatgtgcccctgtaatct

SEQ ID NO: 63790 - DNA, 2916 bp, Homo sapiens
tcctcactttgctttgtgcaaaattgaaaatttctgtactagagaaatgaatgacatgtccttttagaagtccttcgtggaagaagtcaacacttcaaatatgtggaagaaagtcatgttaatatcttcaggatgctaaatcgcaagatggctacgtggacctctgtgtggcaatgcttcttaagcacgggcaccctgactggacatgattacctggacagaacgcgtgcattacgttgtgttgtttcctcaacctgtgttttcttcaggcattatactttcagaactacaacaacaatttggataaacatctgtgttttaattagacagaataaaaaaagaatattttaattaatgccatgtataattttgtataatacgtacaattatatatctaacagtatatatagttagctgtatatgcctaatgtaatccagaagtaaaatttccaaccagcctcctaattatatgggcatcaattatcctgacaagcataagaaagctacctgaactcttcttttgagatttctagatctctctggcacactgggctgaaatcctaacattttcttctttttgcacagtgcttaaggccagtttctctggtctgttaactcacttgtagaaaggaagagtaaattgcccttgactgcacaaacagccttgactttttttttttttccatgaatacaaatggaagatttttaaagcttggcagtttgcaaagatatgactcctaagacaaattaaagatcaggaaaactttttttttttttaaatttaaaacttgattttgtggagaggtagcctgtgtggtaattatgattctgacactgtttggcaatcttagacaaccatataatctccctagacacatatttttcattaattaaaaaaagtgtgaatttaatgtaggaaggatacaccagatgacctcaaatacttatccggtttcaaaaattgatgttttcataatttaatatgcatagaactagcactctcctcctcttcctgcacttctaacagacgctcctaccatatgctcctcctgtgctctgtgcagtgatccattgtagcaattatgtgattgtattggaattttgttttctatatttgtcattctagtagcttattaacttaaggccgaagtctgagtttgctgtttcttttttcaacttcacgttctaagtttcaaacatgtagcttagcacaaagtgattctaaatatgaagttgttaaatgaactgaaggaattaataaattagttgatagtatcaagcaataaaaattgagctacttgtggtacttaatttgcattttaggagaaaaaaaaaagaacttgtatcaagcgtggccttaccaacagccagccacctggaggatacattccgagtggactggtaaatgtttcctatcttagtatgtgaccttagtatgcaagctctggaattccccaacatattaatctaggtgttattaaaagcttttggtcctcaagtgttcattgtgaaaatgcaaatatctgagtagaacagaaaagaagggattaattagatagtgttaaaagcagagctaaaagtgagaacagcaaggagagaaagaagcatgttctggataaaacaagacaaagaataagaccattttcttcttttatttcttgtttgtctgtctgactactctatgccagacacatattacagcctggccaacatgaatcctaaggtctgatggggagtagagatgattaagcaagaaattctaccatggaatgatcagtgctgggctagggaaacataggggctaccacagaggaatcagagaaggcttccaatggggatgacacacttgcctagatctgaagatccagtagaagttaatgagatgaagagatgaggagaagtggtccattcagagacaaaaatgcctctgtgtggagtgaggctcagctaaaaatttaagattcatgttgtaaggtttagaatgttgcggggagaagggtatggggagagatgattctggagacttaaacagaggctggcacatgtaggtcttgtaaacgtgtataatatgtaaaccacattaaataattctctcagggtcaaagagtatttccttgtagagttttagacagaggagtgacagatctggtatagatttttcaaaattctctatagatttcatgtaaagacattatttctcagaaagaagtatattggaagccaagagctcaaattaagaggcttttccagatcaagtaagagataagagtggcctagactaagtcaaggaccagtttgatagagaaaagaaaatgcgtttagcagatagaaggagcgggtctcaataattcatgtaatctggaggtaaagaagaaagacgaattaagaatgaattacaggcttgggacgctccataggtttttaatgataccatttgttcaagtgggaaacatgaaagcaaattcatgtttctgagaagtgctggtaaagtgcatctgaaacatgtttcgttgaaaaggaaaagcttgttgtatattggagttgtgggcaggaaagacaagtttaagtgatgttaggatagtggtaaatggaagtgatgatattcctggagaaacatgggcaattggtttgttagacacttttacttaactatagtttttatcagcaaatccctgtgattgtgattctgatgagactccagttaagaagtactagctggggaccagtcaaagagacggacttggagagaaccctgagggacactggcctttaaaaaatgggcagtggaaaggggtcctgtcccggaaactaggaagagcaagtggaaggtcaggaggagatccatgagctggaggtgtggtaaagtcaatgttacccagccaggtcacttatggcaaagactgagaaggttctatg

SEQ ID NO: 63791 - DNA, 607 bp, Homo sapiens
aatactaattagtgatgaagaaatataatttccatacccatccatgttttgtataaatttcaaaaaccttactataaattacaaggctctacataatccaaatgacattctccaactgcagttctccctctctctcagcacactggcccttgtccatatttaggctaagctttggttatctccagatttatgctcatggtatttccttgccctagaatgatattgcccaattttcacatggtggtttagtcatctcactgagtcctagtttaaataccaacccacttgggggaatttccaggaccacactttctgaatagaagcgcggtttatgactgtaatccagcactttggaaggctgagtcgggagaattgctggaggacagaagtttgaccccagcccctgaccaagatagctagaccccatctctacaaaaaagaaaaagtagccaggcctgttggtgcatgcctgtggtcccagctacgtgggaggctgaggtgggaggatcgcttgagcttgggagctcaaggctgcagtgagctgtgcttgcaacactgcactgcagcctgagagacagagcaagaccctatcaaaaaaacctcatca

SEQ ID NO: 63792 - DNA, 1064 bp, Homo sapiens
gactaagactgtggaagtcaaatggaagtaaagaacgtgaggcagaaactagagtgagggccctttagggactagcatgagagagggtagaatggagctcgagacccagggagggtggaaaggcaaacagatgggcaggggcagtaatgggaggtcaaggagaatgtcagttatgggagcaagatttgcccgaaatgcagatatcagctcactggagtgtgacagtgggtcacagagtgatggctcaagttagagaagaagcacccagagtctgtgtggccaaagtcccactgctcttcagatgaaaagtaaacacagtcagctcataacacatagtagcaagcagggcaaaggctaagtagaatcagctctccttatgaattttaagggtttagggaccaaggagaatttcatgaagctcactagataacattcagcccaggttattagagaaagctgagggtgccttgaaaagaatcataaatacagtggttagaaaaagatagtaaaggtagccgatcaatagaggatataaagccagattaccttgcaacatataaagggatagtttttttaaaaaaaattaataatggaatatctcgtatacatatttgttgaggaatgcttctaaacctggatttgctactcagtaaagcactgaaatgcaattccttcctatataagttacttatttctacataacaaaagaccctacgttgtcttagtggcataaataacagtcatttgttaatttccatgtggctgggagtcagctggcagttctgctgatctgagccaggcttgcctgatgagtttgctcatgtgtctggtgtctgtgttagctgcattgttggctggaagctagcagatctaggatggccttggctgggataaaggaatgctccacatttctttgacacctctctatcatggagtattctcctggtgaacccagataaacatacaagagcacagaaatgcactaacatttttcatactgctgcttgctttcaaactgcttgtgatccattggctaaagcaagttacgtaagtccagaataaat

SEQ ID NO: 63793 - DNA, 1044 bp, Homo sapiens
ggaaaaaaatagtgttaattatacccatgtagtaaatttcttgaaattctgcatgcaattatcaaaccttagctgatcaggaaagagacagagttttggtctatgaatttataatacaaacactataagaaagcactattaatcaccttatgtggactataaaataatttcatgatattaccaaattttgtctcatttaacaatacagtttaatccacaagaaattcaatttggaaataagtgcacaagtcctgttttctgctgcagcaagcgtggggggacagagataagagaaacaggcactgattctgatgacaggaagaggatgatgttgtaaaacgacttctgctgagtcatatgccagggctgctatgaatcaccttcagtttgttgacagtatgctttgaatttggctcagttatctagcatgctctccacctcaaccaaatctaatccagttggtcaccagatgcaaggaaaccaaaatgcaagaggaatcgccaccatagtctcagccacctgaattagtatctgtggatcctgggagaccaccacatggagacaaagggtgggaaattgaggggttggtgacactagtttgcatttttaaaaaactgaaaacaatgagagagactcacgccatacttactgaatcataatctgtcttttaacaagatcccaggtgattgatctgcaaattaaattttgagaagcatggatctgtgattcattggcaattaccaactgcactctcagaagaacaaggtaaagaaaataatgctcttggctttgtaatagagaaatgcatttctagtcacaggagagaatattctgaaaaataaatacaaatatatgccaagaatataggaaaccaaccaattaaaaaaaaaaaaatgaaccgtagactgaggatcctgctttatggaaaagtcaagtcaagatgatcagtcccacatcttatagttaaatagccttgaaatgtgtcctatgagggagaaatagcattataatgctatgagccaattcagatatagtttaattaag

SEQ ID NO: 63794 - DNA, 831 bp, Homo sapiens
tgatccattctcagagggaagaggcaagattcagggtctcctgatgactcaagaatcttctagaatgtctcttctggccagaacaggtcaatgaaggcagagcccacatcaggcacagtgcaggcaacgtgggaaccactgtggccacctaggggcagcgccagatggtattaagcccaggaataaaggttccaggccttcaggaaagcccaggtgatcctggagcccctcagatacacataggaaaggcttacaatatattcctatatctggccagggatccactttctacactgagcttggccctaggtcagtggttgtgaactttacctcccaggtgagtaagatggtgtttgctgctgccaaaccaaatgttcatgcttttgacataggacatgagtcttggccaacaactggactttgcctgaccttgctctcctccacctgtgcatgattttaattttttcccataaatgaccactatctctgcaaaagattggaagaagattctggtgatgatgtgtgggcagtccagtttccattcctgagaagtgtcgactttgaagagacaggttcccacaaaattgcctagggaccaagttctctttccaaaagtctggatgctgcatgaaaactcctcgtgtaaccagaatagcagatacagtgggcacagaatggacaggtgaagcaggaccagtcatcatgagtcagctggcttgcctgtgagcagacactgcatggggcacagggagaccatgagagcaaggcagtctctgttcctgccctcaaaaacagcaaacaaaaacagaaatttcagtattgtaaagtctg

SEQ ID NO: 63795 - DNA, 1350 bp, Homo sapiens
tatgcttatatttttaaataaaacctctgtataaagtataaagtagtttagaaaacattttgaaacacagaattaccatgtagagcaaaaacaaacctgactctggagttataatcgtatcagaatgactcatctaaacatttatcagagatttgggggataggcaagaatatttttgtttggttagaaaccttttggggtgatggttagttctctggtccagctttagctgagctagaaccataaagtctttaatttcatgaagtatgggagcctattttcttgcctggctaattttttaaattttttggagaggcatggtctcactatgttgccaggctggtctcaaacttctggcctcaagctattttcccgcctcagcctcctagaaatggtggaattacaggcatgagccgcattgcccagcaaaagcctctaagtggtgatttgctgtttggcctgagagtaatttggaggctgtggctgagtcagcttctcttgttgactgagctgatgtcacttttgaccttcattgttccataattccttatgaaactcttctgaagcactgagaaccatcgacggatcatatcagcatgaagttatagaagtataagagaacttaggaagctaagtgttccaccttatgagaggaaaattcctcttgtaccttatgagaggaaaatgatgcctggagctcttaaattaattattaaagcactacagcatgttttaactatgaataataacaatagtatgtattgaatatttgatacacatcagtcactaagctaagggctgcccatacaagatgtaatctttaccttagccgtgtgaaataggtattatcattatcttcattttacagaaaaggaaactgaagtaaagatgaatggtgtaatttattgtaggtctcacatctagaatgtggaaagattagaactcagatgcctgggtctcagaggttctgctcttcagcactgccatgtacttattcatagctggttaaacaagtaagagctggagcaaagtgtcagggactcaggaatgaataaatctctgtctctgtacccctggatgtcacaatttagcacaggggttggcaaactttgtctctcaaggcccagatagtaaatattataggctttgtgagccaatacaatctctgtggcaactactcaacgttgccattttaacatgataccagccagagctagtatatgaattaatgaacatggctgtgctccaataaaactgtatttacaaaaacaggctagtggccaatttactttgcaacatgtcatcaaatagaataattacataaatatataatttatataactaagacat

SEQ ID NO: 63796 - DNA, 2304 bp, Homo sapiens
agcctgggtaacacagcgagattaataaataagtttgcttatgagatgttattttattgtacttttttacatgtttattatatattatatacttctaaatgtattaggtaaatatattttgtatgcacataaatttatccattgtttctgttatataaatttaatatttattacttatcgattacctattgtatataaagcacatgatgctacactggtatttggaattcattaccctaactatactgtaattaaaataattatcctaactagtaccaaaggcttccccttagcaatcactcgaagtgtgccagcacctccactcacttcacgtcaagcgattcccatcattgtttcactgatggagaaaccaaggcccagggcacttggggcaaggcgttcagggggctttcggtccggaagcagcgtcggggcgggaattcgaaccctgggttcccacactggcccgtggcagggcccccaagccttttcccaaactgatcacagaaagtgacgacccgttcgcccggcggaccgggggcgtcgggcaggtcctggtccaagtgagtgcccgcccctgccctgggctggcagagttcttcccccagctgcaggtagacgtgggaacccggcagggtacggagctgctggcgcggcacgctgattagaagcggcgactgcccgtcaagcattcgcgcctctcccctcccttgactttcttggcagggttaagggataagagaaagtggagttgcctcagttctgggagagcccgtttgtgggtccggcacaggtatccatcgggactgacgctgcaaaagtcctcttgtgaaacaaggaataggctcgagtcttcgattgggtcgagggagacgtcaatcaatggatgggcgtgtgcaaacgcaacacaacgcacagtattggttaggatttggcggggggagtagacagcggggaaatgaggcggctcatctcgattggcccagaaagaagacggtcgcgccctatgtactccgggattggctagagcgagccgcgtcccccctcacgccaaccactggtaagcgaagtgggcctcgctctcccgggttagcagccgtagccagatccgttgaaaggagtgcagagaggtctcattgcgctcccgaacagacctgacgtagatccgaagtggcccgcgccatctcaactatgaggggacacccgtaggcggcgggagagggacgccgcgaggagccaataaagctccgcaaccggaagtgtcttctgggaggggtcgtacccggaagtgtggcacctcccgggccgcacccggaagtgtgatgccaccgccgctacggggaagtaatggtatccggccaattgagattcggagttaaaacaggtgtttgtatatctctatttcctgaggcccagtagagtctcctcttttcggaaagtgttggaggggggacgtatttgggcatgattttggatgtctcgtcctattgaaatccgtggggaaatgagcagtaggagtgtgtccaagggggcctgactctataaaggcttttcagaagtttctttcaccgcccgtcaccctcgattcccctcccactcagggatgtgcagatggaggtcggaggagacactgctgccccggcccccgggggcgcggaggacttggaggacacgcagttccccagtgaggaagctagagaaggtggaggggttcacgcggtcccgccggatcccgaagacgagggcctggaggaaacaggtatgactccacttagtggggtcttaaaaggaatccttaggggttgtcattgttggacgggggaagggtcagtgggtgaccagtagggagtcttgggacttaagagaagtggcttaaaccatcgccgggtcaggaggaggtcactgtggacacatggtgtagtttacatcattgaggaagtcattggctgtcaacggatgttcactgggggtttggtgtgagtttaggtcattgaggaatcaaaaagggggctgttaggaccaaagagggtcactgaggatttagagtgtttagatcaaagaatgcgctgaagaaagtcaatagactcaacagaggaggactgttgagaagttagtgtttttgaggagtagggtgttatttattaaataatagaagtgggaaggggaatcagtggagttcgatgggcactcagagtatttacatcattgaagtcacttgtagactgttggggaagtctttaagggaccaaatgttagtggatgtgtaaagttgttcatttgagatttaatggaagtcactgagaa

SEQ ID NO: 63797 - DNA, 1040 bp, Homo sapiens
ctgaaacatgttacacttgaatgcctataagcataataaggtaaaaagatgagcaacaatcagctcaaaaagatctctgtaaatcagcacacgtgacattgccattgagggagcatttattatgtaccaagaactcactatcctatttcatgtacataatttcaaccggtgctgaaacagccctgatggggtggccccattatctaacctaccagtttaaaactgcaggcaagatctgaggccggatttgaatccagtttcaactgtctctgtagcacccggacttaatccacatgtgatacccctcagtgacgatgccggctcctccccttcaaaactctttgattactcattgcctttctgtggacttcgtagttgttaaaatcctattctaccagggacaaaccacaatctctgcaggcccttctccagtgtactggactgggtccaggactgcaactagtgtggactttgtaaggtcagttcccaaaaaacgtcattagtaaaacacacagaggatgccccacccctcagaagtaagggcaggtttaagacttatatgctgatctactctcactttctcttttgccctactgagaggggtaagaactctggtcctccccagcagctacaggggcccatcatctgtggacacactacaaggaaaatacaaggtagaaacatttaacaggacacagacatggaatgaaaaagagagaattgttcttgttttcttcccttggctacctggaaattcaaagataaatgtaaatgctttgaacatcttagcaccttatccttggcttctggtaaaattactgcctctgaccccgcccccccgccccccccaattaccacttatacagttcactttccccacttagcttctgcgttaatatcagttcaatcaccttacaccatttttttaataggcaggatatacaggcacaacttatttcattgcactgcagtttattatcctttgcagatattgggtcttttaaaaattgaaggtttgtggcaaccccacatcaagcaag

SEQ ID NO: 63798 - DNA, 1766 bp, Homo sapiens
gctcgaactcctggattcaagtgatcctcccctcttggcctcccaaagtgttggaattacaagcatatgccactgcatccagccctgtgtgattaatttatgtttctaccatttgactgtgagctccacgtgtcttttcgctagctgtgggatctgcacccagtgcatacaggtggtcggtgaacaggtgctgacagcagttccaaaaagttgaatgaatcaccttaaccttccagcaacagcgaatgcgagtgtaaaatattatcacctcaccaacactgtattttttttttttttaactcttccagctctaaattccacaactcctcctatacctcttgcttccatagaagcccaaggagcccggcagaaactgctttgagcaaccaggaacacccggccctaagtcccgccccgcgcctctccccacctcaagtcccgcctctggctataagccccgccccgccccgatcccggcctccgatcccagatctcgcaccgccccgccccctgtctccgccccagacaccaccccgcctcgtgctctaagccccgcccctctctctggctttaggccgctcccaagcccagagctgctctgcgcaagcgcgaccgaccgagcagctccgaggagtccgcccggaaacaaacattccccagggcaatgtcacgacttggtcttcccgaggagccagtcaggtaaaggctttccgggccctggcaccccgagcttggtcaggcccggccttgatcgtagcggaggccaccggggccttttggccgggactgattttgcagctcccgccagtccacctgcgagcgccggatgggggagcactcgcctccagcaacccgcagggtccccgaacctttgcactgctctggccaggaacagagccggcttaagccagtatggtttacatacacgctgctccccttcccagccggcttggctgttctgcaatccgcgtctccagagttggaccccaggacccccgacagtggcacagacccgcagcaggcagccccggattcaagtcccccggtggctactttcagttgtgaccttgggtctgtcagtttcgtaaactctctgagcctggaggtgaccctgtgatcacttgccgggctgttgtgaggataaaatgagaaacgtcaaaattgagaccatgctcagaacggggtggctgctactgctgttgataccttggtgattattccagcggccagcccctaaagtggacagataacgtttttgcagccttttactttggctggtttgtctggtcagttctgtggtttccgggtggttaaaagccaccagcccacagtttccttttctggaggctggcctgcgtgcatccagatgcactgtgcaatccctgtgccagcattcactgatttttttcaggccatttggtctttgaaatacactgccgttacccaaccacatctggtgagcaccctgccacctagaaagaggcaaaaaatagcaaatacctcctgcaaacaactgcttatctaatgatggggagatttatgacagtggttaccattccctgagcaccagctgtgtgccagccacagtatatgaactgcatcatttaatcttcttaaatatcctcaagcctgacacaaatgaagatgaaactcagagaagtcatttgtatacacttttttttttttttttttgagacagagtctcactctgccgccctggctacagtgcagtaggcaatctcggctcactgcagcctctgcctcct

SEQ ID NO: 63799 - DNA, 491 bp, Homo sapiens
ataagccgccatgcctggcctgcctgccacatatagaagtaaaactgctctgacagttaagtatgtgagggggacagattactgcttgcttggctcttctcacctctcccccaccacagttgcccccatgactcctctatagactgcctttaggttctataaggaacaaagagggacaatggagacccaagtcaactcactgatgtctttgataacatatgtgtcctttgcacctcttctttgttggtccagtaaacagaagctaaagcaaatgtatcaaagtctgaatcaacattcctggagaagcctttgggtctgggctagcccatgagataactgtgaagctgtcacaagacacccctggctacagagcacctgtaatgtggctagtccaaattgagatgctgtaggagtcaaatacacactggatttcaaagacttactattggctacatggtgaaatgataatgttttagagatgttgggttaaa

SEQ ID NO: 63800 - DNA, 1195 bp, Homo sapiens
tgaacctgggaggcggaacttgcagtgagccaagactgtgccactgcactccagcctgggcgacagagcaagaatccatctaaaacaataataataataataataacagtgtcttctttcaggagcagctgtaaggatgagtgagttaacaggatgggcacactggatggtaacaccactggtatccgaggtgcagtttccccatctcaggactatcgtgaggactgagggaaaggctgtgtgtgaggtttctaggactgtccatggcagcatgagtggctccataaatgtgcttcttctccttgactagagaacacatttatggatcctcaatccttcttgctcattcttgggcaccgtctctgtgctttgcacataatagattcttagatcaggtcagaataccacttcagaagcaggttaaccaacattccagagagctgaggggcccaggccagacctaatttcctgaagtgggaaatttctcccagaaggggagaagatgccacatgaagtcaacttgcagctggtggggagtatacaggaggcatggggatagggcactgcagccagggtttggcaggttgagatttacctcacacctccctgaatttatttatttatccattcattcattcactagtgaagcaagacctcttcttttcttctctgagcttactaagcccaatgaaaaatttttgtcttcaacaactccctctgaaacatcaacttggcaagactcagatgccttgactgtagcctcccaaaacaccacgtcatggggactgaccactctctccagacaggctgcagggcaaggagcagggccagctgacgtggaagttccctggcacaccaggcaacggggcctgtagtcttatggaaaaacactgggctcagggccaagttcctgcactccagcctcagtcctcacatttgctgtgtgtccttgggtgaaacactctacttttggggtgggtgatggtgtgtgtgtgtgtgtgtgtgtgtgtgtgtgtgtgtgtgcaagcatttacttaaatacggcccagctatgatcccagtcccaacaccctactgagggccttgcattcaggatctccttccatctttgcaacagccttatctgatggagctgggatttgaaccagtgtcagcaggcctccagaggtcatggtttttgtctctgagtatttct

SEQ ID NO: 63801 - DNA, 3879 bp, Homo sapiens
ttaggggattggcagaattgcctgaatttgctctcacacctaccatacaagtgaattgatttcccagcctaacaaactaagggtataagagcaattgctacccagaaaaggggcggatatagcatggtttggtgcagttcctctgggccccaaagcccctaacaggagcatagacgcagatggcactctccacatagggtttcatttttctgcagctgttacatcctcaagcttgtatcatgatcccagaagaacttaccataacaattgacatgctgctattaaagtaaatgttgcaaacaccttgtttcgtggttgttgaatgaaatgcagcatcattaaaggccatatctcctcttggagagggatagggggatagggtcagcacccaaacatcactaaacaacattctgtctctacctctctaggatcacagaaaggaagccctttcgccctagaaatgtacctgcttgagaagctctgcagtgtgttgaggaaagaagcaatgataccatgtgagggaagtacaatagactagaagttgtgtcccccactccaaatttatatgaaatcttcatccccaaggtgatggtatcaggaggtggtgcctttgggagatgattaggtcaagaggtcagagctctcttgagtgggattagtgcccttataaaagaggcctgaaggccgggcgtggtggctcatgcctgtaatctcagcactctgggaggccaaggcagacggatcatctgaggtcgggagttcgagaccagcctggccaacatggtgaaaacccatctctactaaaaatacaaaaattagctgggcgtggtgtcatgcgcctgtaatcccagctactcaggaggctgacgcaggagaatcgcttcaatcccgtaggcagaggtttcactgagcctagatcgatcgcgccactgcactccaacctgggtgacagagtgatactccgtctcaaaaaactaaactaaaataaataaataaaaaaaagaggactgagggagatcccctcgccccttccaccatgtaaggacacagctggaaggcaccattctatgaaccaggtaacagatcctcaccagacatcaaaactgctggtacctgaatcttgaacttcagcctccagaactgtgacaaataaatctctgttgttcataagccactctgttcatggtgttttgtgatagcagcccacacggagtgagcgagcagcctgggtgactcacactgcctggggatgggcattagcagtaacgtcctgggtgtatgtattggagactccagtctttagtacctgcatgtacaggtagtctgtgttcccccccatcactgattctcctgatccaagtgtcactccgtccccccatgcacctcatcttcctgcctgctcagttccactgtggaaatgattgagttaaatccttaagataaaaaataaactttgctcacaatgaccaactagataaacaggcacatgcaatgccaaaactcaaaatcaatatctgggagactgtctctatttggaaaaggagaggtgtattaaattaaagtgtgtcctttgatttttccctcaacaaaatatggcagtctctaaaacaaaattgcccagaatgatttagtagccttctaacatcagcttcaaatgtattcaagtgtctgcaatgagacctgcatgaaacagacctctgagctcatccaaaggacaaacagtattccaggttgggaacattcccctggtgtgtattgtcacatcaatagctatcatttccgatcaatgtcatttctgcaaagagagcccttgtgtgccaggccactgccaatagagaggactaatgtgacctcagcctctgggctggaaagtcccttgagcatcaattagtccaaggaccttcttttaccaaccaaaacaaggacatttccaaagtcacacaggcagcaagtcaaaaccacaggctaccttgctcccagaaaccaaggatccatggcttacaacagggtggttcaggccgggtgcagtggctcatgtctgtaatcccagctctttgggaggctgaggcgggtggatcatttcaggtcaggagtttgaaacaggcctggccaacatgatgaaaccccgcctctactaaaaatacaaaaattagccaggcgtggtggtggacgcctgtaatccccgctacttgggagaatgaggtaggagaattgcttgagcccagaaggcggagattgcaatgagcagagatcgcgccactgcactccagcctgggcaacagagcaagactccatctcacaaaaataaataaataaaaattaaaaaataaaataaattttaaaaaaaggccggacacggtggctcacacctgtaatcccagcactttgggaggctgaggtgggcagataatgaggtcaggacttcgagaccagcctggccaatatagtgaaaccctgtctctaccacacctgtagtcccagctactcaggaggctgaggcaggagaatcgcttgaacctggaaggcagaggttgcagcaagccgagatcaatcatgccactgcacaccagcctgggcaacggtgcaagattctgtctcaaaaaaaaaaaaaaaagaacagggtggttcaactttggcactattaacattttaggctggctcattctttgttttagggctatcttgtgccttgcaggatgcttagcagcatctatggcctgtacccatcagatgcttgtagcactactggtaacaatcaaaaatgtcttcagacactgccagtgtcccccaaggcgtaaaatcacctctgacttagagaaaacattgcacattggagccatatgggctaaatttggctcacagacatgttttgtttagcctatgtaatatttgtcaaaattttataaatttggtatatttcacataatgattcagacttttggcctctcagaaacacctggaagccccagcaaccctgagctcacattttcacattacaatgatggatcaaagttgagttttttgtttgtttgttttttgagacagagtcttgctctgtcgccccggctggagtgcagtagtgtgatcatggttcaccgtagcctcaacatcccaggttcaagcaattctcctgctgcagcctcccctcctgagtagctgggactgcaggcacatgccaccatgcccagctaatgttcgcatttttttgtagatacaggatctcactatgttgcccaggctggtctcaaacacttgggctcaagtgatccacctgtcttggcctcccaaagtgctgggattacaggcttaagccaccatgcccagtcactatctcttttagaatgccctctgcactccggtttctcacagtccccaccactctctgttatgtcccacaacaggcccacttcatttgcttcataatgttctcgggcctggatttaaagttttcttaaaacaatttgtggtatattttatcttaagtaagcccctcagttccttgaggtcagagtcatgttatttttttcttttgttccttctacaatgcctaaccttgagcagacacttagaaatagttatccatttatttacctatagcagttttccccaaaagatatcctgcagaatgctaatcttgttaacttcaagggcaaagggctggaagtctaataagtctcagtaaagctgtattctgaatccctatgtagagattcaagagttatgctaagactctaaatctacattaaagaaagctgcttaactgtatttgacccagagtgtctcaggctaatttgaccacagaccctccttttaccctggcatccatcaacatttaggaaaccactgtttcgttgaatagactttggaaaccacttaact

SEQ ID NO: 63802 - DNA, 2041 bp, Homo sapiens
aacatgatgaaacactgtctctactaaaaatacaaaaatcagctgggcatggtggcaggtgccagtaatcccaactactcgagaggctgaggcaggggaaccacttgaacttgggagacggaggttgcagtgagctgagatcgtgccactgaactccagtctgggcgacagagcaagactctgtctcaaaaaacaaacaaacaaaaataaaacaaaacaacaacaaaaaaataatgtagaattggatgaatgagtggatagatggatgattggacaattgggtgatggatggacttcttcccatttgctttgtggaaagtaccccattaggctctgtgaagagaaggggcatactaaaaggaataggacaggatttctgaagaacatttccccatttcctgggatttaagcctgctaccctcagaacaggaaaggcaaaatgtgcccttttcatggtgtgcattttcagttacattgaggtcttgtagcttcacagtcattactgcaaggaagccccaaccaactggatataggccaatccaacaataaaaggaacaaaactttcagggacatcagctcttagcctcaaccagagacatcagggcaacaagagagtgaattagctggagggctggttcatccttatttatagtatgatgatctcagcttgtaaggtggaaaaaacggtgcaggggaggaattcgtcccctttctggtttctgttggaccctatttgaggagtaaatgctttgtttatttctgaacctgaattttacgtccccatcccattactcatcatgatctatagcaaagtactttagggaaaacacagctctctgcagtgcttggaagaggcaggcagcattactgtgtggtgattcatacaagaaaacacacaggggccggacacagtggctcacgcctgtgatcccagcactttgggaggccaaggtgggcggatcacctgaagtcaggagttcgagacgaacctggccaacatggtgaaaccacgtttccactaaaaatacaaaaattagccaggtgtggtggtgcatgcctgtagtcccagctactcaggaggctgatttaggagaatcatttgaacctgggaagtggaggttgcagtgagtcaagattctgccactgcaccacagcctggggtgacagagccagactccatctcaaaaagaagagggagggggagggggaggaggcgaagaagaagaaggaggaggaggagcaggaggaggaggaggaggagaaatggaagaggaagaggaagaaaagaaaaagagaaaaaaatcatacagcatcacactagggggaggaccctagataatattcaaggggaggggtacaagaaatcactcagaaattatctttcagtgtgagtgaaatttcaaaaacaaactacatgatttaaattccttagtcctatgttgtatattttcctctttacttgaccaaccatgtttaccaaatgatactaaacaattgataagatcatctccacatggataacagctgcttatggagatgagtaagagcaggtgaaatgtttctatttctattcatacatgagcagattaatagagagctaaaatggtgttcagggtcttatgagtagcacttttggttagggttttcctgttaacatccattataaaattgcagctggatccctatggagagaaaactccaacagggtgaaaatgtatcttacagaggagttgtgagagggaagcattgaatcccagggactgggattcttgggtaatgttttgttgtagggaggccatggggactcctcaatactccacacagactatcattcatttatttaaagcccttcagtggcatctgtggaagatactgctacacctcctaatgctatctgtccctttcctcattaattgtagaaccttagcttttacttggacattgttacttagctaagaaaaaactaggtttcccagcatcctttgcagtgggatgtggccatgtgactaggctctggctaatatgagataagtacatgtat

SEQ ID NO: 63803 - DNA, 1230 bp, Homo sapiens
ttatcatcagtctctattatcatgagtctctattaaacaacagtctctattatcacagtctctattatgtgttttggctgaaagaaagttctctaaaaccaggaaatcaggaatcagcagttttaagttctccaggttatattttaacattgtgttcatatgcaaaacaaaggttgtgaatcagcacgaatgctggcaagccctggaaggtttgtgatcacggactttcacgagaccccaaggcaaggagagacagaagcccaggacaacagcatgggcgccgctttttagtcgggcgccgctttttggtcaggcgccacctggactacatttcccatatccaattgccgggctcctgcaggattggccagaacaacgcggaagtgattacgggtcgcccagcaacgggcggagtcctggcccgaaactggatgcgcacgccccttccctgcggcggggaggctgacaaggctccgctctatctctagcgcctcggagcgctctccggctttgctgtctagcccggcggcagcgcgatctcttaggcactttcaccgccttcctctccaggccctgcccctttgacgccggccgtcgcgatattgcggagactggatttcagcttcgtggtcggcggagcggcccctggagggcgcagtgcgcaggcgtgagcggtcgggccccgacgcgcgcgggtctcgtttggagcgggagtgagttcctgagcgagtggacccggcagcgggcgataggggggccaggtgcctccacagtcagccatggcagcgctgcgctacgcggggctggacgacacggacagtgaggacgagctgcctccgggctgggaggagagaaccaccaaggacggctgggtttactacgccaagtaagggggccgcagtggggccgcggacgcacctgggaccctgcacagcccacggacgccacctgcgcggggaggacgcgcactccagcgcagcgcgtgcggtgcaaagtgaaagtaactgttaaggagcttcagggaaaagggtccagggttcccagtaggggccggcccccttggtgggcctcgggtccagcgggggtcacctggtggcttcccggcgcgccctctgctgttcaggatgcagcactgcgcggcgcggcgagggcaaagcggcctcatccccgccaaaaaataaagatgttttaaaaagcgcacatgctcagctccctcctgcaggctctggg

SEQ ID NO: 63804 - DNA, 522 bp, Homo sapiens
acccctgccaacaccttggtttcagacttctggtctcctgaactgtgagagtcagtttctgttgagcttgtgctgatacgctagggcagccctagcacactgccacatctggtttcccggaggaacttcacagggtctttgttctttatctacagtctctggaagtctcagcagcctcctgtgttcgcaactgtcattccagagcagccgtctcgtgttatgcatttgcttactcataagcaaatatttcacaagaacctgcgagggccaggctgggccaggcaggtattgcaggtgcaaggatctatataagacagtgccctttagaagatccctgtctcattgagaagcgttgagtaaatgggtctctctggtcattctctccagaacatgaagccaaagggctgagagggagagactccaagaatgaattagtgtccagcaaggtatcgcttgtctcaggatgacaacttgcaatttggggatctctcaacgtcctgacctccatctcagtgggcatgt

SEQ ID NO: 63805 - DNA, 520 bp, Homo sapiens
cattttctttaatgggctaaacagccactttgtaatacctgtattttattagacataattctggatattgtttctgcagcgtttttgaaaagacaaacctgagagagcccagctatttaacttaagcaattttaaagttatttgtaaaatgatatgctgtcttttttgacccagttactttataaagctacattctttggcaaacattaacacaacttctccgtgtgtgggctaaataaatattcgggcaacactgattgagcactgccttgggtaaataattctctctccacacatttcctagtttataatgaggagttttcttcgtggtctgaccaaatgtaacattccattgaaaatgagacataaatccttgagtgagggagacgtggaaccagggtttgaggagggttattaaaaaggtgagggtagcagggtgacctcctgagtcccctgctctcccgagccttctctcctctctggaacccatggctaataggggacaggagagagcggaagc

SEQ ID NO: 63806 - DNA, 881 bp, Homo sapiens
cagaaatgagttaaaattgacaagttagcttggtaaacatcttgatttataatttattaaaaactacgtgggtatgtatatacatacagacacacacacttcttcaccacctgaacaaaaatcccttttgaatcatccttcttgccttccaaacaagtacactagcaaacacttttcccagatggcaaatgactatgcccgttaggcatttcttttagcatttgtgttgacaatggcctttatttttccttctacttaagggctctcacgttctagaatacatcttaccagcgattaattatgccttgagattgccaggagacgtagacgagcttttattgttttagccactgaatatacctctagataacacaatacatatttacagtgacaagctttgtattatttataggattatagcaaatcatcaaaaaacaacccaaaaagggccacttagaccaacatccttatttctccctcggcttcagcattgaattatgcatgcattacaaatggcaataaggagtaaaggtcggtttagaacaacacagattgcaaaattacaccatttgtttaaacaacattcattattgattattcagcataggggctgatagaaacgcaaacagtggcagtaatatcatctatttacgtaggccctttataaatgtgggaccataccctctgtttagatcggaacaattgttcaaattttccagctctgttttgcaagaaagtaaagatgaatttggcatctacttccttgtgtcttttaatttttgaaagatttttggtattctccctatatcactgaagagagggaattggggttcagatggattaagtaatttacttaaggtcctgcttctaaagttataagt

SEQ ID NO: 63807 - DNA, 1049 bp, Homo sapiens
aaatgtgttgtttgagatgaaccatcgtttcaaatgtcacttacttcttgttttataaagtatcattactcttttcttggacacagtctcatctttgaggtgtttgcagattttatctcctgtggacatttctacaaaatcaatcaacaaacttgagcagagaaatcatcatactagccacacacactctgcaggcattaataaaataatagtaaattctctttaaccaagtcctttgcagaatttcctggtagaagtttaaatgcaatagatgcagtaaagaaaagggttggcttaagagttgacttacaaagcttggtcctaacagctttttcctttatctgtttcaagagtcatacgatatttgatctttcaaacttacgtatttcttccattatgtttagtattagtttcgttttctcaagatacatatttaacaactagcaaaatgttggaagcggtctcctctgctgtctatttagggaaaatggaactgatctttctgaaataggcatgcatgtaatgatgatgtcattaatgcttggctagctggtggacttaaacccagagggcacttctgaaaaggggcaaagtgcatctgcttctgctttgtttatagactgtcagccttggatctgtcactccctcagaagggaaggattgaggccaggcaaggtggctcacatctataatcccagaactttgggaggcgaggtgggaggatcacttgaggccaggagttcgagactaccctgggcaacacagtgagaccctgtctctactaaaaaaagagaaaacaaaattaaccgggctgggtggcacccacctgtagtcctttggaggactacttgggaggctgaggcaggaggatcacttgagcccagaagttcaacattatagtgagccactgtactccagctgggtaacagagtgagaccctgtctctgaaaaataaaaactaaaaaaaaaattaagttagaagggagggattacgaccctcatgtgtatcaagaaacaagctccatgaagccccataggatggctcagca

SEQ ID NO: 63808 - DNA, 943 bp, Homo sapiens
ctgcccttaccctaaagtgtttggagggcttcgtagaagagccaaatagattcacacagatcttatttgtagagctgaatgtgcacttcattaaaatactttgtaaggtattcaaggatgggctaggagggtgaggattccaaatcagaatcttcaagccagtgatccaggccaaaggtattctgccagagtgtgaggaaatttcacagcctcatggagacacctcccctccccacccttgttgaacagactctggaaaagtcaccatttcttgttggtcctttgctcttggagcattcttggcctgacctgtcaaccactttagcctccaaggtatctgagcctttctttcgcctctctacttagatcatattcttcctggattttggaatcaggctgggacacaagccacctcctcctccattctagctgtgtggctccaggcaagtggccacacctctttgagccactagttaactcagctgccaaacagggattatacatttacctcttggtgttgcaagaattaacaaggaggatatttgtaaatctccctgggagctggatggtgcttaataagcaggcattaagggttgattatctttgcactctctcctgccagattttgtaactgagtccaggcatctttagaaacagaaatggtccctgctcttctgtatcccctgggataacctagcatcatttcgctgggttacacatcctctcttctctcctgtatgtcgtccctctttcttacggtggttctaagctctatggatcacttgtcttctcctctgagcgggaactgggcaattggaggttctttcccctcccgtgctggtgggagaattgtttagtaggtcataaagtggaatctccatttcagtctgatccggtcaattctggtaggacttcatccaagcacaaagaaacctttgttttc

SEQ ID NO: 63809 - DNA, 1131 bp, Homo sapiens
acagagtgagactgaaaaacaaaaaaacaaaaaaaaacccaaaactatatgtgcaagcctcaggaaccactaagacagattacacaatgctcatcagaactcagcaggcttccacagtgcagattttaagccctccagttgcctgttttactggcaccaagaacacaccttagcttggaggaaacattggccactttcttgttaaaaacaaagagagggaaactagatctgcctttgtgaggctggagcacctcatcaatgtattttttctgccttgctttatagtgttttaaatccgcctcggcctttgttcctgaatgagcacccgagaaggggagaaagtgactatctggccttagtatgtgtaacaaattatttaatgaacatttaaccaagatttgcaattcccctagttttatcttcccggtttccttttcttctgtgtgcccgttggcattttggtaatgtgctgcctctttataactctttgtagctcttttattacttttcttttttcttttaagtttgtggtgccttctttgatcctcccctctttcagtttccttttctccaatttcatacttatttccagtgatttttggctgcaacgcagtttagatattggaggccagcgtgattaaaccgaggccaagagtttgtattgccccatgacgatgtttctggaatgtttcttctgtgaacagtgatttttgtataactcactggacatgttgatttttccctgtgaggtgtaaggtaatgttttcctagcaaaaacaaagagggctgaaacctggtgctcagaatcgtttggaaacggaactcctctccctcttctttttacaccaagataaagaaatactttgcaaatcagctgagcacatgttcccagctccgtgccgggctctgtggtcatgggtttccttctttatgtcttactcatctaatgtaattttagagtgtgttctctttagataattgtgtgtctctgagcaaatcacttatcctctctggtcctcagttttcttatctgtaaaatgaatcagttaaccaagaatagccatcccttgggttaatagaacagtttaacttgaaaggaaataaaaaaaggagactaacatgggcccacag

SEQ ID NO: 63810 - DNA, 960 bp, Homo sapiens
tcatttgaaaaatactctgtctttattctttgaaatggatttactctcaagaaagttgcatgtcactttacttggaagagacgggtctcagtgaggtgtgcctccgctttcatgaaaagtctcccgtctgcagaagcattggctgacatggaagattttttttttttttaatacttttctttttgccggcatctgcgtagaatttttttttttttttttggtagtttcttaatggtctttagcaaaggaagtaagtgacactgatcggtgaaggcagacagtaagatttataatgtatttgtgctagctgattgccaacagaaccggcctttcccagtggtgctgtacgcagactcggaaaatcaatagggattaacctttgacccccttcacatacttatactgtgggctgcatcgcttaccaatatttcatctgtttcacttagctgctgttacttactcaataatgtgtggccaatctcacaagatactaattctttttttcaaatgcagcatcgcttgaagctgtgataaaatatcacacctttggaaatcaaggctcttcttgtttatttatttaactcacattaattagccttaatttaaaaaaaatgagaagagccagcatcatgatgcaagcattgactttgctcacaaaaacatcttgtggtcaacagtggggcttagggggcaggttttgtggctgtgacagaacacgtggcccctagtgtgtctgttgaaagatgggcccctttcaggaaaatggcttaccttactttttagacataatttttgttttctgttaaagggtcagttatagataagtatgctcccttgcaatgaaatgaacccactttatcaattttgaaggaatcaaaattaacttgaatacattgtctttttgcatatgtatgtagtgctttgtataaacatatgaatttgtaggagctgctcttaatg

SEQ ID NO: 63811 - DNA, 1628 bp, Homo sapiens
tgtttatattatttcatactgagttaatacacttgccaagactccgaggcagcttctggcttgacaatgccttctttaactagcctagtttctagaataaagttcgggtccaccaggccctctgagtggggctcaggacactctgagatggaagagactggagaaagccaatctgtttctccctgaaaatcatcttacttttttaacgcttcgtacctagatttggcctgggcagcccagggagactgttcaagcactggatacctagactctgctgggctctagagaagtgctgggctacagcgcccagtgccctacctcttggggccagccagcctcaccaaaaaatcacgcttctggcttgctccaaactcaggaagttgctgggaagtctggctagcaacaccctcattcccagtcctggccatgcctctctgctctccctagcacagggagcatgcaggcttaaggctggaagaaaccccaagcatttggccaggaagaggcaactagttccagctggcccacatactacactttaaaaattacccagatgatctgattctgtagagagagtgggtggagaggactccagggccatggaggaagattcggcctttctctccctaatcatgagcaatgtgatttggagagagaaggacccggttggctctgcaaaccgcatttccttggctgaacgccagaggagagaaatgatccggcaagaagacacaccattccccgtcagccccttcccgacccttgcacccctggatcttctgctgagtatcggattggtctgcgtccaagagctcctcgcttggccagcaggggctgcctggagaaggggaggacaggcttcgagttttttgggtagtgacttctgtggacgtgaaaagactgcaccagaaatcggaggcagccctccaaacataacttggcctcttcgttctccctgtggacacacaggctgtgttctcctggccaagagtccaagcgtgtttttggcgcgtgctgacactctatatcgcttttgcttcggaaacgaatctggtcagtgacttagccactctataaaaatgaagagcagagctcgagtgcttataacacgtcatttttacccaagacagagaagaaaaacgaaagagagcctgagcattcctttgactccctccacccccggaaggtatattcagagtctccaagactgcctccgcccactcacatgtttatggcccggtgagaccgcatcctccctttctatatctgtcccttttctggatgcagggacacagaatcccctaagtgggaagagctttggagtggaggctgttcaaagttctgtggtgattaattattacctacccaaggtctggtcattgctatacttgagttcttttcaggctcaagatctctacctttttgtgtgtttttttttttttttttttttttttttttttttgtacagagtcttgctctgttgtccaggctgtagtgcagtggaacaatctctgtatgctccctgcaacctctggctccaggtttaagtgattctcctgcctcagcctcccaagtagctggaactacaggcacctaccaccacgcctggctaattttttgtattttta

SEQ ID NO: 63812 - DNA, 664 bp, Homo sapiens
tggagatcacacacacacaatcagccagctctccaaagcaagccccacactctcttgatgctatcctcaataaacatgcggtctaaacagtaaccatgttctagctatgcagatgcagtttaaagacaaatcctttgagcctccagcatgcgatcccctcccaatctcattgctgctcccctaccctcttctgcgtagaagcgctggagccaggtgcttacgacctgggtgctagtatctttgtgaaaactgctcctgacctattgctttgtttattttagccggtgcctttgtagagggaaaacagcttagcaagcatttagtaggtagatccaaagtccccaggagctgttgggaagtccataggtgctgtttccattgctttttcattccttcatatattaatcaaggagtcagtcaatcaattaaacggatactattagcacctactgtgtgccgggcactgtacttggggccatatgcactgctgattcattcatttggattctacggtggctctttacccattgccatcattttgtaggcagtgagtgcccgcatcagtgggcgttttatgttgcaccattttctgagcaatgtctttggtccaccattaagcatttgtggccgcccaccccacaatatgctttgctttctgctttca

SEQ ID NO: 63813 - DNA, 995 bp, Homo sapiens
tggtcttcagggacttgtgggcattttcaagttaaatatccaacagtcgtgatttagggcatgaagagctcactcatcaagatgtatgtaattcagattttctgagtgtttaattcggcgtctttggtcacaaggaacagagttttacttgtgccacctcttctaagaaaaaggtttactgtaagagataatgttggcaagctgaggaaaggaggcagttttgggtaactgtctcttgcgatcccctcctgcacaactgtggcgttctctttttctgactagctgattctgctgctgctggatttattcattcttctccctcacagttttggctcgcacatgcttcctttttagctcatggccgtgcagttcaactcaacctcatggcatctttttatcagctgtccctgctgcaacaggcttagagttggtttcccaattccctagcgcagaaatccactggcatgagtcatctttcccattggtagattgcagagcaaacttctggacagatttgcccttggctcatgtatgattggacctgcggtctgtccaggtgtactcagagtggggaaggggagcggtggcaggtaatacaaaacccacctaagtagaaggacctatgaaccatgagggttttccttagcagggagtgccagtgggtagggatgactggttttgcagtttagggccaagtgagttggaatgacagctgtggcgtgttgagtcagatcaagtccagaattcctctccaccccacccatttgcagttccctcagatttattacgggacctggatgtgatgcaagcatgcccgctggctcaggctgtgcctcacagctgcaacatccctggggtggagaagccatgtgggacctcacagaacactccaccgtccctgctaatggctgagaaaggactctgccctcatggatggggttgggggacctgttatcttcttccaggttaatcttggtttcagctgctttaaactc

SEQ ID NO: 63814 - DNA, 1503 bp, Homo sapiens
agctgatgttgtagctgtatgatcacccatgtaaaactgtttatttagttatttatttatttatttgcttttttacttccttttctatgcctttggtgactttgtgtaatgctgtatgtaccatcagagcacatactgcttttgtgcacacatacattgaaaacaaaatgaaaaaacaagaataaaacaaaaaccctattcctattcctacaattctggtactttgccacaaggtggtggtagtgtatcttgagtaaggaatatgacctgctagatataagcatctgtttatttacacactaaggaatgtttgagtgtggaacgtggtttagatgctgtgcgtacagcagtgactcagataggtgtgtattctcaagaagctttcattctaatgacacatactttgtctccagtcagagttatggcaggtttttttttttttttttttttgactaaattcacccatatttgatggcaagtgtgatcacagcatgtttataaaaatcattcttaattaaggcatttccatcttatcaagccccctatttaataaggatatcaaaaaagaaaacagttttcgtgcatatgtgtagctttttagattcactttttccttatttgacccatataaactttgtctgtctgtgtctgtcagtctcacacacatccttcaacacatctcttatttctttccagagccaggctaaagcacccttgccatcttctctctctgctgttaaattagatgccttctccaggaatctctctgggggcatcctgagccttcccgattccatttcagatttctttctgtaatcaagagctccatctctgttgctttcctggggctcttcctctcctctttttgaagcttttcatttccctttatattctttcattcgtcaactacaaagaagctgcaggcaggaacaagagagctcagcacacttggtgcagtctctctggcttggtaattggtcccaagaaaatagtttttttccaattatggcaacattgaaaacttatccaggagaggaaaggctctttcagctgctctttctcgatccttgcagtttcccttttgacctgtgggtacacatggtactgacgcaattggcacctcagatggttcttcctgacagctacccttgcaactgactcaggatacaaactacctttttttttggagacagatctcactttatcacccagtctggagtgtaattgacgcaatcctggctggctgcagccttgaccttctgggcccaagcagtgttcccgcctcggcctcccaaagtattaggattacaggcatcagccgtcatgcctggcacaaactgcctttggaagtgaatcagtcagttgcctagtaggcctaaggagaccatgatccatgtaaaccatggaatattttaagcagaaaagaacgtattccccttcaaggacaaagtgctggaataattgacatccaggttatcacagagccttcctatagtgttgatt

SEQ ID NO: 63815 - DNA, 810 bp, Homo sapiens
tgagttgtaatagtaaatacagatgtagctgtgtcacattaaaagcacaaccaaattgtagtacaatgttcaggacacttttatgtcactttaaaatgtagagtatcatctaaaaatgagcaattgctgtgaagaaactggggttggctctgattttgtggctcagttttttttggtttcttgagaagatcatctttaagtcaaaagttatgcaatgccaagtactcatctgtgtaatctatttcagtttccaaaatttttcatcacctggttacaaacatctgaaggcaagaaatagccaagattccattgcaagtcccagagtaagttattattagacagaaacaaacaagtaaataccttgggcctgagctattgcccaaaccagtcctgacttggcttgggttctgaccaactgtttttgatcccacagtctgaagtacgtttgtggaaatacaaaggtcaaaccttcccctaaccctctgtaatccctggtggagctaaggaatgaaaagttgcttaaacattttcctgttgccagtttttcttaaacattagtgctattctttttttttttttttttttttttttttccttcttcaaccctgactctgattcacaaagaatagggaagcttagccaactgcagtttcaaagtattgcttcttaagcctgggccaagtgtgtagacttgatagaattctgattaatgcatcttattacattaattttagaagaaaccagaaggcatttctcctattcctagtgcaggccagcctgccagaagcatttgcctccttaaagagctaa

SEQ ID NO: 63816 - DNA, 589 bp, Homo sapiens
ggagctcctgccacgtattttgtccttttttcttttttctagcaactctcgagaggatgagacaaatggattgtgaaactggaaggagggtttctcattttttaatccattgttttagtgagagtttaaagctttcctataaaatatgtgggttgagaaaaattggaaaagacctcttcaaggactttcctctatgctccctcatgtttcaagtggcttttttgcatgatggtgcatatgtctttgtttctgtacagggccctccatgttcagaggcagagtaacgtgaattcatttcgcgctaatgagagttgcgatatgtcggcccaaactctctgtgtccttttcttcttgggctgatgaacttgtcaacttttaaaaaatgtgctctccaaaaatttccagcaggactttcccaccttgctgtttaaacagtgaatcagccctgtgggctttgctgcttacaacatgattccggtgaaaccacaggtctcgtcatgtcccttctgtatccatggtagtcccagtgggaaagaggtaacaaacccaaattgagtaatttcaagaaattttaataacaaaggggcta

SEQ ID NO: 63817 - DNA, 1133 bp, Homo sapiens
ctacctcccagaagctgaggcaggatgggcaggttgccacaccctcccaacctcctgcaaccttagttgttagtgaaaggttattaaataggcctcacaatcgcaagccaggtaaatatgtcattggagaggttggttttgtttgcatttctggtgaagttgagttgtttttatcccctacaaggtcatctagacatttttatccccaaggtcaggagatctttctgccagaggtcagcattccatccagctcctgcctgctctctgggtggccgactgtgccagtagaaatgccagctgcagccaaaggacaggctttccatccgagaaaagcactcacactcgcatttcttttctggttctgttcctcccctacataaccagaaaaagctcgttaacacatgatggcaaccaggctccaatatctgccagttcccctgtacagattcctctttagcattctctcggcttccctcctcaacaattaattcagatgagcagttgggagagtgcaggatccagttcaaaaggatctgtccccccgtgaaccccaggacagggtgagaggccacctgcacactttttttttgtcagctcacaccctgttggccctttgcaaatatttgtctttcctcatgcacgtggttattcccagaaagatccagtgaattgtctcctgaagataaaatacataaaagggcgtttcaaagtataaacagtgattttaatgaaaaataagaagaaaatgcttatgatacaacattaggtggaaaacgaaggaagaaaaattctgtgagtctaattatggaaaaaattactaagatatgttttaacatgccctagacatgcacagaaaaaaaagactggaaggaaatttattgagatgttattgtttatgagtgttctaattatgatttttaacaatatattatcagagttttctgacaaagaattaactttttattttttttgagacagagtttctctcttgtcacacaggctggagtgcaatggtgcaatctcagctcactgcaatgtctgcctcccagattcaagcaattttcctgcctcaggctcccaagtagctgggattacaggcacccaccaccacacccaactaatttttgtgtttt

SEQ ID NO: 63818 - DNA, 1183 bp, Homo sapiens
ttgtcaggagcctggtttcgattttttttcttttttttcgagatagagtctcactctgtcacccaagctggagtgcagtagcgccatctcagctcactgcaaccgcaacctcctgggttcaagcgattctcctgcctgagccaccaaggtagctgggattataggctctcggtaccacgcttggctaatttttgtatttttagtagagacagggtttcaccatgttggccaggctggccttgaactcctgacctcaggtgatccgcccgcctcaggctcccaaagtgctgggattacaggtgtgagtcaccgtgcccggccgtggttttgatttttgcccctgtgagttactatctgcacatttgagggaaagttatttaagtcctcaagcctcagttccctaattgtgaaaggggtgtaaaagtaaaatctacaagcagcagggatagatgggaactccgtactttcctctccatttttctgtgaacgtaaaactgctctaaaacaaagtctgtttaaaaagaaattcacgcttaaataaaatccacttcatgagtttattgtgcagattaaatgagataagacagtaaaacacctcagcacatggtggtcaccctcacctataattacccggtcctcctggaaaccagtgtactgcccttcttgaccttcaaatagctgtgacctttgcaaggcacagccctgacgcaaggatgcttagaacttggatcctgggcctgttttggcagaatgaactgacctagaatcagcatggatcagactcacaaaagtatgcctgttccctcagcccccagcctccaccccaccatcattgcctgttattggctgagctcccgggccttttccctggactaaagtgttgtttgcttttcttctgcagctttttccagagatatgagcaaggttcacttaaataaccttatcagtcttaccttcaactcctcccctaggttccccatttgagcagtgtaatttctatgtaatcccttaggcagttcctgtggcctcccttctccaattttagtatgtgctgccgaagctagcacgtggcctctcttttctaagggcctccggggcaggtgtgtgtatgtgcatgcgggagggtggggcgtggtcacatacacatctgataacgtttttctactcctttcttcatcttggg

SEQ ID NO: 63819 - DNA, 546 bp, Homo sapiens
agatgctccctagttcatgccactgatagaatttgaagctgtcttggaattaattgttaccgtattgtaatccctgggaaatatttacgtaggtatactattatcaggaagtagtatcttatttgatccttgactcaaatgcttttaggtaaatattcttaatagtttacagaggaaattagcttcagagagcttaaggaactcaccactatcatgctagatagtgggagaaggaggagtcaaatgcaggtttatctagttccaaagtctgcactggttgcacagggccaactctctatccagcattgagcaacctcaaccgagtaagggatcaaaccacaaccaaactacaacagcatggcatcaactcagcttaaaagaatcaactgaactgctcagctggcattccagacatggaacaaggaacaaagaaggagggtttctcatgtttccatcagttgtcacagttctgcaaagataggcatcgttctccccttgaaaacagtctacttccccctagagcaggttacaagaaaaaggttgtta

SEQ ID NO: 63820 - DNA, 737 bp, Homo sapiens
ttttgaatgattaaaaaacaggttcagattgtggcatttgctcagtttcctcaaggcatgagataggctttggaataaaaagctaagctggttggtcccagttctcctgactccaagcgtttcagtctttggtgacaatttcctccaactgctaatgacaattcagcggcaggtgaccatccttgctgggacacggggctcctggagcaagtcctgtgcagctgaagaggggagcgaatgggaactttggaaggaggaggaaacaggaagtccaagcgagctccacgaagcctccgggcaggaacgcaaacaggaaagcggttctcagccagtggtggcctctcgctagctaggtctggtgtccccaaggcccccctggtgcgtgttatttttggaccatgccacgtggtgagtaagtgcctgttggattagatagagtcaaggccagcttccaggctggtgtctcccaagcaacaggggtcagtggccccagggacatggcctatggcggagtttcaaatcacactacccccagccaccccccagacatctctgaggcccttggataacaaaaggaagcagggaaagaaagagggaactgctcttccttcccctccaatcagaggtctccactctgggtacagtggccagatctgatgaccttagcaaagccgctcttggcctggagaatcttgcaagcttggactttctggggctcgtgcactgatgggcaagct

SEQ ID NO: 63821 - DNA, 1033 bp, Homo sapiens
tgcatttgttacctagaagtttctttcttctagttgcgggggagaaggaaagaagaattatggggaagaaaagtgaggaatcagtttatagccgaataaggtcaacagtgtcaactggggacccagagataggcaagggggaagtagctatgaactgggcacactggtttacttagaaataatacatctttgagcctgataacttccctgatggaagaagacttccactgggcacatcctgaagaagccgcactgtttacaaagtactgtcacccacagcgccttcttttgtccatgtgacaactctcggggcatggagcaccctgtggcagcccacagtggtccgacccacccatcttctttgttaatgaaagtcaggattttattcaggtctgcccagacagtgtggctgtggggaaatctggcagatccccagccctgtggagcatgtgtggggtgaaccttgaccagtccaaacctgtaatggttaattgcataaccaaggccaaccattgacagagggatggacgcctgacaattgcagcctattaactatgtggggaagcgacttctgcaaaacattccttgctcttacgaaggaataaagggctgcacactctctgcctctggttttgggtgggctggtgtaaaaaatgtggtacctcgaaccttacacatgtcttacatctgaagcttgagaatggtggagctgggagagggcaagagtccgggccctgacatcattcagctgtggaaataaacagctttgcaagggcacctacccttggacttcttacgggagataactagtcccagggtgttcacaccattcagagccaaattttctgctaccaaagacccaaaatacccagttacaatcctctacgttgcctctgcaagctgggtctatgggagttgaacccggcccaattacctgtttttgtggaaaaaagaagctttattgaaacacaaccaggggcattcatttacatattgtcgatggcagggttgagcagctgcagcagagatcatg

SEQ ID NO: 63822 - DNA, 1572 bp, Homo sapiens
tgcattgggaggttgaagttctgagtaactcaaagcagttttggagcagatgcaaaatttcatgggaagaaggctctacggttgcactgttttgttctaaactcaaaaaagtcatgaggcaataaaacaaaagtatgaatgccatgctataagtcttcgaacgtccatttccaagccaaaaggaaaaaaaaaggaaaaaataattataccatacatgtccagcatgcaggctttttttttttattaatataatgtctcttttccataaagtctttgaaacagttatagttcattgttgctaagacaaagtagcaagcataataatgcatgagatgagaatgagtttttttaatggcagactaaactctcagatttggcatcacaaggccaaaactcacaagtcacacccagaaggttgatgcaggcttgattgtggaaggttcatgaggatttttttctctattttagcataacaatgctaaaaaaaaaacccgatggaactcggcacgctgcaagtctataacatttcacatttttttttcctttgcaagctcaatctcacatgaagaactcaggagaagaaaaaaaaactttgcttttttttttctttcatctcggaagagatgggttgagaaggagtgagggtggaggttggaaaaaaggtgggcaacacagcaagctctaaaagtaaaattaaaaaaaaaaatccaaacaaaataaaacacacacacacacagaaaatgaacaccagttcatgaactgaaggggaagaagaagaaaaaatatgtgaatgatgcaggcttcaaaggtgatcaacgtttcacatgaagaactctgctgagatcattgaacattgtgcaagtccgggggtggggcgggggggtgtaaaaaaaaaaaaaaaacaagctagcaagttatggagaatttcagattggcaatccatgagccagacacccattccctccccagtttaaaacagccaccaccaccacaaactcgagcagggtgtggggtgtgtgtgtgtgtgtgtgtgtgtgtgtggtgtgtgcgtgcgggtttgtgtgtgtgtagggggccaagggggccaaactcggtgggggtgggggtggtgaggtggtggcgagcatggctctagaactagcaagcccacacccgagccggacccccgcggagcacttatcagggtggctagctggaatcgcgtgtcagactcacatgaaaaactcgggagaggacgggttgtcgctgctcgagccgttttctcggaagccgctgctcaccaacttctcgtatttctccttgtacgcgtccctctcgcgcaccagcctggagatctcctgcttgaggtggtcgacttgctgcagcagctggttcttctccgactccaggacgtgtctctgctgcaccctcttgaagcggcaggactgggcatagccgcggtttttcagggtccgcctcttctgcttcagccggatcacctcctccttgctgaccccgcgcagctgccggttcagctcgcgcacagacatggtcaccagctgctcgtcggagaagcggtcgtcgaagtgcagg

SEQ ID NO: 63823 - DNA, 3816 bp, Homo sapiens
ggccgcggcgatcacggcggacaccacggcggcggcggggcccatctcctcgccgctgccgcccaaggaggcgccggcaccggccccggccgccgcggccagctgctgcgccccgcgcgcgtagccatcgaagccgccctggagctggtggctgttgctgatgagcgcctcgaccgcgtcctcggggctgaagcccagcgcctcggggttcagctgctgcgggtagccggtcatccagtagtagtcttccaggtgcgccttctgctcgctgcccgagcccgggctgggcgccgagaagctgggggaagggggcaccgagctgcacggcgtgctcatgggggtggaggacagcgagcccccggcgatgagacggccgcactggctgatgatgcggtcggtctccaccggttcctttttcacttcaaacttcatcagatcgaagtcattaacatattccatggccaggggactggtgggcaggtcggagttgctcattgccagttctgatgccattctcctgccgccgccgccgccgccgccgccgctccgccagatgggctgcaggagaggggccagcgggctgtgctgggtggccagcgggtgagccagcttgccgggctggggcgcttctagcttgcgcggcggtggctggcccgaaacctccgagcgcgctcacacacacacccccccgccctgcccgcgccccccgcgcccgccctccctcccccctgctcacgccaatgtgctccctcgctcgccccggcccctccttgctcgctcgcctccttgcgcgccgagccggcggcttcaggctcgggaagatcctccgcgagctgcggtggcggcggtggtggctgcggcggcgaagctggaggagcccggcccggtgcgcggcgtcccccgctcgccgctccgctgcgcgctttgcataaggaagggctcgcctcgccggcccgggctgcaggcagggcgcgcgcggcgtccgctcggggctggaggcgcggcgggcgtctgtccgggcggcgcgggccttggcacgggggagttaacacttcatgcttctcgcctcctcttctgcttggctctctttattattttttttctttcctctctctccctcgcgcgctctctacctctgtgcaaagtgcaaggcagaggtgcagcccgactggaggagagggaggggggagtttagttctttcttgcctttttttaaaaaagcaaaatagcgaagtcctggggaaagacgaggcagagagcaaaggggggagggggaggccaagccgacaagcagcccgagctacagctagaagatgaaaaaagattttaaagcctctgatccagcaagaagagtttaaagcaattgctgagttttatagcactcgtgacgtcaggtccaaatgagaaattgactggcactccgggccaatgggaggcggcgagagcggccgcgattagcataatagtatagaaacaaggaaacttttcggagctgtcaatcagggcccaatcagctgactgtcagctgggacgggctggcttaacccttcctgcgccgctgcctacccgggagggaacgaggcccggcgcaaagtttggtgtaagaggggaaggagtttttccagaggggcttcggcaatccgggcggacctgggagggcggtttgcttttctttggagcgcgagacaggcctcccatccggagccccagctcgctgggggctcactcggctgggattggcctgattcccctcccctgcctgccctccacccccaggattgtgaattcgcctcccagcttttcctcctcgcaccaactctggtacccaggtgtctgccggggaccttccttccctgagcctggccgtgcccggcgctcaaacttggccccaactctttgtccgtctctcgggcgcccgtgcggggaagggaccgggaagggagggatgcagtggggtgtccggatcggggctgcgggctgggcgccgcccggccatgcgcctgcccagaaggctgggcatccgtggagagggaaagcccattttatccctctctttacaacgaggtaaaataagttgtttagaggccattcttcacggagaccggctgcccgctggcgtcgcgtgcccttggacagagcgagcgcctatgcgagataactccggggaagctcaaagtcaggtcagccgggctcagccttccggctcctgactggccggagtttggcctttgagactcatattgcgcgctcgctctctctctctcttacacacacacacacaaacacacacacactcacactcacccgtccccttacgaaatctgacctctgtttatcagggtcaggcgcgccctttgcacttttacgtttcctttaattatttcggacttgatcgtggcagggagcaagggggaaaaacaataccccagccctcaccagctaccctcgaagggttaaattttaaaccgcggtttctggaactagtccggaaacgcagagtggggggtggggtgggggaggctgctccccccacccccagttgcaaatgctaataagtagttcaaatttctagattgattctctaaaagtttatgcaaaaaagaaataaaaaagaaaaagaaaaaagaaggaaaccaacaactaactctgtttctaagattttaaagcgataggcaagtcgaagaagcagagatttatttggagagaaagctcctgaaaccgacccagcctttggaagaccagcccgtctgcttagaagttgggactgttgattccttcaattaatgaaatgcatttggtgtttttaatcgtatttattttactttatgagaagggggagacgctaggagggtgcattaaaaaaaaaaaaaaattctgaaaagcctgcaaaaggatcgaagagtggaaactattgttggagcgagttggtttttacctcaacagcgccacctttcggcaaaggtcagttgaaattgatccgtgtccagttttgtcgatgaagtgaaaagcagctggttacccagtgtgggaggaggaaagagacacacaaagttagtttgactgaagtgggagaacccgaccctataggaaaggggccgaagaaagtgctggcagatgcagagatcatttttgcccctcctcttctccttgattgttgacaaagaggccaggggatacagacaccctcggggtgtaatttctggctgagacctttgcaagaggatccccatgtaacagggccccaaaccctttaaaagtgccaggatggattttcaacgggctttatggcaatatcaataggattaaagttacttgtaattcagtgataaatgagatgtctctagtaagtaagattaagtgcagtgctataaagttgtttatctggaaagtaattctcagaaaacctgacttctgacacttagtcatatattaagccagcgtcttgaacattgcacttcagaatggtcttccccaccccgcagcatgctttgctatttataacctcaggtgtctctcactcgttccttgcaccatattagacctgtgttaatttctctgatcctagtagacttcagtttcagcaaacccaggaatccttaatggaagacttcccaaaagattcgtaggcacaccctaatctgaaaagggcagcgctgtcggtatttttcagacaagtagtgtttcttttcatcgtgactgcagagaagttgttaataagggtagttttggtcttataagagcattttgttgggtggaataaactatgtctattaccagtttggggaagaaagagtgaagattatgtcaatatttatg

SEQ ID NO: 63824 - DNA, 1127 bp, Homo sapiens
ggctggtggtggggtggtggtggaaatagaagcgttgttgctggtggtgatgatggtaatggttatggtagtggtagtggtggaggtggtggtgatggtgaggataggggtggggtgatggttaccatgacagaagtgataagagtgatgaggtggtgatgatattgattatggaggtggtagctatgggattcttgacggtggttaattcaccctcccagatgatattttcttttgagaaattctgaaaaaagaacacttccgttttctctgtgcctttaaaggtcgattcacttgtttttttccataggtttcaggaaagaggcactggcctttacttctccacctcgattcacttccatgctgttgacaaatgttatagttgcccaggatcagagggagagactgaccctgtgaccatttccccaaaggcggcctttggccactccgtgcactggagcacatgaccctctgcctcgcccctgccacattaaccaggtgactgtctgccaaggcccagcccagtccaaagggaattgggattcagtgtcccaaacaaggcactgattagctggtaatcaggcagcgattagcaggtcgggtcacctgcagttcagtgcccattgttcccagcaaagtcctgggatatttgccacacggctggccagtctgaatgtctgaggattccgatgcctgcagctctgctgtggagatgtgtgattaggaacaaatcctctgttctctaagcccatccccccaaggaggcagtgcagtgtgaatagtgaatccccttctctattcacacacaaaggtttggggagaagaatggcctgcttaggagctcaacagtgacagagaggtgaggccccaaggatgcactgaagaactgaaagcaaattagcacattcctcttcctgcaccatgatgactgagagtggaggaacgggcaagcccacatccagactgggattctactgtgatcttgagatgtgaccttggacaagatttttaacctctgagcttgtttaccttgattttgagagtttaataacacttgcctcttcagcctttgaagttcagatttagaaaatgaacataaagcagttactacagtctctgtagcgtgt

SEQ ID NO: 63825 - DNA, 881 bp, Homo sapiens
ttcagcaaggaaactgtgctaaatgctcccgcatcagcgtgtgtgtgtgtgtctctctctaggggctgggggctcaagtgttgaagttggttcagcgtgtgtgtgtgtttgtgcacgtgtatgggtgtgtgtaagggctgggggctcaagcattggcggtagctcagcgtgtgtgcgtgtgtgcgtgtgttcaagggctgggggctcaattgtgagaggtggcccaggggccggttagagactgggaaggacgacagaggcaagacacgcagcgagtgctctcgcgagagttcaccgagttgataaaattattaaaacacaaaatacacatttgcgtgagggggaaaaaatacccgcttgtccgtcctgtcccttcaggctgcgcaacgctggagggcgatgggagctccacacaggtgggacgagcctagcaggtaaaccttccaccggcccgagctccgcgacgccgcgcccccagccccgccccgccttaaaaaaaaaaaaaaaaaagaagaagagaaagagccgccgggagaagcgcggacgccgccgcttcccgggctccagccgcggcccagaagaggaggagcccagacgcccttcgcgcgccattggtccatccgcctagcaacagccgcggccggaccaatgggagccgcgaagcggccggccccgctccagaaacttggctgcggagaagttcgctgtcccagccaggaaaacaaaccaagagacccttcacaccccagccctaagttttctttcttaccctgcctaccctccccctttccctttgcaacttgtcaccattcccagctcatgcatgctttagtcgccaaattctgacgcggacggagggccttttcagaaggtcatctctt

SEQ ID NO: 63826 - DNA, 1212 bp, Homo sapiens
ttctgggagagtgagcatttcccagggcagtgagcacattgctgttctggacaaaatcagtctgagcagagaaaggagaggatgagtttgaagtaagcagctgcctatatccatccaacagttgagctcagaggcaggcagcatgagggtggaaagctctgcagcccacacgttgctcagcttgttcactctaactttccagcttctttatttgcataattatagaaataacccacccataccccttctgggggcatctgtgagggttaagtgatgtcacttataaaagccctccatacagtgtccagcacacagtgtgtgttctgcaaagagtagctattggagttagtgctgggagtgacaaccttccccttgattccaccagccctgctgggcccctcagtgctttgctctgccatttcccagagccctgctggaagaccaggaagagtgcctgaagccgcggttgttatttgaacgcaggccttcctgcaagctggactttgttcatccctgtggacagcatatctggaaagcacagacactgtaaccacatcgtggtttgacctttaagctctgggagcataaatccttctagcgtcttgtttttcacggtcagagtccatgccactggctccccactcgtatgagtgggctgaggaccaatctgctctcccagcactaggaaggatagacactaataactcccaattgatatgtaacttgccctaatattgaccctggccctgatgactcccaattgatatgtaacttgctctaatattgaccctggccctgtggttagtgattctcattgcagggtaaatgattggaccgttttggcttttaccccatttgacattttcacagcctctaccaccatcttcaacaacaaaataagacagcttaattaattgtgtgacacaaggatgagccatgctgttgctctttagtggatacagtggcaaacttcacagtatttcttctgaatcaactagaaggtgtgactgccctttatcaaatatgacaaaagtggaaagtcccactttttcccatcagagatgtatctacattaaaccatccgagtgaatgataataataatattattattaatataaatggaacgctcaagacatgcctggtgtgctaagtatgttagattagcaacaaccatttattcttaaacagttacagaattccaaatatctgct

SEQ ID NO: 63827 - DNA, 605 bp, Homo sapiens
gggcattgaaatagctcttacaaaaggttctaggtagagtttctgccacagaaactttctcaggccataaacagccttttaaaaaaaatatttgggtaaatgttcacattttgagctcttttggtgctgaagttgtgggccccaccttttgtggaattctttcaactatcaagaccatgtgaatctctgggctaagaggtcaccgtttctgattctgggacgtgcagtccctgcacattcttagtccaggccggcagcccagaaactaccctacaaaacatttcgcaacactggcctgagtacaagaagttatcagtgtgagcttcctacacatccacatggggcttctcagtatttcacctttggaggaaacacaggcccaaatcgttagtttccagagccacagatggtacagataaatccccaatcaatatgtgcagtgataagttcttatcagtgggaatggatcctgggaagtgttcaccagttgatattatcacgctaagtaagccactaataaccctgcttcctatgtcgttcctgcattctataaactcaatcccatgccttaatgcccacaatgggtctgggtactttaaatttca

SEQ ID NO: 63828 - DNA, 978 bp, Homo sapiens
cagacttgcatacaaaataagttaaaaaaaaaaaagtgagatgatttaaaggaaaatattaagtaagtaattgtttaggagcagaaccaataaacaaaaatcacaagggaagcaataacatgacaaaagcttgggaaagacaatggttgaatatgaagcctgaattaaaagccatgttcccataaatggaaaggctgcaactgtgtatcaaatccttttctcccttctcctctccctccctggaactgcctgttccaaccaataaccaaagaacctagtgcagccaaggagtcatgtgaacacagcaaaaagcagcaggaacccagacgtctggccagaggggtggcctcatgccccacagctgggcaggggagaggatggacaaaaggtgctagaattgctcttctaggcagtagttacagcataaaaacaaggctatctagcaccaaaccagacactggctttggaggattacaaacttgaatttgagtcatttagtaccacaaggccgcctggatgagggcatgtaaacagatcactctgacacaaagacaaagatatttcctctaagagaaggccatgtgtacacagacacagggatttgtccctaggtcatgtagcagaggaaggtttaatgtttgaatgaagacagcatgatgcagcagagtatcagaaagacctgagttctaatgtcagttctctctatatattgcaaaaataagtgactttgaatcttcatagcaatgctgggaggcagaatttatattttatcaacattttacagatggataaaggagcaaaatacagtaagtagtagaattggcatgtatgatatttacatatataaaaacagccctgttgacattcaggaaggcttggaggtccacaacagtgtttgaattgagaacgcaaatggatttgttctttggtaatgacatatatattccatggtgcagaataaatacaatgtgtgctatg

SEQ ID NO: 63829 - DNA, 762 bp, Homo sapiens
gttaaagtaagttacccacaggttttttctagtcctgaaaagcaatttatctgcctgtttcaaattataaccacatcaatgatgatgatgatgatattgtccttgggcatatatgtgaaagaagcaactcgtgagaagtggggccaacttgttttggagattccaggacttgtctttgggcaagtctccttcctgacaaccccctccccagtctgtggggacagattcaggcttgtgtggcacttgaatactctcgatctgcccttatgtaataagtgttactcatgtcccagtatgagtcacccaatccctcgcccggggcatctccgccaggctgtagagtttcccacctgccctgatccctgtctgaatagagatagcatgactcagcgccggggaaagggtggttctctctgtctagctgatgtcctcagctccaggaagctctgggcttgcggcatgacagcagagagaagggccacgctgctcacgtcagcagtgccccactgagggggcccgatgcaggaagaggcagcccagaggccagccggtccccaccacccagctaccgggtttggagaggaaacacagagcagtgtctatttagatcttcagcgaggtttcctttctttctccacggtctcacgggcagtcagaaggatatgaataataataacaactgctactattttttgaacactgaatgcttgcatttggcaagcatcgtgcaaggtattttacacatgttaacacatttaatca

SEQ ID NO: 63830 - DNA, 1940 bp, Homo sapiens
gcttaccaagtgacagacacatagtaattcctcagtaaatggtaaccaacatgacttcttttgccaccctctttgcttacaaggctactgaaacgttggtctttctttcttttaaacgtgccaagagcccttgctcttcctggtgtctttacctggtgagctctgccccatatatccttataactgtgtggtgcacaaaataatggtccccaaagatgtccatgtcctgattcccagaaccttggaagatactacttcacgaagaaaaagagactttgcaaatatgaatgagataaagacctgaagataaggagattagcttcatttgttcaagcgggtttaatgtagttataagaccccttaaaagtggacatgagaggaagaagagtcaggaagatagatagcccaccattgctgggtttaagcatggaggaaggggccacaaaccaaggacggtgggtggccaccagaagttcaaataggcaaggaaatgaattctcccctagagcctccataaaaaatcatggccctgataacatcttgatttggacctagtgagacctgtgtctgaccaacagcaccataagaaaataaatttgtgttgttttaagccatcatgttttaagccatcaaaataacaacgttatttgttacagcagccaatacaaaactgaatccttcccactcaaatctcagctcaaatgtcactactcaagaagtccttccaaactgttcaatctaaattacacatcccatccctgctccccaggtgctgtccaagtctctcattctgtttttcacttggtacttaccagtctttacaattagcttccaatgtatttctttagttaattccctcttgccccacatgaacttgttctcctctgtatgaacaataccaaaaagagcactgtagcaacaacatctaaaagagtgcctggcatttaacaggaggaaggagccacaagtcagggaacttcttacctctcatgtttttcaaactgacctttaggaaatttagcgtggcatacaggctgccataggcaattaaaaaaaaaaaaagccagtttactcagaattgcaaacaaatgagatcagcatatttgggacatgagtgttactgtttctctatcattgcaaaataccagtagtctattttcacattctttcctgttaaacccacacagaacctcagaatccttcccaacccaaagcgcaaggcagccattggacatcaaatgtggttgaagtatttacaagataaaaaaaattatttactattcttaaagagtaatgactgaaaacaaaggttcatagaattgtagaagaaactaggtacatcaaggctgagggaaaagcataataataataattgattgcctactatgtgctaggcactgtcctaagctttgacatgcaatatcttatccagtcctcacactgacttgttgaaataggccttatttttatttcacttttgacagatggggaaactgaggcatgaagaagttaagtacctttcccaaggtcacagagctaatatgtggcacagtagatatttgaaactcagaactttaattctggacacctcacagttagttattatatatatatattgtcagcttgggatatggagtgtgagatctcttcccttgaatatttgaagggctgccaaatagaaaaggattagatctattctatgtggcttcaaggacactgagacaacccttcccatttgcataatacattcccataattcacgcatttaatcctcaaaacaaccctgtgtggttgccataaaatcagaggaatctgtgattgggagaggagaactgccttgcccaattcacacagttcagaagtagcatgatcaaacctcaaacccaattctctttactaaatgtcttgggcttgttccattatgcttaattacctgtagc

SEQ ID NO: 63831 - DNA, 496 bp, Homo sapiens
cagttctgatgtataagtaatatttgtcccaaagatgtttagtgctcactgaataatctacatgctcccctatctttcctgtcctttgtgaagatcgactgggacatatgccatgagttttggtcgatgggatgtgaatggaaacgagctgtgctgcttctgggccatgaagccacccattcagttctctcttctctgcttcagagccctggcaagcaagtgttgaagcagtggcatcacaagaggatgggattctccagggtccccgaggaactgtatggagcagaaactttgccaactggcatcgacatgttatataaacaagacagaaatttttgcagtgttgagtcactggaatttctaggttacattattactgcagcataccatagactatctggaaaaatacaataatcaaaggatgagatatggctccaccccaatgaaaccactagaatttcccttcaaagagtggtatgactcaggttcaacacag

SEQ ID NO: 63832 - DNA, 736 bp, Homo sapiens
ttctttcctataggcaatggagatccaactaaagttcaggacagagatagataaagggaaaacaaaagaaaaatattcttccgttggcttaccatagtcttgtttctgtacatagcatgtcccttgagtagcaatgatacattctttggatcaaattcacaggtcatttctgcaaagttttgcatgacactgagagaaggagcaaccaaaggactgcaaacagttgcataagtaaaagtgagacataaaacttcatagcaacctcaaatgatgtcactctcaaggacctcaaggccataaaattcagagagcttcccaaacaagccattactgattttcacggaactgaaaagtaccttggaccttgctcctttccattcataaaaacattgttatcagtgaatgagctcaccacccattgcaactgtaagctctttggcacgttaagttaaatcattgttgaactcaactcttccctttgaaccctggggaatattaacatgtcctcccaagggccagggaggaacatatgtgtctttgaccctctcaaaatgaggaggatggaaactcccatgtattagccaagtacatttgctaggttgatgatgtgcaaagaggattggtcagaatcctatcccaaaaatcaggaccagctccattatttgtgggacccagggcaaaacaaaataaaaaacatgagacttcttggtcaaagattattaaggagttttaagac

SEQ ID NO: 63833 - DNA, 1006 bp, Homo sapiens
aaaaaccaaacagaggacaaaccaaacaaagaaaaaacaaaaccaagtctgtgttaataaacacactcaggatttggctaggatggtacgccagtgtccagatatgctggagtatccaaccacaaggccagggtcctcttcagtttcacacaccaggctctggagctagaactctccacctggctccagcaggggccaggaatgacttgaagcaaggcagcacggcacttgcaagaagtactttatggcgatttctctggcactacggtggaggatgggttgaaattgcagagcactgtgtgccaggagaaaggcaacttccaagtctagggatatgaaggtcctatagaaaagtggtaatagacaataaaggaagtggtgcattcaagagattcagggggtgagtcaatgcatgtggtggcaggaaacacagaaaaaaaaagggaagaattaaaataatcacctatgtacaggagatagttccatgtggctgtctggacaaacctgcgcacttggagttccacaagaattgcagaccttcaaggaccaggccctcctcttccttctcctctttctcatcctcctgctgcttctttgggataattttttgagatgagagtcacataaaataaaattaactattttaagtaaaaacaactcagtgacacttagtccattcacaaagttatgcagccaccacctccatctagttccaaaacattgttatcattccagagcaaaattctttacccatgaggcactcttttctcagttttcattccctccagctcctggcacccaacagtctgacttctgtctccatggatttacctattctgattatttcagatctgtggaattatatgtggtccctgtggctgacttctttcactcagcatgtttttgaggttcatccacactggagcatgtataaatatgtcattctttttgatggctaaattataacctctagtgtggataggccacagtttttttttgttttgtt

SEQ ID NO: 63834 - DNA, 564 bp, Homo sapiens
ccccttgccactaaccacctagacagttgggtaaggtagtatcagctccatagacaaggcaagaccggagacaattcccttccccaccccaatgaggagttctgccttctgtgttaggatggagcagagcccattgttttcataacatggtgaataacatacagggtatttgtgagaattagaaaaaggggtttccactgggtggaaaaattaggaaaacatgtcctgatctctgagtaaacacagtcctggaccagtccccagcttggataagatccaaagtgttttctttggtctacaaggttcttgcctgttgggtacccatgtgcctggggaaagtcatgaaattcctacccactttagtcatgcaggccacttgcaaacatttgttcttgatttccctctgccaggaatgtcctctcttcatcaccatccattttacctgaaaagctcctgtgcatccttcaagatccaacaaaggtagttccctagatgaagccttatttctcccataagtttttcaccaccacccttactttattgtaagaccaatgaaggcaggaa

SEQ ID NO: 63835 - DNA, 480 bp, Homo sapiens
acctgcctcttaagagagtattcaggaaaagcatattattgctggagtcctgtatgtatgaactgttcaacctgtggtggacaaggagaaaagacagaagggcatctgtaggagggaaacagatcccaaactagaagaatctggatcagctagaaaggcaagatgagaacacaagtggaatgcttgactcatctgcaggggacattcacctttcaggcatagggagcaacagttcatgtcaaagacttagcagaagttcatgactggatttaaccctcaagctgagttctggggcaatccctccagtatgtggagggccagtgagagtgaagaaaggtgagatgtagaaggtgatgcaggcatggaggtgatgggattcaaggagtgctggtgaggaaaaagggaagggaaccagcccaagggatacttaggaggctgaatctgtagggcttggggattgtttggacctatgagatgaag

SEQ ID NO: 63836 - DNA, 690 bp, Homo sapiens
aaggttgtcatggttaaaaatatccagaggaaaagggtttttttttatatccctataagaaaaacaacaaaatagtaagcgtttccatgataatccttaattttccaagcatttctggatgcattctttcactttttctgattgggaaaagcctatggaaatcattccatttttgggtcctttccatagatggactcaagttatttgttcactttccctatcgctattttgttagtatgttggttaataattgtaggtcatcaataaggctagcttaaaggtcaaccaactctgagagacagaaaatcctccaattagttaagaatcagtgaagagtgatgcttggagccagggtgaagagtatcaaagaaatcaaagggaaagtttccctgaccattgtccaaaaagcaaccaattgctctttagggaaagccacagttggcctgcctaatgagccttgaaactttgagcaaacaaattcagagtccacattagaggcaaacagagggcaaagagaggggatcattaaacacactgattggatgtgaccctctccccacttgtggagtttagccaccctggtgagccttcatgggtgagacagagtaagcatggactgggccacaccatctcctaaaggagacctgcccaaaccccccttcctgttatttttccattaagtttctggct

SEQ ID NO: 63837 - DNA, 641 bp, Homo sapiens
tacatttttcagataatcagctcaattcacaattctacccatacacacagccaaaacaacagaagcaatgggctttcttaaggaagttgaatggagacctgcagaatacagtccccagtaaagagaaacactccagccaaatgcagatcagattctcaaatggaaaatcacattccacaggttcctggaggaggaggataggggaggaagctgctgcttccaataagagcttcattccagaaatcccacataatggcctcccaagcgccctggtgtgataaagagatgactattccagttgagagaatcaagtcctcagggaaaggtgggtggaggaccagggagggctcttccaagagaggttgagctcaactctttaaactggaatattgactcttctgtttccagtgtgatgatttgaacctggtgaatacctcatccctgccaaaagcctgtcgcaattaagtatgttttcaattgggaaatggaagcgtatcagacctggcaggaaaaccagagagcaaatctttattagggccttggggctcataccaatatctgggactgtcaccatccccactgccaacagaagggaacattctccctgcctctgaaactcagaatttggaatcagaagacac

SEQ ID NO: 63838 - DNA, 1124 bp, Homo sapiens
gttccttaaacacccaatggaatgctcttctatggcaacgtatagaacctccggaactaccatttgcaattttttagtaactcagaactgttgatttttaaaatggcaaaaatacagatcctaatggatactgacaactaacagaaatactgacaagtagcaactcttcaatggagttgagaacaggaagagggtgctataactaggtgagaacataaaatgtgcaactgtgcttactctactgatcttagagtagacagatagaaagtaatttttttaagtacataaggttgtactatttgatgctctgatatatttttcttcaatataaaaactactgggaggcgagcgaacagtatctgccctgaacagggcagtactaatggacggtcacaggcagctaagactatcaccaaacccctagagcagcccaaccccgaagtcagatggtcctgtcccctccttacttgctccagggcaagtatcacacgtggacattactgcttccggtactgtttcgtgcattttgtttggtgcattttgtccgtctccctggcacctggtgggtggtgaatcagcagtttttgaacgaataagtggttatcacattaattcgtgcctcaatgaatgaatgaatggacaaacacaggccgggagcctgacccacttccctcttccctcccgggacccactgctccaggattgggcgaacctcaggtgagcgcctgctcccctcttccgcgaaccttcgcctacggcggccgggaggcatcaggagcgcggtcagggcgaaaaagccgactcgcgagcgcgcaggcgcagccctgacgcttccgtggggccacttccttttttgtctcctagcaacggcgggtagcgttgttgacatcccgggaggctgtgccgccggcctgagcccagagtttcgcggcctccgcgatggtaaatctggggtctccgtccacgccccgccgttccaagcacgccgaccgtcaaggaccttcgcacccagcttctggggcccacccaggcacgggcggtccaggggccgcggcggaggctggtggctccaggatcttcctggaggggcgagagggagaccttggaaaggggcaagaagatgt

SEQ ID NO: 63839 - DNA, 774 bp, Homo sapiens
aacctcttaagagttcatgctagtttcattgctaattcagacatttgtaagggcaaggagtgccagaaattccagagcattagttaaaataagagtagctactttacataatttgtggtgcaaccatggaattggcctattaccaactcagtgccttggaaaaatccatcagtaaatatttattaagcaactaccaactgaaagtctgcttaaattctgaactacaactccttaccactaagaatggacaataacctattttactgggggttttcattgttaaatgagacaataattgttgagtgcttggcataatacccaatacttgatagtaattaaatagttatgagaatgtgaggatttttaattcatttatacagttaaaacatttgttttataaccagcaactcaaggccaaatgagtgagagagataatagaacataataaattttcgagcttgaataatcagggggaagagaggatttaagatctgccttccaggtaagtcacaaactatgcgtaatatttccaggaagcattccagccctagtacgtggatctggttgcattgattttatttccaggtatttgcatacactctgccacagctccgaagatgagccgtccatgtgatttcatagagatggtgtgttagtttcctttggctacagtaacaaactacaacatgcctgttaacttaaaacaacagaaacgtattctcttccagttctggaggttagaagttgaaatcaagatgtccgaaggctcatgct

SEQ ID NO: 63840 - DNA, 706 bp, Homo sapiens
agactgaaccagacaccttctccagtctcctccacgatctgggaggcaacaagtattcatgagatctgctaggggcatggagcagtgaagtggacagacaaggcccctgtccttgggaagttggccaggatatgtaaaaggcagacaggaaataaataattaaaataaatgattaactaattgcatgtgtgcaaagcaaatactgaagccaggaggactccccatcatatgctagaaattccctggcatgcaaaatgtgacaaagttcctagaacagttatcccacatggttcgtggaagcaaaagtagggcacactgagcaggcatgtctgtttctaataagtttctccacttgcaaggtcaaggatgctgtgaggcacattcagtgtgcatctgctgtctcacgctgggtgctttctcaagcagttaccaatcatcctgacaaacccaggaggggctattatctctactttacagatgtagcaactgaggttcagaagggttaaatcagagtccaaaggccacatgaccaaggcaagaacaaaacctaagactgtctccaaagcccgtgctctttctgctataccaggctgcatagggagtgagaagtgagttttgttttgtcttcacacaaaattgaaggaccaatttgaagtaaaatattaatctaaaatcttcattgtcaaaatcatcttaaaataaaatt

SEQ ID NO: 63841 - DNA, 1149 bp, Homo sapiens
atataaatatatggtttatatatatatatatggtgtgtatatatatatataatttgatatgttaatctacctatgatataggttagtgtctctgagtgatggatgtatgcataatttctgtgttgggtatatttgtgccttttgaatacttcacattttccacagtgaatggagatgacacttgaaatttgaaaaaaggttaatgttttaaaaattgtgaaatgtgcacagaaagtctagtcctaagcaatgtgatttttttgtcaagcgcttcaatacgaactgaactcaaatgtgtattgtcaggaaacaaaatgattgttaactatcgatgagtcatgaccaatatgccagttaaatattatctcattttaaaacaacaggctgaatcagtgggcaggaaaagttttgtgatgatggttatgagtgcatcgatcaaattgttccttttggtttgggttagtgtttgctacttctgtggcttctctgaggtggaaaaacacatttaggagagtgaaatgatacctggaagtaaatgtataaccataaagatgcaagtgcatgaggaagaactgcattgagaaaaagtcaacacacgactgcataacaacaacacattcagcaattgcacaaaccacttcaagcctaaacacacttgtaaaagattccctaagaccaggaaactaccaggggaattctaagattccctgaaacatggggaaagagcttgaactgtatttttttgaggtcctgtcctaaattctaggaaaactgactcagactatttagaaatgactagagttactagaaattactgtctcagggtaaattaactgtagaggcataaaaccttttcagacattagtaccccagtttgaaactatatttcattttaagaaaatggcgaaaatttagatttataaattgggtgtcactgttcactttataaagatggtttgctataggactcccttagactagcaggctgctttcatgcatgacgatattatccaacttggggatgcattaatctattgtgcgaggcaaggcacacctcaactaggcagtttaactgcaccagcaactgtccctaagaaagcctcctgttacacacttgagaaagttcactgcctctggctcattaaaaac

SEQ ID NO: 63842 - DNA, 831 bp, Homo sapiens
ttgctccccaaagaccatgggtgttcctccattgtttgaaagatgccagactaatgtcttccttcgccacttttgggaagacatgagagtatccaacgctggccactactcattaggacctggagccaggtatccactgagggtgacgagagtactgggcgctgggctggcatctgtgtcctatgtccccaacacctcagacttccacgttctcctcccacccagggccctccgcagcgccccctttcgcccccagggagcacgacacccgcaagggccacccccacgcccgagcccggagggcgtccgagctggtgcgggggcagcaggtggggggtgagggaggtggcccggggaccccggggagcggtttggcggttgtccccccgaacccccacccagcctcccccttcgcagccccccgggaccccgcctcgccccggccaggctccgctccgatcgcccgcccccctcctcccccgcgcccccggcccagccgggccgcgcaacccccgccccacacccccgccggccgcggcgcgcccccccgcattcccagcacgtccggcgccgacttttacctgtactttctgtactcgaggcggctcgtcgggcgagaaacacctccccgggaccgctacctcccccgccccggctccgcccggcttcctccttcccctccaaggccgcaaagtagatggagtaagagagtgtgtgtgcgagagaaagagaaagagggagcgggcgcgggcgccgcgggaggcggcgggcggcgggcggcgggcgggaggcgcgcccggcccccgccaccctccggccgccgccgccgcc

SEQ ID NO: 63843 - DNA, 389 bp, Homo sapiens
ggctcggcaactccggattgcgcccggccccggccccggcccggtccccgccgcccgccgccgccgcccgccgccgcccgctgactggggccggcccgcgcccccgcgtccccgtacctcgtaaaggtccccagaagccatgccaggctgcggaacttggctcgccggtgtgcgcgtctgctcgctcgcgccctccgtgcgtgtgcgcgcggggtccggtgtgcgcgtgtgtgtgcgcgcgtgtgtgtgcgagtgtgtgtggtgtgttgagtaaactgtgtttttgcagaatgacaggcttgggggctgcctatgcgcagaatcagagcgggcggcggcggggctggcgtaaccggcagcagcggcggcggcggcggcggcggcacgag

SEQ ID NO: 63844 - DNA, 1681 bp, Homo sapiens
aataaaataattaaaataaaataaaattcaacaattctttccacttcactatactgtagttttttttgtattgaattcaaacaaaattaaattaatatgaatacttttaatgaaaaagcatctatttgtggtctcatttttataaaatatttatatcctttaactctatgtatacataaaaatatatctgagtagcgtgcatcccgtgttaactaaagctatttctcagtagtgggatttttctcttttttttccacatgtaaacttttctacgtcctttgatttctttgaaacaagcacggtatctctttaaaaagacaacagattggttgtattattaactactgctaccagaagtgaatgggccaagatgttaagaggagaggaaaggagaagaaggaggggagggtgtcagaccgacggagttggggggagcaggaggcgagaaaggggagaggagcgagagagagaagaggggggctcaaatgacggagagagcgaaagagagggcaggaggcgagtaggagatgagccagaggagaggaggacactgcagacccggggggagggcaagggcgccgaccgcaggccggggaggctgcaggagactgggggccaggggagcgggggagtcggcagcgccgcctgggacagagcttgccgcacgctgacctactttctggggccgatgtgtttgcagccagaggtaccgcggagccaagcccggagcctcggggagccgccagcgagcgcagactgggagggagccggccgggctccccgccaccccttcctccgcgcgccaagacctgtcagtttcacccagcccggcttccctggaaaggcgggatccctctgcagatttccaggctcttggaagaggaccggcgcgtctattaaacccgagtcgctccacgggctctccgcccagagcacaagctgccttcccccgggaactggacctcggcagcggcctgcgcagagccgggctccggggccctggccgctctcgggaaggccccgcgggttcccaccaggccagagggagaaccaccaggaggccgcgcgcgcgcacacgccgggcgccctcctcgtgccgaggtggaaagagcctgcgacaggcaggcccaggttgtcatttaggctccgccactttccgctcgtgtccttgggcaagttacttgacgcttccgagccctattttttttctcatttttaagatggagaaaatgccatccacatctcagggtcaaggtgaggattataaataaaataacgtgtgtgaaagtgcctggcatagcagccggcacgtggtgtgtgctcaataaaaatgttagttcatccactcgggaggaagctgctttgccggcgcgtcatgacggatccaggagccggccaaccgtgctctatgatcgtgaccgggctatggccatcggtgaacgctggtcataagcgatttgtgtcatcgtagtgcctgacgccgggagacaagcttggggaaatgccttttttctgaaacatttcctatgaaatagtttggccccacgcccactaactaaagaatgaggctggcagggcgtggtggctcatgcctgtagtcccaacactttgggaggccgaggcgggcagatcagctgaggtcgagagttctagaacagcctgaccaacatggagaaacccc

SEQ ID NO: 63845 - DNA, 549 bp, Homo sapiens
ttggacaacttcaaatattatatttaaatctttcaatatgaggcaaaaaaaaaaaaaagttcaaaaataacaaaaatgatatctgaaaggcaaaattttagccatcatatatttttaaaagttctggacacaaaaaatctgatgtatgaaacagaaattgaatcaaatttcttttcaaaggtttaaaatgcactctgcttatttggcagtgcctggaaaaagacaatgaactgtgtactgtggctatttgcccaagtccaagttgtgccctaaaatcaagttcaggagatgacagtgttccaaaacaagtcaaattagatccctgtggcttacacaaaccataactacaaagaaattcaaaatgttaaagctgaaaacagcctaattctagcctcctcaatttatatatagaaattgaggccctgagagttttagttacctaccaatcagctaataggtgactgatataagtctttctgccggccagagatacaacttcctaaaccattaaattcatccagatgacctacagtaatcatcataaggaag

SEQ ID NO: 63846 - DNA, 1448 bp, Homo sapiens
attcctctctataaagattataacaatttgcagtcccatcagaaatgtatgagggtatacagtgttgccaacagaatgcgctgtcacactgtttaatttggcccccctgcagataagtaatggtatgttcagtatatttaatttgtatttctctaattattgaggttgaacatcttctcatgtttaaaggccatcttttcttttttttttaaattgtctctcatgcttttgctcatttttctctctgatttttggcctcttattccccctcctttttttttttttttttgtgtaaagacagggtctcactttgtcacacaggctgatgtgttgtactgcagcctcaaacaactgggtaagtgatcctactacctcaaccttccaagtagctaggactacaggcatgtgccatgcccggccacttttatttttattttttgtagagacaggatcttgctatgttgcccaagctggtctggaactccaggcctcaaacgatcctttatcaatctttgattttattgtctctggaattcagggtccttacttaggcacactttccccacacctaggttatataagaatttatccaggtttcttagtgtttgtatcgtttcatttttgacatttagatgtctgccccattagttgattcatatgtatggtattctaactttttccaaacagctatgtaattgtccccatgctatttacttaaaaatctattttccagacttctgcttctagccatgaaagaacaaactgaatatataaaacaactattttcagatattgggacaacagactacaggactgtgataactgaaagaaaaaaacaaaacaaagtgaaccctacattcacctagctttctacccacagacaatttccaaaccatgtagcagagaacagaactcaagaggagaatggtagtttcaccgagcagaggaggcaaacgtcagaggaattcgggcaggctggggcagccggaatttgtgaggtagagataagcagcaaaagaactccagaaatctacatggagctgccttgagtcactgactgagtattcactacacatgtattgggtgactttcacaatgccatagtcactacgaagaacaattacagcagctacaagctgaaaaacgcagagctcacacagggctgggagtcaatggagtccttataagccaaagtagagatctcattgaatatgcaagtcaatcagtaaagaatcctaatttagtaattgggctaagctaactctagagtaaagactatgccagctatgccctaaaaatatgtaaaaacacgaactgcctgctgatacaaaagataaaatccaagtcatcaacaatgttcagcctcaaaaaacaaaaaaccagtaaacaagttttttgtagaaaatgacaagctgattctaaaattaatatggaaatgaaagtactta

SEQ ID NO: 63847 - DNA, 906 bp, Homo sapiens
tccctaacaaactaccatgtctgatttttactaatcataaaaggaggtagtttgtgtaaaaaaaagaaaaaaatcgcacatatcaactgctaatcttgactaaactcagactccttactaagacattatcgtttccttctatcaacggagataacattttacatcagtgggttataactaagtttcattttggctgtacagtcgtttttctgaactcttacatttttgtgacattccttaagcaagttaatcaagacgttgcattcttcagtgtgcaagtgtggagataagtcaggatgcatctttaggagatgaggatggatcacagcagtgcaacctgtggatacaagagtgtcttgaatatgcataaacacatttgttacgccacctaaaagtatcttcataagaacctctagtgacctttatcagagaagtatgttaaccattaaccagctgtgtgacctcaggcaaattattaaacttgagacaaagctttctaattcaatgatttaagatattcagcaagttatcagtagtatttagagaacctacaggttcaggagaaaagcaggaagcctcaagagacccaatcccggaaataagcactaaagcagaaacagcttgcttatattaataagcctgacttcaaatattttcgccacattctcgaaattaacaactcattttgttcagatgaaattctaccaattaagagaattggcttattattttaaaatgtatattattctgagggttaaagggtcattagtctcatattagtgtgaatatagattgcttttttcttaatagctggctgaaaaaaaaactaaacaatgaaatgaaaccagaagttgtgaaaaaaaatttcaaatttaacagatatagccataaaactaattattacac

SEQ ID NO: 63848 - DNA, 2311 bp, Homo sapiens
gaggttttaaatgaagacttccaaaactgatttacttaagactctacgtaaaacgcctgatctttaaacgcaagaaaagcaagatgaatgtattactttcctggaaaaaaaaagcattaaaggagaaaaaagagtaaagtgtactgatggggctcttggtgggttctcacatcacagggcactgcagctgagacttgcttgaacggcccccgttttctacccgcaaattctcaattgctagataaacaacaataacaacactttattgggcgctcatcgtgtcaaaccctgtgttgagggctccattcctcaaggtccattttaccggcgaggaagccccggctccgggaggggaggagcgcgcccaaggtcaccagccagttgagtgagtggcgggcggatcccaaccccgagcgacgcccacggcctgtctcggccaccagcgtgttccagcgagcgcccagccacctcgctcgcagcctccccagcgcagcagcccggctgtgggcctgcggcagccgggtcttcctggtccccacctcctggggccgacgggcggcaggaaggggctcggcgggacgcgccatcagggacctgaggaggaacaacggaacgcgttcggaacggcctggactcccgagactcacccgactcgtggccacaccgggagaactgaagcggcagtagccggcggagacgcccgacccgaaggccggctgctagggagcagacagctgaaccgcttgccagacgccgaaacccagtgacgccctccaccgctccaccgtgctcccggctcctcgcccccgccgcccgcgggccccaaggcgcatgcgccgcctgtcctggaggggcccatttccgtccgtcgtggggggaggcacagtgagtccactggggcacggcagcgtctaagccacaagccgagcacataagccaggtcctaacggagcctatgtgtaagtccactactggtgcaaggttgcacacttctaagaagagcggcgtggggggctcggcgaccttcgcttcagtcgctcccccgtgcagtcccctgtgcccaagacacagcctgatgcttgtgctccggtgggcggagcttggaggcggcgggaactgcaattggtggctttgaaggcgcggcgagcgggaacagctcttgaggagtgagactgcaggagatgtgggccggtaagagagccccgggcggcactggatcgggccccggagggtgtggggccttgaggaagccagatcccaggcctcgggggtggctttttcgcaattgtcgcacgttgtgaggcgcaggattggcgctgggtctcgggctcggggcgaggaactacggttcgggccgaggtgagggggcggtggcgctgtgccggctgtgacgtcacctcgcccgcggtggggcgggtggagcctttcgtaggctcgcgactgcgtcaggggagggccgtgtggtcatgtgaccaggggctccgctctacgatcctggggttgcttcctttcccagagttggggttttgcttttctgtcacctcggcttccgtcgttttttgtccctgtaccctcttgcgttgctcctcgcattgcctgttggagcgcagcagaggtgtgtggctacgggaacgttacttaaaatggatctttttgatcatgcgttccacagatcttgagcatctactgtatgtcagacactaaaacgctaggaagtataaagaaagttttaaaatggggccaggcgcggtagtttacgcctgtaatcccaacactttgggagaccgacgtgggcggatcaccttaggtcaggagttcgagaccagcctggccaacatggtgaaaccccgtctctactaaaaatacaaaaattaaccggacgtggtatcgggtgcctgtaatcccagctatttgggaggctgaggcaggagaagcgcatgaacccgggaggcggaggttgcagtgacccgagatcgcgccactgcactgcaccctgggcgacaaagcgagactgtgtctccgaaacaacaaaaaaaggaaagtttaaaaatggtcacggggtaaacgtttactaaagggatttccgtcttaattggtgagactgagggcgctctaccaaatttctttagactggcgttctgcaaactttacccggaataaatcatctgacgtactttttaaaagatgctaaatctcaagccctccgtgcgccctcctcacagtttaatttgatagggcccaggaatcttcattttaacgggtagcctcgtctgtgggtttttttgtttgttttttgtttttttgagacgga

SEQ ID NO: 63849 - DNA, 1897 bp, Homo sapiens
atcttttcatttgtatagtgtggtctaggtcaagttacttaatttatataagcctaaatgtccttctctgcacaaggtggggcaagttacagtacatacccgctacagtcgttttgaagacaaaatgagacacagcatgaaaagtgcatccaccagacccacctggtacccagtaaggcctaggtaataaacaacggcggaaatcagtgtacttctgcctcacctgccactagacatttgggttgtttctaatctttgggaagtaaacgcattgctcaacgtattgctttttcttttatgtgactactgcctgaagtcactttcctaggaagaatggatcgattagagaggcggggcaataccttttacctgctggcaggtgaaatttcgcctcctggcggcgtcacctaaagtcctctccctccaaggcgcgccctccgcggccggcagggggcgccgcggccgcctgggcccgccggatgctaacaagcctggcggcctcgccccctgccggaagtggctgcggcgggggcggggcctacgaactgggccgggcggccgtgcgggagccatggcggcctcggaggcggcggcggcggcggggtccgcggctctggcggcgggtgcccgggccgtcccggcggccacgacaggagccgccgccgccgcctcgggcccgtgggtgcccccgggaccccgactgaggggcagccggccgcggcccgcgggggcgacgcagcagcccgctgtccccgcgccgccggcgggggagctgatccagccgtcggtgagcgagctgtcccgggccgtgcggaccaacatcctgtgcaccgtgcgcggctgcggcaagatcctgcccaacagccccgcgctcaacatgcacctagtcaagagccaccgcctgcaggtgagcccgacgcggccggcggcccggggggccgggcctggctccaacaaagcgcccggcgccggcgcgcgaagccggcctcggggggacgagcgccctgcgcgctgccgctgccgctgccccaccggcctctgccctccccggccggaggcggctctcgaaccctcgcggcaggcgccgcaggtgcggcctctgggggggaggaggagctgggagccccgggtccgccgtacgcgccagttccctggttccctggctccctggccccgagtgtcgtgccggacgccggcccaggctttttacacttttttgcctgtgagttcttaacggcgttttggcgagggacgcatcgtctccattatattaatgagaaacagattatgcaacctagatgatgcggggctttaaaccggggcctctggttctaaagccctgtgcttgccacgacacccacaatgccgcccttgggtcctgcccagtggactgtatgtgccacaataactagaagagagggttttaaatgttctcaccaccaagagacaatacgtttgaggtcgaggacatgttaaacactctgacttgatcactatgcaatgtatatgtccatccatgctgcacaccgcaccccatcagtaggaataattactgtgtgtcgattatgaataaaaaaatgttttaaaggagcggtaggtttgcctctaaacaccatcagtcagtttcacggtgttggtaagatcagctcaggactgagacctaagggaaattgcccctgtggctcttctttaagagggggacacagtaaatacaccatgacaatagtctcaacaaccctccacgttatgcaaaacagggcagtcattttcaaccttgggacacatctgtgacaagcttattaaaaatccagatgtccagccccaccccggacctgttaagtcacaatctctcagtcattacaatggcaagtttccttccaccactctaggccagcag

SEQ ID NO: 63850 - DNA, 1232 bp, Homo sapiens
cacgcgctccacctgccacccctaaagcccaggcgcatcacgctcggctccacctcttcatctagccccgccccttcctgcaggccacacccctttctctatcaggctcctccctttatgccataagccttttttcctcatctagctcttccccttcctccgccagttcctaccgtgccacaaagacgcctgcccttctttcaaactatcccattcagaaaagcgttctggattgcccgttcgaattcctccccgtcctccgtctacccacccttaaagggttccgctcccaacggatcctcctcaggccccgcccctccccagaccccgcccgctctggggaagccccggcacatagtgcctctgcctttcgctccctctcgcttcctttcgaacgaggcagggactctcgctctgtcgcctttggagtggtcccgggccttgccccaggggtggagaaatggccgctcacacctacctgtggggccaagcggatggaaggccccgagacagctagtcccggcctactggcaagagctactcaggtcgctgccggatgggccgttgccttgggttacgaccacgctgggggcgggaccgcggcggaagtgacgtagcccaacaaagcctagcactggcgaggcggttcgtggcatctcctatccgctccgggcgctgccgccggaagggccagcgacggagggtctcagatggcggggcttgaggcccacccgggctctcgggtcggcgagtcccgttggggagcccttgtgcctgctaggatatttagcagatgccaggcggccagaaacgtcctcacttttctccctcggccctctggggaaccgccgtgagcgtttcccacggacacaaacttaacaggcccagaacgtccagggaggacgcgttgtgagcctcaaagagcccacttacgtgaccgacagcaccaggccgacgggcactcgctgaactgctggcccggagcagcacagctcttaagtgggcagtggcatcttttatacaaataaaggaaggtggccccacgtccctaaaacaacagcttgctgaagagagatcgcaaagcatcccccactccagctcgggtctgactccaaagcccttctgctttagaaagtgtgactatttctgctgtagaaaaccggtatctaggccaggcgcggtggctcacgcctgtaatcccagcacttgggaggccgaggtgggtgtatcac

SEQ ID NO: 63851 - DNA, 1596 bp, Homo sapiens
tgcaacctctgcctcccaggttcaagcgattctcctgcctcagcctcccgagtagctgggattacatgcgcatgccgccacgcctggctaattttttgtacttttagtagagatgggatttcaccgtgttagccaggatagtctcgatctcctgacctcgtgatccgccctccggcatgagccaacgcgccctgcctggtgctttaattttaataagcgcttctgttttaattttacttcggagttctcagtaacggtccatttagtaaactaaaggcctccccatttggggtctcaacgatgcacgcagatgggagataaacttaaggccaccgagacgcttaagcgacacgtgcctggcttctgcagcaagcggccgacctgcccgccggacccgccgggccacccccgcctcggtgtcccgcaggcctcccctcccggctgcatgcaatccctagggcaaaggctactcgcgggtcctcccgctacttaagggggagaagcggccgcagagccagggatcccaacagaaataagaagggggcagggtccgcgctcgctccgccccggtggctcaggagcggtgccccggcgtcctccgtgtcccgctgggcccgggacaagcagcccaggcggggagggagcagccgcccacgtgcccgccgcgcttacccgagagcagagcgggtccagtgcgcagcgtacggacggcgcccacccccagctgccagggcctcggcgggcagggcgcggcgggtgacgggaccgcgcgcagggtgcagagcagggcccgcacgctccgcaccactcgcagcgccatgttcgcaggggtgcgggggtcgcagcgctacgcctcggccacccgcgccgggaggcggggcggggaggggcagttcgcggccggagggagccggctggatggaggcgcggaggcggtgccgcgggggcgggacagagcctgactgggcagagcgtggagggcggagactcccaggcgagggggcgaggcagggtctgattggccagcacgcggagactggggactccagggcctggcgcgacctcggatacggcgacgcgaaagaggggcgtgggcatggggaagaacctgaggcccggaagaggcagcaccgagaggcggagactagcgcggcgggcctgggtatgattgggctgcccgcaggaggggggcggggcctagccccagactgggttcctttccacatgtgtatctcttttactgcctctgtcataagttttcaaaggtggtttcaccacctcacgaaggaattcaagaacaagtcggaaagtcgtgaaagtacagaggtttactgcaaagtacacactgaagaaagggcggactcaaaagagggccacacaatggggcttggggtttccatctttatgggtttctttgagaaatggaatatacacaaaggtttctggaataaggtggagacttgtcagaactgtggtgccacccatttttacaccaaatatgggtgttcccggaattgttgtggtgccggtgggtgtgtgacttagtatgttaatgagtcctaggtgaagcctaggtcaaagccacaccacgttggg

SEQ ID NO: 63852 - DNA, 1126 bp, Homo sapiens
gggaaggaggcatgaggaagaataaatagaatagaacacaaaatatgagagcccatcacatgtagttttttgttttttaaattttatagagaccaggtctcaccatgatgcccaggctggtcttggactcctgggctcaaggagtcctcccaccttgacctcccaaagtgctgggatcatgggggcgagcccggcctcatggagttaaagtacatgttatttgtgaacatttcatcttggttgcatgtgtgctggattatgttgtaaaacgtactttgtgctgtgcactgatgtatggtgaaatatatattaggtgatatgatctgttacatcacattctccctcgccgtcactgccaggtcaccacccccaaccccagcagacagggaagctcgggattaggcaatggataagctgcctttggactctgaataggctgttttacgataacttgggcgactaggccagaaagatgggaagaattagggtggagggccctaatgctttgcctttgggggcccagggactcatggctgcaaggataaccaagatccacacctagattcactaaataagtatttgctctggagctctggccctggggtggctgcacctaggtaggtcaggagccccagcccaggggaaggagtatatgtcttctggagccctgcagagggttcccaggcgaggctgcccacccagagcgctggtctctagcgtcagcgtgacaatgcagaacaggttgacgttggcgttgtagacagtggactccacaaacacagctctggtcagggcgtccagccaggtgttgtcaaagagatagcggagaattctgcaggaaagagtggcattgggtcattgctatcctgcaggggctccatgtcccggcagccccttgactgaggccagtacttcctgtctcaacttctccctctgtttctgctctgctccctgggccaccaggccaacagagctgctgctgggagtggtcacattttgtagcccacgctgtgatatggtggcacccctcatctcctggccatcagagcagagattctcaaagtgtagtgcccacaccagcagcatcagcatcacctgggaacttgttggaaatacagattttcag

SEQ ID NO: 63853 - DNA, 1816 bp, Homo sapiens
aactccaaaccgctacccatgtgaccgaggacagtcccctttctgctctggggctctgccttgtcatctgaaacatgaaaagcaggggatgatgtgttctaaactccccccatcccagaggcctgtgcctccatgagggccagccgagaaagcaggttaccaaggaagaaggcattttcttcactttatgtcactcacccaaaagaccagagagggaggtggtgtcagccgcttgggagacaccacaggtttctcccctgatccatgaaccttgatccacagcccaaatggccgcacgcagaccctggggccccagaggaagggaatgaaaggagccccccagcttcccacgggtaccttctgtctgacgtctatgctcagtgactgtcctgagccctggctttcatgctcttggttcagcatggaggacacagccttggccagctggaggagctgctcggggccaccctcgccttgcagagctgtggggattttctctgacacggcagcctggaatgctacatcctcaacacatgtgtctccgagtgccacctgttaggaaatcagaaatatgctcagaacctgctaggaagaagctggcctctgaagtcaggggtcttcatgtggggtcagagaggcttggatgcctttggcctggcctgtgggctctcgagcacttcctgaggctggagggcacccagacctgctcgcaccaggcagctgacagccacccaaaccaagccttggttggctccagcctggcgcaagtcattgctctaccactggccgccctcctctcttggtctcaacctcttccacccccacctggcctctgacgcttgaaatcttcttggaatcttatccaggctcttccttgagtccttgttggctaatcttggtcctacttcttctgagctctctgaaggtgctggcctaactcatgccagagtcattctccaacccccctcacccacccaccagctcccaggaccctccccctattctggccactaaatcataacatctacaaaggtagagaccatgtctgttgtgtccctggctatacccccaggacgtggcccagggtagatgctctgtaaatatttgtggaaggaatggatgaatcactgacttatctggctatgcccctggctatcttccatccggccatccttttagtgaggttcatatgggtggagaatttttctcagtaaagaaacagtgaccactgccaccacctaccttagccatggcctgggtctgctgcgtgtcccctgcacgattggtggcagaaataactactgtcagcacaaagtcattgttctcctctccaagtggcagatacactgatgggagggcaggttcagggccacagtgtaggcaggaacctggcaaaaccagaaattgaccgatgagggggcatcgctaagccccaggtagactgcaacccactcaggtagaggctggtgacagggacacaaaagccacagctcttgaaggcatggtaggctctcgggattccacactttcaagtatgagacagtcacgtatgctgattcactgtcttctctaagcaactgcaggttgctgtaactttggaaaaattttactaaaatccataaaaaattgcaggaaaaacatcccatttacagttttttttttaaaaaaagtcaaggtggtaaaccaaattataagaggaagaaaaagaaggaggaggaggaggaggagcaacaatgacaacttaaaacttagctcaggggcgaggagttcaagaccagcctgggcaaattaggaagacgttgtttctacaaaaaaa

SEQ ID NO: 63854 - DNA, 659 bp, Homo sapiens
gctccgaatgtcagaagtgccgaagtggagagctgataactcaacgatggcagattacatctggctgttccttatcttatgacccaggcaggatgctgtgaaccaaatctatgtcccggacacactggaaaactggccggcaggaccctgggcaccaagtcacaaagggaagaggaggggcatcagaaggggagccactaaccccatgtaccttcaaccggaacagccaggcggcaaatcccaaatggctctccaaagctcacttgctcgtgggagaaggttgcattgagtccagccacctcaaaggtcagctcttccggggtgccctgagccaatgagatggtgatcaataggtcctgtccaagctccaaatggtcagaagcccaggaggcctgcagccctgacagcagctccaccaagtggactgtaatgtttctggagattgtagaggtggtggtgttgccggtggcttggatctccaggcggtgcctcccagggcccatcagtttctgggtttctctgtccaggatcagattgtacggtagcgagcccttttgggtggtggactcggccagggttatgtcacccaaaagcacagtgtaagtcactcctgttcctaagtggggtaagaaaaattaaagaatgttggtaacaaccat

SEQ ID NO: 63855 - DNA, 885 bp, Homo sapiens
taggtacatgaaacattttatgtctccttcttccaaaaagaaaataatgaattaagtggctctttatgtatgattattagaggggagcatcggggcctttactaaaaacaaaacaaaatgtaaaacctttcccgtctctgctgaaggggttccctgctgtgcagcagacattcagtgatcacagagcttagctcaagtttctcctaattcccagcacctctgattcccagcatctcttcttgttctgatcataaacaactccagctcttggattacgtcgggcaacataacagcaggcacggaattctctctgcttatttagaacctagtctgaagcaagcttttttttttttttggttaagtcaaaagtgaaactggagagggaaagctgagggaacaataagaggattaaagattagctatgacacatggcttggaaattaacctttaaccaaacatcttataagtaacgccagcgcagcttcccttgtgaatgtaaagagatccagggctcttggagagggacaagtgagagccagccaaaaaggaaaaagcaaaggcagaaacggcatcaggagagacagagatgtgaaggagggaaggagcaggagagcaggaaggaaacgcaggaggagggagcagcatctcctgtgaacacagaggagcacctgtttgctgttaaaatcgatctccctcggcaccctgagcaatggatataatatttggcaggaataggaaagaacagctggagcctgtgagggccaaagtgacaggtgagcattctgataaacactgggctctttcttctatttattttattattttttttttttttgaggcggagtctcgctctgtcgcccgggctggagtccagtggcttgatct

SEQ ID NO: 63856 - DNA, 1741 bp, Homo sapiens
catcttttccgggtctgttttctcgggtttttgtcctctcacctgggcagctccttttctctcataaataaagaaagctacagcgacttcgcccttgcttccatgcatcatctcatgagtccacaacaacactaagaattcgctttcattttgcagacggagaaactgaggatgggcaccttacccatggccacagagctagtaagtggaacagctgcaaccaggattcaaactcgcggctccagaggccacaggcttaaccacggaatcctagcccgcccgcacatccctccatcgcgggagcgacctatctcatccgtagacaccttccgctgcacccagccgcagctggtcaggcgggcggaggaaggaggcttctgattggccatctccagcagcggaggcgagaaggcggggagcgacggtgcgggggcgtcgcggagaaatgacttcatgacgcggcttcttaaaggcgccggcccagcgcgccgcggatagcacaggcacgtcccgggggctccagcttctgctcagagcgcggagagccgggccgggcgggcgcgcgcgcaggactcgggccgctcgaggggtccggccggacggtgtcgggagccggacccgtcggcagaggagcgggcgccgcgatggctgagggcagtgccgtgtctgaccctcagcacgccgcgcgtctgctgcgagcgctcagctctttccgcgaggagtctcgcttctgcgacgcgcacctggtcctcgacggggaggagatcccggtgcagaagaacatcctggcggcggccagcccgtacatcaggtggggagggggctacggcgggcgggcgcggcggtgctgcccggagccggaggcggggcggccgggccgggcgtggcccccagaccctgtcccctgtccccggcgccggggtccccgcgtcaccgttggcgcggcgtccctcccggcaagcgccggaacccggccccgctgaccgcgtcccccaggcggcctctgtggcttccaggcccgcgctccccactggacccccgcgccccttggagttgtccccggacccgggccgcgatcccccgccttgtccctcccggttcccaccgccgcggcgagcgcccgacctcggagaccctgaggcccccagacgccgtcctgggccggccgggacccgcacctgcgggctgggcgaggccgcgccggggaagagtcaccccctcgcccaggccgggcccgcggtccccgctgaagttcgccagtcgctcgcctctgaatccacgcgcgggggctgggccggcgccgccaaccaggcggggagcgccctgcccgctgggaggccagacagacagcgcctcgctgggtgcaggcagagaaaaccctctcgatgttctccttgggttggtagtccgaacctccgggcgaaattctccttgccaaacgtgtcttttccgctccattctggtaactgtttaaaagaggagttacacgttgaagtaaactgtagcgaattctcaggatgctgttacaacccgaggaccgtgagagccttgcgacaaagggcattttaatactttagtaaagcaaagcttaacctgatttgccaactcaactaaccaggttaattaaaaggttgataagacagtgcttatacaagtgtatcagatcttgcaggagactatcttttcttttagcaaccttcttgcaaactaggttgctgttttaataaaaggaaagggggga

SEQ ID NO: 63857 - DNA, 835 bp, Homo sapiens
aaagtctcttgggcccctgcctgatgtttcagccgcatcttattctgccatatagacagactagaagaggtatggatagcttcacactccaacaaattgtgcatggattctggagcacttaacccctccaagccacagctgtctttaagtggggaccagctgatcctggaagagctgccgggaggctcacacaccagcctgcatgactgttgtgcagtagccccaccccacgcaggccagccccgcgtcatcattcctatcctgaacctgcagggcattttcggttgaggaaatgaagactcatgtttatcatcctttccgggagagggattcaagaaacttggcaggggtgagcccggatccatgcccgtggcgggagctcagtgacctctgctcaaccccctatccttgctagacccaaatttctcctttggacgtatcccgggaatccagagccccgcagcctgtgactttagaaagaaagaggcaggctccttcttggctcagtcctgagtggaacttccaaaggcagggctgggatgacttcatgtttggattagggaatttcagaatgggacaaagcccatctttatttcagagccgatgacctaggtctgagtgggtgacctccctcctaactgatgggagatgacatctaaactcccgatgctgagtaacaagcaatgtagacaccaagggcgatgaagcagccattcagcatttcctggcacctgccagctgccgcccactgtcctgggcacccaggacaccagccctgcggtggaggctctggcctggcactttacacctttgcttgaacatgagaaccacctgg

SEQ ID NO: 63858 - DNA, 1032 bp, Homo sapiens
ccacatttactttatccagtctgtcattgatggacatttggattgattccatgtctgtgctattgtgaatagtgctgcaatgaacaaactcatgtatgaatctttataacagaatgatttatattcctttgggtatatacccagcaatcggattgctgggtcaaatggtatttctggttctaggtctttgaggaatcgccacactgtcttccacaacggttgaaataatttacactcccaccaacagtataaaagtgtccctatttctccacagccttaaatatttgcacatttatcaaacagggaaactactttttattattaacataaaaggtattcctctctctttgtgaaaacaagggctttagaatgtgcatactgtgaaagtaacctgttaacttatcagaaaatgtcttttatctgacattttcctgccctcatcaatggatgacgttagtcacattccttgaaggatgactggagcttacatggacccaggttcaaagtcgtagtctctttgaagagcctcaacttttccagcctgactccgggttggaacctgcgtgcctgaggttcctctcaggatcagcgtctccaccgtcagacattcttatgagaatacgggtgggtcagcgccgggtaaaggtgctggctaagtttccaccttgtggaggtgggatgacttgcaattcccgtctcctgattcatccccgggttactgattcatttccctggaatctggactgcttatggccatgcccccagctgctgctgggcaagctgagtgctccattcagccctggttcacacaacatattcctgggctcctgatacagggccttgcgagcgttcagacccaatgcttcttgcataaacacacacacatacagatatatatatatatctgtgtgtgtgtatatatatgtgtatgtgtgtgtgtgtatatatgtgcatatatatgtgtgtgtatacatatgtgtgtgtatagatatgtgtatatatatgtgtgtgtgtgtatgtgtgtgtatatat

SEQ ID NO: 63859 - DNA, 5251 bp, Homo sapiens
aacctggctgaggagctgagcatttgctaggtggccttaggtgccggctgcttgtgatggcagaaagggagctttttgcatccaggctgcagttcctgataccctgggtcacaagagaatcgaatatggttctctcgtgggctggtgctgggcctgtgaactcagataaaatgaccaggtggggtcccagggaaggtgaagtagggggagctgctggggtgcgcacaagaggggtggctgtgtaggttggggggtgctttaagtgggttcctagaagaggctctgtctccctgggcagaagaaagaagggggatgggcggaccgtcccctctctccagaaggtttgaggacccccaaggccaaagccagcagacgtcaaaggccaggagttcgaggccggctgggtcccgcagtgggagacagggcagggtgggctcatcctccggatcaccgcggggacactttcagtcgggaaggcgtccccgtcccacggccccatctggccagcccgctggacagcctggacagcggagggggcgtcaggggtcgagggttccagtccccgtccttccacccagcccccggccctcgggtatccttctttacccgtccgagtccggcccgggggcggcgggggtgggtgaggcgcgggcccccaggctccggcagcctggctgggctcccgcccgggcacccgcgggggcgcggctggcgtgacgtcacgcgccccgcccccgcgccccgccccctccccacattccaggcggggcgggccgggaccccgcggggctcgcccgccccagccccctccccaggggctgcccctcccgtcgggccgcgcctccccgtcgtgggccgcgaccccgcccggaccgcggactccgcccgcgagaggccgaagccgccgcggccgccgccgttgccgccattgacgtcagaggggcgggcacatgaccctgcggggaccaatcgcgcgggcgccccgggctccgggagcccggcgcgcggcccgccccgcccgcggccactctcgcccggacggccgcgcggacacacgctctgtacacacgcgcgcggcggcgcggggccccgagacacgcccgcccccaccccgccgcccccaccccggcgcccgccctccgcgcctggccccggcccgccctcggcctcccccgcccctccccgtcgcccgccgagcccggtcagccgccgcgagcatgcacccgacgagctaggaggaagcccggagccccgcaggaagcgccgaggccggcccagcccgccgcacgcgccgccccccgcgggcagcgccccctcccctgcgggcgcccccagccccacacccccccaccttcccggggggtgggggggtgcgggccgccggatccgggggccccgccgccccagcagcccaggacagccccctctccccgcccccagccccctcccccggcgcggccatggatgtgaccagcagctcgggcggcggcggcgacccccggcagatcgaggagaccaagccgctgctggggggcgacgtgtcggcccccgaaggcacgaagatgggcgccgtgccctgccgccgggctcttctgctttgcaacgggatgaggtacaaactgctgcaggagggcgacattcaggtctgtgtcatccggcacccgcggacctttctcagcaagatcctcacctcgaaattcctgaggcgctgggagccgcaccacctaacgctggccgacaacagcctggcgtccgccacggtgagtggctctgcgcggctgcacccccgcctctcctcggggcccgagatgcgccctccctggctgccccctggcgctgcacctggagcccagggcctggggggcggtggggggtgccgggggaacggggagaaccagggcgcctcgctcctggcctgctcgcggggctcgattttggagtctgaagcccaaaccagccgaccgggctcaggagagacccttaaaatgctggagactcggcccaccgccaggctgggtgcctggggaccttctgcccccagctcttgtgtttctggtggctgggactcgaggatggacccgacgctgggccctgatggtggtgggggttctctctggaagcccctggcccatctggatctgaggggtgggggaggggaaaacaaaataccacccctcagatttaaaaaaaaaaacaaacaacacaacaaaacctccaaacccccaaacccaaagaatttccagaagccagtttctctgtttggtttacccgtcctttattctctttcctgccagggctggcaggcagaacggggtgcttccctttctgaaaatctcattcgcacattgagaggttggaagtggagggggagggggcagtggtcctggaatatctcaggacccagcggtggtcgagttctagcctagaagctgcttggtggagccctggtccggcattgtctgtagagtgtgtgtatacgtgtgtgttttgttgctggaggtttaattttgttattgtttttaaatacatgggtaggactgggtcagctggatgagtcggagaggaaaaaccattgatctgtttctgaaatcagatctgcaaatggtggccttcttcgtacgtggagaaagacagctgtggtggggtcgaggggagagtgggggtggcgggtaggagcctgaacaggatgctttgtgttttgaaacaaggacagtttcaaataccggctgtggcttgggcctgaggcttgccgtgggggtcccatcctcattgggggtgtagcttgtcttccccagaatgcacactcctccctggggccaccgtgatcctgtttactaagcgcagtgggagggggccgaatccactgcctgcccacacctgtgccaagaaaacccagccaggaaatagggtgtcgcttacatggcatgtcacaaacgtgtagcgtgtgtagacatttccctggcatccatgttcccttggcggtgtgtcacaggccatgacacatgccccaaggaatggggaggggggaaaagttagctgaagaatcctactctttgaaccagtcccccaccccccaccccagagcgttgcagccctcgaggacttttattcttaatttggggtccgacatgcttagagcacctattttctctttcctgtgggcacgttggtgcaatatctgcaaagactcctttttcagggaggattgctggtcgcggggaggcggcccagtccccggtcaggctggtgcatgttctcaagcccgtcccgcgccacaggccgcagcatttggctttccaatggatggaggcgggagagagcctccgaaaatttgccagtacggagtgtttctgatgtggggaggaactggtgaccgcggtgccccctgcctggattctggagaccccagatctggcttcagaattttcacctggctcagggggactttattgggctttttttttttttttcctcttacactccacaaaatgaagggttgttggtggtggggtaggaaaatggttagaaggaacagtgacctgccatgggaaggccaggaggagccccttctccctctgggagaagccaggagtgagtgtcccgctgctaccgtcctgtttccggaaagccagctctcgaggctaatgcctccccacttacctccgattgctcaggaggtatatctgagagaaagagggaaggaagaaagacctgaatagccagaggcccctcgctcaccttggccagcccaggtaggtggcaccatcggtagtgtgggcctttccggaaagcacctgtctagtactggggactgaggcttatccatggagcaagattctcttggcagagccatgctctggtgttaggaaatgtggcaagaggaactataaggaagtgtttgatggactggcataatcccctttccgctgcctttcgtcaccaagcactacaggcagggggtgtccttaagtcttacccttgccctctggtgggctccagggggccttgcctcagggcctgtgagcctggaggtggggctgtgagggctggcctggctggagcgctggcctcccgggtagaggtgaggttgggactgccaccagggctctcgtcccatcatgagacacctggttggtgtccaggctctcggggaagcagcggagcccctgtggggtttccctgaggcctggacattatgtaatctgtctgcgttttatagtgcggcccaagcactctattgagaaatatgagcccaaataaaacaaaggtgaatttgagtgcagttccctagaacaaaaaccctttgcagtcctgtggcttcgcagcagccgctggcccagccctgagctcccgatattccaagtatgtttcctatagagtcatatccttacttgaaatatcagtcatccatattttaagccatctacacagcccaactcagaatcatctggtaattatctggttaattgtatgggcttcaggaacaagacccagagtgattgatagggattcaaaccaataaacaagccaaatactcttttttgcccaaaccttttgcagtctgtttccattgatccaattaaccgaatctgagagatttaagaccgtgcttccaggagcacatctgcatcaggctgggatgcaggcagactcgggctcccagtcccacctgctgggtgacaccggctaggtacaccttttagtctggggtccaagggacctgatagccctccaggctgtcttaccggtggagccagcagcctcacccgcctggcctgcctgtaaactttgcctcctgtgggatcaggtcgcagcttgccctgccctggtctcctgggccagttactgattaaatccttgcagagccaacagcgtgcctaatgtggcttgtgacggccgccaggtctgatgcaccctgtgcttggagactttggatccgaaatgctcgtaaacaaaggaggaagcagataggcgacagctgacttgggaggggagatagggaggccagggccccctcccttggggacccaggactgcacctttgtggggaagggcctgtctgcccaggctgtggcctgaatgtggtgccccattccctctttgtacccaaacttcccagttcctgggcctcactggctcttcatggctggtgatggtcgtgttggttgtaaatgacagccagggcagccaggggttctgcataagcggccgggttcggcaggaccagaatccattttgctgctctcgtctg

SEQ ID NO: 63860 - DNA, 1197 bp, Homo sapiens
acccacagaacaagggtctgtgcagctccacctgagggcattgctttttgttccctgacttcctgctttccccaggatggaagccaggccacccagccccatggtggaggaagagaggaagtgagagtttctcttccttgctcctggctctggtgatgaaccacccagtgtattcaacaggcaccgagggagactgtgcgcattttgaaaggaagcttcgcttacatcagcagagccctaaccgaagggtgatgagacgtgcgtgtgggggaggtgtttgctgtgtgtattgaggcaaaggagatggcagagaaaatatttctggtgctgaaattggttcctgacttcagtagccatttcgttacccctcccatgtgcacagcgctcgtcctggcatttggggtgtgcagtgaggccacaggaagagaacacggcagacccagtggagtaggggagtgaggacctggactttgaaatcagacaggggagcttgaatcctgcctctgcagtgtcccaggtggtgaccttgggcaggtcccctagcctgtgtccttatctgtaaagcgaggatcagagaaacttcctcttagcattgatgtcagggtaaatgaggtgaggcctggcggtgctttcatgcctccattcagcagttaagtgtcaccgttctaggcactcggaagaaaacaggagcctgccctcgtggagcctgtgttggtgggagtggacaaacaactaagttaagagcaagtaattataaaatccgatgacagggatcgtggagaaaagcaagcagggtggggcgagtggtgggctgctttgtacatagtggtcagggaagcgggtgataggacttccagggggaagagcgttccaggtagagggaacagcaattgcaaaggccctgagggaggagatcatctgtggaaatcacccagtaaagtggcttgcacctggtacatgttctatgattgtcagtttccttcctcctgctctgtggagctgttattatctgtttaaaaaattaatgagtatgtagaatgtgcgaggtgatggacacacaggcagctccttgccccgtaaagcttccattcttttgcttctgttgtgtgttttttcttttgttttttttttgttttgtttttttttttttttttttgcaaacctggctgcctcccaataaatagtgaagaatagccc

SEQ ID NO: 63861 - DNA, 3464 bp, Homo sapiens
caagcccagatctctacccctccacttccttgtaaccccacgggcctctggccctctgcgtaagtgcgagttctaccactcccctgctgcagggctctgtccgtactgaaagcaggggattgcgtacatggtgtctccaacacatggcccagctgtggtgcacacagcctttctcggtgtgcacacaggccctaggattccgagcccacccctgtggcctgtgaagagtggtggtaatggcgtcaggctgctgggctcagcctggtgagctcctggtgggctttccactagagacccctgctactccaaatcccaggcctgagctgtggctcacaggacccctttcttgaaccttcccttcagggaggcctggtgggaaggccctgcctaggcctgtgctgtctcgaaggtgatcccatcaggctggacctcagggccagggacacagttgggcaccttgtaggcgacgcaggagtggcactctgcctcttgtctgcagtgggggaagtgcagtggggtctcagctggcaggttacaggggcaggtctgcccattggaaaggggaatgatgacttgttgacatctgtttgtcgccctggttggttcatgtttcacgaccctgtgactgaggcttgcttcagggtaggaaaatggaagagctcgaactgtcccagcaggctggtggcaactgagctcggggagtcccagcagggccagacagagcccagagccagatgatagtcatgtccaaggtgagtggaggggaccgcggggtaatcatgaccatttcctccagtcattctcagacctttaggcgtgtgcgcatttcgtcctctcatcagccccgtgaggcgttagcaggggaaatggagacctcaagagttcaaggttacacagctggaacccaggcagcctaactccagagccagtggcctccagatgtcacgacgagtccctggtggggtgtgagcacaggaaccctggcagcaagggccgaatcaccagcaaggcaacagtaaggatagtgagcacttacccagaacctgttttatgccagacactactagagccctttgtgcagatgtacattcatctaatcctcacgatgcccctgcgaggtggtgctgtcattgtcccccttatacagatgagcaaactgaggcccggagaggagaggtccctacttacccagcttgtaattgtggagcgaggatttgaccccaggctgtctggctccagagtatcactgcctgtggctggtaagcagagttttggggctgcaaagcagaatgtcagaaaggcccacagtggccaggctggctgtgagctgagaggagggccttgtggaagggagagcgtgtggacagagcagaagggtctaccctgactgcactggggccccttccgggagcttcctgggccagcttcctgcagacccatctccggaggagccgtggcagaggatcgcttctcacctgccctcgttgaacctggggtggtcacctcagcctcctcgcctgagaccacctgaccctgcagagcgctctgtcacagccggtggtgaggactggatcacagtgagcacgaagttcaaagtctactgtggagcgagcgtcccgccctgtctggcttctggcctcagcttccccatgcctctgacctttggcacacgcctcttctttctgcttggaacccctccgacccccccgccagtcagtggttttccagggctaccttccccagttggagccagggcttgctcccctgtggcgcggcaccaccccagctgggcagccaggtcgcctttgcctcttgccttctccactccacatttacctcccctctcttgtaaaagcaaaactgaagccatcatacagggctgacgacaatcttacaaaatcaagaagaaaaaaatcctcccagaatcccaccacctggaaatcacccgtattaaccatgtggggtggagccatctaccctttctcctaaatgagtgcgtgtggcataggtacacagggagcaggaggagcttttattctaggttggcctccacctgccaggtgctggcccactgctccccacagttgtaacaacccgtgatacgtaacaagcaggctctgccacatgtccccggggggccacattacccctggttgagaactgctgtgttcattcatttaatcatcacacctacctcgtgaggtcccattttctggagcaggcaggggctgcccgggctggcatgtgacagagctgggaactcctgcaccgtcccacagtcacctcgtctcttcagaactggcccacaggaggtctgaaaaacaatgtgggggccttaggagccctgtccccatgtctggcatggtgtggggccaagagccggtgggccacggcaccccaggcccccagaaggaaatcccagctggcctgggcgttggcaagctcccccctacctttgatccctcccgactgacctccccctcgctgtccctgccttcgccctgatgactcaggacttcagagatctgggttgttgaaaaggggaattacatcatgccaataagagagagggggagaaattagcattagaaagttttggcgtaaggaaaaatgacttcaaaacctgcttcttgtgccctgtctgaattgaagcaggtttttgggggagatgaggaagtggggaggagaggggatagggaccctggcttctcacctcttctaaagaggccttcatctgtttgaccccagacccatccacggctgggcagtgggtccctctcctttttatagctgaaccccatcacctggaaggctattaaaaagcaaggttctggagttggcatgcaggttctacccgcaggcttggtgaaggggggtaggggtcagggagcactgcaaagacgaacagtctggggttcttctgttgcccccagtggtaagcagggcaccctctctgggccagcacagccctggctgggggcatgactagaggaggggatcccggctgatctcagtcccactggcctccactgggtgctcctgcgtagggccctccctgctcagccattctgggaagctttgcttgaaggggatcaggaaggaggaaaccccctgcctccactttgaaacccgcacactgtttccccattacgtcttgcagggaggtggaggcgttaaatcccctgcctgcccaggtcagtccttccctaaaacaggacagtgatcgggcaggttgattaggagggctggccaggctttttgatccagacatttcatatgaggccatttaaccagtggtgtgatccagctctcagtttcctcatctgaaagctggggatataagagtagccactccctaggataaaggggagaatacatggaattctgagaataaaggagagaatacatggaaagtacttagtagagtgtggacacgtggcatgtgctcaacagatgtttgctac

SEQ ID NO: 63862 - DNA, 511 bp, Homo sapiens
cttttatcccagtctggagtttcaaggttggcacttcttgcccctaaaatgtttgttttaagatttagagcagttcttcactctctgataaggtgtagtgcatcactggagctgcgttgtgattgagtccgagggctgttctgctggaatcaggcagatggtggctcactgctcagctttgccctggctctcagtgtgaccttgggctgcctcacctccctgacctgtaaagcagagggacagagtgaccacaaacccttgatgaccaacgattaaagaatactaagcatgagaaaatatgcccagggagtatccacagaggcaaaggcagtcttggcatttgaacgcctggaatttgggaagtatggatcctttactgagtctctatcatggaggctacctggcaaattcagctgatgtgaatggagcagtggacgatgagtgcaggtctaatgggctccttccttctggataccaaggacttcaccttcagcaatggtaagcaagcacc

SEQ ID NO: 63863 - DNA, 2689 bp, Homo sapiens
tttgatttatccattcttcggtcgacagacacttgagttgttcccttgttggctgttgtgggtaacgctcctgtgaacattggtgcaagtatttattatcgcccctgcttttggttcttttggatatacatctacgagcggacatttattttttaaagatgttcaccccccttacccattacataaagaactcgggtttgttgtagcacagttagataacgcaaataaacagaagaaaaccaaatccacctagaatgccgacagccagagatgataattaacatttttgtagggtgttcatttgcatgtgccgttttttccatccatacttgatgatgctgtacctggacagtctttggtgttgtgggctggatcttcatttagaaacatatataaaccaggcctgaggccctgctgtggagggaggggatgccagctggactttcactaccaccaggttgcgtccttgataggggcaggatgcaccccgtgtctgacgctgtgtcctgctgtgcttgcttccttttcctgttctctgtccccagactggaccccgtacgtttgttaccagtccctaacactcactgtcccaagaaggctgcctcgcacaatgcctggttgtggttagtgctcaataagtatttgttgaatgagctaataagaaatgatcgattgaatgaacgaatgagagaaattccccagcgagctgaccttgggcctggctcagctgaaccgtgagagggcctctctggctcgaccatttcgcctgtggtggtgactgggcagagtgacccagcacggtgagctgtccttgctgtcacctgtgggaaaggcaggggttgtgcctgtggccctggctcagacagcagggccctgtgagttccctcgctccagaccttcgctcagggtcttctgggtgtcaggtgcccggctgagggctgggctgtggggtgaaccaaacacagccccactagaacaccttcgttccagtcggggagacaacccttgcagagaagaagctggtaatttcaggtggcaagaagtcgatgatgaaaaatacatccttgtcctttcctttttcttttcttctctcttgttttcatttgttttttttttactttttattttgtcttatttttttgaggtagggtctcgccctgtcacctaggctagagttcagtggcacaatcacagcttgctgcagcctcagcttcctgggctcaagtgatcctcccacctcagcctctcgagtagctgggcctgcgggtgtgtgccaccacatccagctaatttttaaattttttgtagagatggggttttgccatcttgtccaggctggtcttgaactcctgcgatcaagtgatcctcctgccttggcctcccaaagtgttgggattacaggcatgagccactaggcctggcctctttccctttttaaaaaaattacttcatttggctgtttcttggttgattggaggccagggatgtgcagttgctgtgtttgaatcttagctctgccacttactagtgatgatcttggcaatggttttgagcttggcgagcctcagtttccttgtctgtgtaacgaaagatgggggtgtgtctacatcacagggttatcatgaggcataactgagacattgctcaggaagcacttcttattggtattacttacgaacgggccatgattgcataatgaatctgatggctacatgcttttgaaattacaaaaccaatgccatccaattgattggtgatctgcctgggataggagcaagttaatgcattgaccatggggggcttagcacagcgccgtttccctgggagacttgggctgaaccgaatttgttcagccaaagattctgcctcctccctgggaactaggaacaaaagggccttgcttgaaagaggctgttgttccttcaccaagtttagaaagccaaagttcagtttctgcaaccagttccaggagttatgtggcagggctagactttttccttttttcttgtgcctaattttgggccagttcttctggttagatgattgaggtgaccagaacatacaggaaaataaacagaaacccccaaactgccctttgaagctgtccatcctcgctgggcaggaacaaggatcttcttgggctctagaagttttttttagttgagcgagtttccatcccaccaggcaaggggcttaggcgaggttgtgtgatgtgggcccacgcccttgggctggacgtggacccatgtttgtcaccggtccctaacactcactctgggacctgggcacatcccgcaaccagtctgagtgccccagcctggtgttcccatcccagatgaggcgcttgacaaccttctgccccgttgggaaggtgggacaaagcctgcctagtgaggcaggggcttaacatagagcagcctctatagcagtgcccccagcagcggtgcctctccccctctgtgaggctcccctcagtttctctttaccccgtaaaggcctcctgtgagaagatgagaggatttgaatgcgccaccctcaaaaatggcatttataccccaggtttggtctggaaaaaagaggaatttagtgtttttacttttcctggcctcttctcttttgctcctttatttttttctttttcttctttatttttttttttttgagatggagtctcgttctgtcacccagg

SEQ ID NO: 63864 - DNA, 1324 bp, Homo sapiens
ctcctctgaggtcagtgccttcagctcctgctgcactggtggccaccgcctgcaagtgcttatgtcggcctctgtctctgcaggacgacgtgaacaggctgcggctgtcactgacgtgtcttccttcgtgtttgccgtggggggcatataattgcattcctcatgagggaatgacacagaaagggcagggggtgtcagcaggggccgctctgtaatttccatgtctgggacggatttcaggactgagctgttttcctctttgacccggcagaggctgttgcccaagtcaacagtggtgcgtttttgaatttgtctttgttggttttctttttccctttcttcttctttttaaaataggtctttttttttttttttccatcctatgaaataaaactggagacttggttgtagtgggtaagaattagcagttcctgtccttttggtgtgggagttgggcgggggttgacttaaatatttatttcccattaagggattcatgggcttggacgcttgtgttggaatggggtgatctcaaatctcactcatgattttcgacccctgtaggacttgggcctgcctttgggggacgcggggacgcagggacgcattgagcagaagctgcaagcggatgacccatgggccaagtcaagtctgctgacgtgttttacttggcccacacagtggttttttttttttttttttttcttaaagcttcagtaagttgtctgcctttaaagttgggagcattcccctaaaaagttccggatatccattttctaataataacaacagaagcaaacatttctatgtgacttaccacaggcctggctcagctctagacgactcccatccctttgctcctgggatccccagacagttccgaggtggtgcttcctgtgatcatccccattctacagctaaagaagcagaggcaggcctttaaccgggcactcctggctgtgcccatgttcctgtgtggccaccccttcaggctgggcacggcctctccactcccccagcctcctagcccactgtactcaggttcccccctgctcagagcttgtgggcgtggactttgtaccccccgggcttggagagggcaaggtgactgtgggagtccagctgctgctccttaagttgagttgtctgtcactgacttaccctccctccctctctccctactgtctccattcttctctttcccccttctttctcctgcaccctctttttccattcctcccttcccccttcctttctccgctctctctttccttcactcccttcctcccattcatctggtgcttaccgggggccaccaggtagg

SEQ ID NO: 63865 - DNA, 516 bp, Homo sapiens
acaccctgcccttcttctgggtctttcttccccacctcccagccagaaattgcctcctggagccagcccagcctcgtcttgttcattggagctcagttggagacccgtcctcacccgaagcagggtgagaggacagcacctgccacctttaagtctgggctttgctggacgcctaggagaagccgggtcctcaggcactcgagtgggaagtgaaagtgtgcaccagctctttagttctgctattgaccggacagggtttttcctggggggagggggaaggagctgctgtgttttctttgcttaatctggccttgccccacagagaaaacacatgcgtagcctccatcctgtttgtaaagagggcggtcagctactcgaagttgctcgcctggaaaaactgggaagatgtcatctcctatggtaaggaggtgggggctacaggtagctgaggtgggcaatgaatgtcttgagggactgtcagcatgtgacctttttttaaatggtgataaaatacac

SEQ ID NO: 63866 - DNA, 3465 bp, Homo sapiens
attttcctttatttaattgcaaaaacagtatcagtggaacatggaagataatttaaaagaagacgaaaaaaacctcttcatacaattcacccaagtatggaaatcctaccctacccaagtatacaccagctgaatgggtttggatgtattttcagataaattcctcacttggcgaactcttgccgcttgacgtccccaactccacaatcacgtggatctggatcatttggcacccttccctgtctgaactcgggagctggatggatttggctactgaggattgcttgtatcgattttccacttattcctcttggtcttggcccatctgtacacatacttttatgtcattacaggcacagtgaacatgctggtttctttccattttctcctctaccgtcatcagcggagatgacgttttacctagtcttcgccgtgatggaagctttttagtggccacgtggtcatcttttgtgtcacaccatttttcatgaaaccatctccctttggttagatactaaggccgtttcctgcttttcttcctcaatagagtgtgccacagtgaatatctgcgtgcctgtagcgtttttatcctttccttttgatgatgaaagatcatttggaaaaattcccaggagggagattagtcggccacaggggtatgaacattttgatggctttggatatcgatgaggctctcttgctttcccgcagagtggagcccatctgtaatgccatccacagggtgcaagcgtccttattttaacactgccatgtcctctccgggtgtcattgtttttcatttttttcttaaattaacttcacgtgttgaaaatggtgcagtgttcagtgttattagtcaacagctggctttgagacacatgcctgagtgccttcagctcctggctgagtcctctgtccctctgtccgtggccactcagccatgagcacttctgttagcgatgaagatgaaaaagtgtcccttctgcccaggctctcccttcctcctctggctgcagagcagggaggggtttcagtggcatcgcggtggccgggagcgagtgtgctggccggctgggccttgctagcagggccgggccttgctggccaggccaggctatgcaggccctcgagagggcctggggacaaaggcgccttgggaggaggaggcaaaacaggggagggaagggagggccctggagaaaaaggggggaagagaaacaaagacaaaggctggcaaaaatagaccacggaaacggcaggcagccgggataaggaggacaagaggcaggatgtggaagaggaggggaggcggaagttgtcgtggggggtcggggagaaatggggagtaaagggagagtgggttacggggagctgtgtggggtgggggtacgtgggagagagagacccagaaagacagacacacagagagaagggagcggccgaagaggagggcccgtgagcgagaagatgcagatgcccctttagtaggagggcattgctccctgcgcccctggaagggactctgggctggaaaggaccagaatgcagggaggagccgctggcgggggtcactggaagcttgattcgggggaagctgtaggttggagctgggagacccgagttcctgcccctccagggtcttgtacgtcctcacagaggacctagggccttgatcctggtcccggcacacagacacttcaggggtgatggagccaccacaccgaattctcctctagggccctcccccagcatcagagtgcagtctgagggcagcagtgggagctggactggggccatctgtgcaaggggttattgtgcccaggtgcacaggccggagctctggggtcactcaccctccgcgttacctgtcgttacctgtcgttacctgtcgttacctgttgtctggaccataaaatgcagatgggaatgtcgcccacttcctcaagtctttgtgaggattaaacgaagtacgaaatataaagcacttggagtggggcacatagtgtgtaccgtgtgactcaaggggctgtcctctttatggtgacgatgacaagggcatcaggacagcagccagcatggcgcaagccacccgggcccagccttgttgaatcttccggcagtgtggcgagttaggtctgctcgttcccactctccgcatgggaaaactgagcttcacagttaatataaacaccaacagtaataacaatggcagcaacaaactgccgaatatgagggcctaacatacacgaagcaacacgcacgtcgcagaacccacagctgaggagaccagagctcaaaggggcgagtcacctgctggctcacacagcagccgggaccgggattgcaggtgacccacgtggcttcagggcccaggcctgccctgtgactcacgcggcctgtcacccgccgtttcatgtttcaggcctcgcctgtacactggtgcttctcaggaagtcttagggaagatgacttatttattagccgtttttttaaaatctcttaattaaaaaaacaaccagtgtgagtatgtggaaatgtgattcaccatgtgatcggggaggtcagagccagagtccctggctcaaaggtaacacccctgtccacctggatgaagaatgttccagaagcttccctccaggcacggtccttgcctgctgagcagtcaccgggggaatcgggggcagttaccggggcctcagactgtgggagctgcctcttcctgggtctccagccgtgatttcagactcgtctttcatccttcccctctcggttgccagcccagtgctggagggacgcagggcagagcccagccagctgcaggtgtttccaggcatgtgctgggaatggagcagatgcggggctgaagctttccccagaactggcctttattgacgcagagggtgggaaagaaggcacgtggctgtgctgggagagggtgggtctccctatagcctggacctgggaagggccttctctagagctctccagggacggccagacagctccccttccaccttggggtgtaagcggaacaggacacactcccctcaggaagcacggtatcaaagagggtcaggaggagccccagccggctcccgttctgaggaggcacctgtgggcatgggggacccccggggccgccccccgatgcctccgctgatgcttaaggtcacacagcaggacatggtagctgggttcaaactcaggtcaggccaactgcaaagcctgtgctctttcgactcctggatggacactgcccaggtgcccctgggtaactgatacccttgtccccaaacaactctgaatctcttttcatcatgaatattattaataacaataaatactaataactgccatttatcaagagcccctacttgccaggtgctttctcattcagcctgccaaggaagcccgtgagttgggcaccagtatcgcactttacagatgaagtcattgaggtacaga

SEQ ID NO: 63867 - DNA, 1440 bp, Homo sapiens
ttttgcatttttagtagaaatggggtttctccatgttgcccaagctggtctcaaactcttggtctcaagcaatccgccctcctcagcgtcccaaagtgctgggattacaggcgtgagccaccatgtccggcttatttgatgaatttcaattccttgcagttactattcttttggatgctccggttggcccatttttggctggtgggagcttttgagttttgattttgatcccttgccctctggtaaacctctgagttctttcctcttcttggtaggttggaagattctccccctagatcgagttttcgtagagcggggcctgcctgcatccgttgctgctcaccagacccagagtgtggggcttcctgccagcaggctattcagaggagccgcctttctcttgggcctggttgccaaggtcccagcaagaggctggagttgaggagacagccagcgcggctggcctgggccccacgcatagtaggtgttccggaaacggctgttgagtgaatgacaggactgcaagctgatctgccataccacctggctggagtgggctcctttccaccccgggattctccaggaggccagtttgcaaatagagctggcctttgtttctctgccgtgtcggggacaccttcctggggctgagccggcgtggagctgggattgtacctccagcttgtgctgagggtgctgacttgggaaccccccggtccgttctggcctggctgctgtgcagacccgtgggtctaggcaatggggcaagggtcagatgggtcaattcccagagtggagctgcctcctgtttccaggccaagccgttttgcaagggacacaggcatggccctagctggctccagacttagtgccattacttcctggtgtgaatatttaagattccagctctcggatcctctgggctggctttcattccactgacttgcaacctttgccctgttgtctttgcccaaaccatatttgctgcgcttccctcagcctaggtggggcattcttgcccccactgcccagtgcaatcctggggctagaggaaggctttgtgttttgaccccaaaacagaccatggggtttccgttgtggttgctgctgctagtttaaaagaaaaacaacaaaaacaaaacaaaacaaaaacgccgccagctttgttgatgtccagtgaatcttcatccctaaaataatgcatttgtttatggagactgacttcatgtatttactatagaagagactagaatccggtgacacttccagtctatttgaggaatggatttgcatctggttttgtggtgaagagggtaggtgtcccagcccatgcagttggaggggtggggcaggcagggaggaggagggtggctgagaaagcttcccctttgtgggggcgtgtggccacctccagaggatcagggtgagggaagcttccag

SEQ ID NO: 63868 - DNA, 605 bp, Homo sapiens
agtcactccctgtttgccatcttgttccatctgagtgcgaggcctgaatgggggacagactcaccccctgtcacacagaaggacgtggggcccacagtcacacggccgcaaggtgggtctggtaccctcccagcacattttggttggactccagaagcagggcttccctcacgatacctcaagcttacctgggccccggccaagcaactgactcatccagtctgacaaatccaaattctcgagtcactcagcccaaccgtggttgcctcatttagatcccagccaaacccccttcccgcgaaaagccatggtggcctagaacgaagtctggaaaagaaccaagaggacagcatcttttgtctggagagcaccgtgcctgttctccaaccacctcgtagcccctggtggagcctccctcctcccccaggaagaaggtgagctgagtcaccaccaggtaaccctgaacctcgctcagacacagcttcctttagctaggagcctggatgtaacacccagctcatcccttggctccctccaaacgtcaaggcgtcttgaactaaaagccagcgcctgcacaccggcagaactttgcagctcctggctcc

SEQ ID NO: 63869 - DNA, 819 bp, Homo sapiens
ggaggcctcggcttgcccagcagctgagtcgggagaacctttcccaggtcccgaggcagcgggaggcgaagccaggagacccacctggtgccagggaagagctgtcacctgggcctttcctccaggagcctccaaggaaggtggaggtgtgacatcagagtgttgggatgtggaggggtgtgactccctgggatgcagctctgtgccctgactccagtgtgccatgcttggctgatctctcaatgattaactgtgtgaccttggacacaccgtgttgcctcctgcgcctctctgcccagacagcatggcaagtgaaagcctccctcccttactgatggtgtgatctgggctgcctccttggacacgccaagcctgctgtgcctcgaggcctttgccctgactgcttcctctgcctgggatgcctgttgtctaaacacccacaccacacgctccctcgcttccctcctgtctcctgtcagaagtcacctccttgggctgtccttgatcattccatccatccaaaaagttggcacccactcccacaattttttatttctcgttccctgacttacgtttttttctcctgagcatatgttatcatctgacagaccacgcgtttcttacttattttgtttattattccatcccactagaaaggcaggggtttgcctgttttttccccatgactgtatccccagcatttagaacagggcctggcacctgctagatgctcagtacatagttttgagtgagtgaacgaatgaatgaatcatcagtcagtcaaactttgcagcactcactttgtccattggaataaag

SEQ ID NO: 63870 - DNA, 660 bp, Homo sapiens
ggccgcagggaacactagtcagaaggaggcagtgaacctctcctgccctttccttccatctccatcaccttgagcatcttctgggcagctgaggtgaccgcagatgggaaggaagggcgcagagatgagcattttcttctctccaccatctggttccaggcagggcaggagagggccccgtgagagctactgctcacggctaccacggctgcctgtgggtcagagcatctccacgctggagctgggccacactggttcctgcacccgggcagcctgtggccaggctgcgtttcaaagccaggactttcaggaatgcacccttttgaccacacagcaaggccacacatacccaatagcagtggactctgagctctttaaaattgtgaatgttgcccagtggccctcagtcaggatttgttccattaaacctcattcactgccctcattttatgggtttgttgactgtttgcatttgctccgcaagttgtttatattctttgtgtgttttattttcaattatggcatgtgtctttaaaaaaagattgtaagggtttcttttgaaatatagaaaactgttcatcctttttcaaatcatttatgtagcagttattactctccaactttttttgtttttctagtctcttgattttgtttgaggta

SEQ ID NO: 63871 - DNA, 1263 bp, Homo sapiens
gtctggacattgccaaatgccccccgttgggaaccactgctttacacattgactccttcattctcatagcaacccatttcacacacgaggattgacttggcaccacagctggaccattggtgctgaggtttgaacccaggtctgtctgcatgggcctgtactcagttcctggatctattttactgcaggcttaggtggaaagggcgtggcccaaagccagatgtgtagtaggtagtcagggaaaggggcttttctgatgatttgtcactggcttattcagtcaacaaaccagaccctaagtgcaggttgcaggatgaggagggagccggtcaacctgcaggagcacctgggtgaccagcctgagggttgatggagccatttgtatttcttaggcaatgattaacctggttgagctggtaaatcattcgatagaaccttaccctggaaaatgccgggcttgcaaatggggggccgttggtttcacatctgctgtttcttcattggactttgtcacccatgaggtcaggagccagcagccgagggccgttgggaaattctccttgggcagatagctgccacttttccttgctagccctggagtgctgtacgtgccccaggaaactgtcccatgtaggggattttcatggctgggctctgtgtgtgttgggggcggggggcggaggatattgaagaagcggccctgagtgaaatgccagtggtcctgagaggcggggctgagacctcctctttatttatttgtctttggaaattgtaccattcatgatgaaatcgcccctaaaggacacaggcagcaaggactggcctttgctagacctggtaagctgggcagaccgagcccagagcagggcctgggtgccccagcagggcacagggtgctggctggttcctctgaaggcaactgcgcgttctcttcccatgtggagaaaccaggcaaatgtgtgtgtgcatgcgcgcgtgcatatgccagtgtgtatgtttgtacatgtgtatttgaatgtgtgtgtgcagtgtgctgtgtgtacatgcttgtgcatttgtgtgtgtgtgtatgtgcacacaagcctgtgccgtccaagtgcccatgtgcatatttaaatgcgctcacccgtgtgcgtgggcaaatgtgtgcacatctacatgtgtgtcagaattattgtgcgtgtgcctatgtgatgtgatttcaccccacccctatggctgtaggacgaaggcagtacacactgagcaccctgcccatgccct

SEQ ID NO: 63872 - DNA, 3185 bp, Homo sapiens
cacatgcaccccagttccgtcacatatatcccagttccgtcacacacaccccagtcccgtcacacgcaccccagtcccgtcacacgcaccccagtcccgtcacacgcaccccagttcatcacacgcaccccagtcccgtcacacgcaccccagtcccgtcacacgcaccccagtcccgtcacacgcaccccagttccatcacatatatcccagttccatcacacgcaccccagttccatcacacacaccccagttccatcacatatgtcccagttctatcacacgtaccccagttccatcacacgcaccccagttccatcacacacaccccagtttcatcacacaccccagttccatcacacacacccagagggttctgagtaaccatgggcaaccaaaagccaggaaaatggggggatttcctctgcctcccaactgttttctgattagtcacttctagctaattagcaagtgacaaatgggacaataaagctgaaaatatccattggcttcctggaatcccagccacagacatggcacatgggacctggctgagaagcagaaaaatgaaaaaacatttggggtcctgaggaaggaagcacagaggaccacgtcgggccagccatgtcagtgtgtggctgtaggtggctgcagtgtgtgcctcaaagacacactggggccgtgtgcagtatgtgggagctgtgggaacctgctctgtcttccgttttctctccacactgtctggaagaagtgatttcatctcacagtcatttggtgactaaggcaaacttcccccatccaaggtggaaattgtcacagggccctggggacatcataggggtctgtgtccaaggtggcctctgcttccagaggtggctgaggcccctgttgtggacagttcccctggatgcatgtgggtgacagctcctgctcccatagacagttccccatgcatcctcagatgggtgaggctctgctgctgtgacaaagactccccggtccagggacttgaaacaactttgttcttgctcagtcaccatggacgctgttccccaccggcagtgtgcaggggggccctggctggtggggtccttccacctggtgactctgcagcctcggcggcaggggcagggaggactggggagcccagcgctggcagctgcatcctttggctttaggagggacttgtgtgacatcctctgacatctgactgtccaggcccagttgtgtagcggtggcctggctgcaagggggcagggagttggaatcctccccatacgtggcagtggaaggaagccagaactctgtgctcattggtagttgtctgcctgtctctgacgtcggctcacttgggctgataagggctggctggtggttcccgagggtatcctgtgtgtagtggggatgttcttttcctgtggcctctgtgacatgttccttcaaacccagtggctgaaaaccacacagatcaatcatcttacagtcctggaggtcagaaatccaaaacagatccccctgggctatgttaggtgggctatgttaggatgttttctccagaggttctaggggacagaatctcttcccatgcctttttcagcttctagaggccacctgcattccttggcttcttggccccttcctccatcttcagagccacctgtgtaccatctcccagcctctctctgaccctttgccttcctctttcattgggaccaactcgacaatctgggagaatctcccatctcaaggtccttaatggaaccacatctgcaacgtctcttctgccatgtcagatggcacattcccaggttctggggatcagggcgaagacatagacatctttggagctgctcttgtgcctaccaccaggggccatccttagtgggagaagccaggctacctgccttcctccctccctctctctttctctggctttgttccttcattgctgtggctggggacagagtgcacaagaggaatgagggccctgtcctcatggagctgccagtcctttccaaggggaagactgaccttcagcagagacttccagtgcagggggtttgggagtcccctccctgggggacaggaaagtctcctctaaagacgtgacttgtcagctgctgtctggggattgaggaggagttagggaggtgaggtggggataaatgttgtgaagaccagttgcttagccacgtgggtcccagcacccagggcctgagtctctgcttgtttcagtcccactgtttctcagtcttccctcgttttcttccaccctgactgtggcctgctccgtttcgcagattgctcatccccattcccgcccactgcttttctggaagatgaaggggctggcttcctgcgtcctggcctgggcactggagcaggccatgcccccaggaggcaggcgggacctggctgcagggatgtgggaaataggacccaggaccgtatttgcaaaagcaacaaagttgaaagcaggactgggcaggctgggtcgctgtttgcactgggggaagcgctggcctcagaggtgccttcctcctctcgggccagaaagggtgattgtttcagagtcgtctgatgaagagcatatattccaaacagagcccactgcctgtcccggcgccagcttcgaacaggggaggcaactgtgacgccctgtggctcctttcacccggcagtggggagggtgctcaggccaaggggagagagagagacctctaaacacagcctggagaggaaggctgggcgtgctccgccagcttcacacgcacctctcttggccctgccagatgccatttgtgttttctctttcccgtgccctcgccccttgccaaaagctataggcagcatggccaagattcctctgtggggcaggaaaaagcaaagaaggaggcatgagcttctaattagcaaagatagacaaattgctggtggagggaccaccttcagctttgtgtgcagacacgtggcccccctggcccttttatattacgtgtccacattctttggtggtctaacaccctcctaggcactggagccaccatgcaagcgtttccagtgggctgtgaacagaaaagtaattttccacatcagaatcaaatactcaacaggaaggcgaggctgccctgtggtgggcgggacttggccctctgtactttccatttaaggcatttagaacaaca

SEQ ID NO: 63873 - DNA, 1012 bp, Homo sapiens
tgtttcattctccaggctttattttgagtgaagttgaggccagaaggcctcagtatcctcttccagggatgctgggaactgtagactggatgaccgtgagcttttcagtgtgtgtgtgtgtgtttttttttttttttttttttgaagctggaagaaactgtacagaaaagaggcccattttgcagatatggagaccaaggtccagagggaccagggccttgccttctagggcacctttgatgggagaatccgtaggcttgatgttgaggtccttcggtttgtctttctgccttttcattgcaactccagggggagagggaccctctggcctcacccttggctctgacctcagtgcggtcagtaaagtctgcctttccctctaactttcacctctttctccccactgcctacgtgcctgccctctgcccactgaaagtgggagcatcagaagggagctgtgcccccaacccccatgtgagggacagatcagcaaaagcctcaaagtccgtgggccgtgtgtctcccatctcattgtggctggggccccgggcaagggcaccgtgcctcgggagtgagtcactctctctctgtgccaggcaggagctccagggactaggggtgacccaagagtgaaggcctgatggggaggaggacccggcatgacagcccttggcttgctgggggaggagagtggaaacttttacatttgtttctcgctttcaacccagtaagtaggaatcagcctaacagatcagcaagagcctcaaaccttggctcgttctgttcaagaagacagaaaccacaaaggcaaggagagctggagttggctccataacaaagtgacccttgagcgtggaaaagcagaccagcaaccagcctcgccataaaccagtctgaaaggcgagtgggtgacctgggaaaacgcacttgtggcccagttgacaattgaagggttaaatgaccttaataagccgaagtagctgtgaatcagtgagaaactgtgactgcctca

SEQ ID NO: 63874 - DNA, 1100 bp, Homo sapiens
tgcttattcagagaccactttccagcaaacactccgaacccagcccagaatccaggtagagaagtgtaccaaagtcacggtggctgccacactctaactctttggttgcattcccagcagggcctcgctcccatgcagggcacagtcctgactagtgtattgcttgggtttccaagaccatgaaactaaaagcagcaaatcaggatgaagcaagagggaacgctttcatgaacggcgagcggaatgcccaacagcacaaagtcggcgggggtaaaacgaaaatgacagaaagaaaatgaagataaagagtgcacggcagttgggggacaccattcgggggccagcagctctccactgcttcaggagctcctgacggtggcagtgtggggtagcagatgctccaagggacaattgcatcagcaagaaagggcaaaggctactccctgccatctgcttaaagcgaggaaagaaggagtgtttctatctaaaattatttaaatttctctaaagggccttggcactcagagggtaagctctggctggcattgcctctgaccttggccgtctgatcaggcagtgaaagaaggaattgttcctggggttgcaagggagttgctgccaacatctggcctgcctggcccctttgtctccctattgacggcgacagcattgggcaagtcctgggcctcatgtctgtgcgaatgtccccaccctgtcaccggcacttccccccggggtcggggctccgggcctctcatacagctgtgggcctgatggtagaaaaggaggctctgttctttaaccctgaatgggatcggccactgatctattcttgtcacttgttgagcaactgttctaggctaaatctgaattctttctcagttagtgcccgaatttgctttttaaaaataagtcattgggaatacttgaccctgggcagagagcgggaccagcactcaatgaaacttgtcaatagagtttctcacggccgggtcacagacgtggagggagtgactgagtcccaagagaagacccactgtctcactgtgtttcctctcactgtcagccccaaccgaggcttattgggggtactttgtttc

SEQ ID NO: 63875 - DNA, 1410 bp, Homo sapiens
ttgagctgttcacacacggttgtagctcccatgttggaggagtttgctcggcaatggacactgcattttgtgaattacttcctctcactgaataggttctgttcttatcaacatttgcagatggggaaacctgagtgtagagaggataagtcagtcgcacaaggttccaaggccaccaagaaggcaagcgggattagaccctgaacatctttgcctctttctctgagcagctctgctcttcctcccagccctcccggcctggcctctgccatgttggtctgggagatctgaggaggcctggagcctgcaggaggagggccaggatctcccagcccatggctgctccacctcccagcattcgctagagcagaagctgcagtcctgagggcccctggggaggccagccctgtttggtttgggtggttcagcccttgaggctaattcccaggggtgtggaagcattaaatagttattctgggttaatgaggcttcatttctgactcagatgtacctcctggctcatgccctggccctcagaggccaagccctgtggtgacaggcctgtctgcacatgaggctgtgagggcacaggcctgtgtgcacacgaggccatgaaggcccagtctgtggggcaaggccaagagcgtgttcaggctgtgaggggaccgtgtgtgtttacaaagcattgagaagattggcctgtttctgtgtccagggtttcaaggtgagagacccaggtatgcacagctgtgagggacaagtctgtccatgtgaacaggcccaggtgacaggtccaggctactgggctgtgaggagacacacaccaggctcctagaggagccccgagaagccaggatgcacctgctatgggagctggagctcctggtgcctctccaccttctcgcttcctgagaggggttcctcaggccgaggcacactagtcctggaaaccaagatggtttttccccaggggaagtgaggtcactcagaacagccccaggggccaagccccagagccggggaccaatgagcagactgtgtgtcacaagaagctggcctgtattcctgtcccagggctgccagggccagaggagtgcccttggctctgggaaaatcccagcccagctttggatcctttctggctgcctgccctggccacgctgccttcttcttgctgggcaggtttcccagccccctagggtggccacagcccctcgatcaccgcatccaggcccaggcctctgtccctcctctgtggagaaaggtggaaaagaatgtggggtgtgtgagtgtgagagtgagtgtgtgtgcgcgtgagaatgtgtgtaagagtgaatgtgtgagtgtgtgtgagagcgagagtgactgagtgtgactgtgtgttgtgtggggtgactattttatgagtgt

SEQ ID NO: 63876 - DNA, 349 bp, Homo sapiens
tcaatgtggtgaagccccatctctactaataatacaaattagctaggcgtggtggcaggcgcccgtaatcccagctactagggaggctgaggcatgagaatcgcttgaacccagggggcagaggttgcagtgagccaagattgcgccactgcattccagcctgggttacagagtgaaacttcgtctcaaaaaaaaaaaaaaaaaaaaagtatggcattctgactaatttaagaatcctggggaaagatacaatatcaccgtcatgattccaatttctgaaatctttggagagttttttcctttatttctctttaattaaatgcacaatgcatgaacggcttcctgcaat

SEQ ID NO: 63877 - DNA, 537 bp, Homo sapiens
gaccatagatgatgcgcccgccttggcctcccaaagtgctgggattgcaggcgtgagccactgcgcccggcctgggagttgttctgtattgtggagtaaagggaggcagaggtgaagccatcgagagagcagcgagctcatcgctccccacattctattaaaatgcacattctcccgggagggggtttccagttaatgaaacaggaagcgaggtctgttgagcttgcaaccagctgagagcaatttgaggacaaaagggaagggcgggaagaagcgggatctcgggaaggtggcaggcaggtgagagcctggctggcccgttcacgcctgtctgcccctggtggccaggacgggaaggtcagaggacagggtcggaggcgccaacgctcctggggtcccagctgctgcagatccgggctggggctgggcctggccgctgctgggggcgggaggcaattcccagccccgggccggtgacgtcaacgttgtcatggagacccggcttccctgcccagcgttgcagctgcgggagcccgg

SEQ ID NO: 63878 - DNA, 1530 bp, Homo sapiens
aattgtctggggttctttgctcctgactccctttggggctggcactatgttgatcacgttttacagatggggaaactgaggctgtcggtttttaagtggtctgcctaaggtagcagtaagggttggtctgactccagcgcagcctcaacgagggcttcaaattagggccatgaattggcaattcctggcgggtaattgtgaagagtatatttatttttaatttttatttatttatttttgagacggagtgtctctcggccacacccatcctagctcattgctgtctcgaactctcgagctcagacgatcctcccgtctaggcttcccaaagagctgggatgacaggcgtgagcccgggcgcccggccgggagtgtgttaagtatacggcaaacacctggactgcggccggctctccaggaatgccatgatattggggaattccctttgcacctggccaagtggcctcgggcaggtagcctcccctcgggttgcctcagtttcttctttggcacgcagaggcggggctccaggcctgggccgctccatggcggggagggcgcggggacgctgcactcggggtgcgctccgagaggcggacccggctgggcgcgcctggggcggggcgaggcggggcgaggctgggcggtgcggggggcggcccccgaggatcacgtggcgcggcgccgcggccgaagcagaagtagcgagcgccggcggcggagggcgtgagcggcgctgagtgacccgagtcgggacgcgggctgcgcgcgcgggaccccggagcccaaacccggggcaggcgggcagctgtgcccgggcggcacggccaggtgagctgcccggccgggagcgaggcaggcagggcgcccagggacctgcgccccgcggggaccggctcccagggcgctgcgtccgagggggtctgcgtcctggctcagccggagcgggcagggacggggcgcaccctcggggaccccggcccgccgtgcccggggtccgtttggtgacggcagggatcctggcccagccgctggccacttcctcaccccgggccggcgccacctctccggtccgtgcggtggggcggccccagctttgaatggggaccgggaggaaggtcaggggtcgtgtgggggctggcgttcaaaactcctcttttcgagcggctctgcgtggggtggcgccgtctctcttgacggcccttgtgcccagagctcgcggacgctcggagccacacttccctgtctcacttcggtggttgcgggtggcgggtgggagcgataccgcgggaggcgcagtccttcccggagacttttggagagcttgcaggacactcgcgatgcccgctccgcagctgtctgcgtaattatgcgtgtgtctgtgcgtgttgtgttttgttgtgttttggaatcccaaagagggcattacccgcacagcgcaagagttcaggttaaagacgtgccccgtttggacggggagctcctggattccagcaggacggtggggcggggctctcttggtaccctaat

SEQ ID NO: 63879 - DNA, 693 bp, Homo sapiens
tgtattattaaataatattaaaaattaaaaaaagaagatttgcacaaaagctgtttcacctgctaccagattaacccattcattgatggtttccactgtggtaacattccacatgagaggtatttcaacctgtactttaattatggctcttattaaggctagtctgtgtgtttgtgtctatgagggagaaacataaattggaatcagagttttacaaaatgtcagaaccctctggggtgccctagattgccccgtgtggaactttgtatggcaaagattctgccgataccaaaggttgacccctggtggccagaatgccacattgagcctgcccctggttgtacttgatctaatggtttaaatatgttaaaaattaattgcctacatttaaaacttgagagattatattatatattaaaatctagatatttggcttcccttaggaaaaaaatcgagatctggctataaatagggtcacatctcgccatggaacggtccactttctctgtattgacccagccccatacagctctgtctgctcatttatgttgcttacctgaccccaaagaagttttgctttggcaaccctcatctccactgtttgagggtataactctccagtttggtcactgcattttaaaaatttaatttagtgacagatttgaataacaaagtcccaagctatgtagatgg

SEQ ID NO: 63880 - DNA, 2418 bp, Homo sapiens
gaaaaaaaaaatgtttgtattttagtagagatggggtttcaccatgttggccaggctggtctcaaactcctgagctcaggcagtccacccgcctcggcctaccaaagtgggtctgagcactttctgtgcaccaggtgctgcattaggcacataacctaataagattttatacaatgcttcatacagtgtacatttcatacaatgcttcacagaaactgtgtggtagatactcttattcccacttcatggatggggaggcacagagacggtatgtaacttgcccaaggtcaactaggtggaatgagatgccaacccaggtaagtgacctggaaggctgatgtaactactatgcccccaggctgcttcatactaacaaacgtaaagagctatcatagggcaggagctggcaaaccatgacctatggaccaaatatagctgaccacttgtttttataaacaaaatattgttggaatacaaccatgcccatttgcctacggatcatctgtggctgcttttgcaacacaacagcggagttgagtggttgcgacagacaccgtatggctcagagagcccaaaatatttacctctggctctctgcagagaacatttgctgacccctggcagagggccatgtgcagaatgaggcctcaacatgtggtggtcgattgcaagtgaattcggaattggttgatgtttcagtcttcgattgcgactggatggaccctgggaaatgaagaattttatcagttctcactttgctgatctctcgttctctttgtcattttaaggagcattgggctcaggatctgaacaaagtccgtgagcggatgacaaagttcattgatgacaccatgcgtgaaactgctgagcctttcttgtttgtggatgaggtgagtaggctgggcttgttgtcgcttgggggtgactttttgattgatgtctgtgctttctgaggtttattttctgtttgtctttccttggagaactttgctgtatgatgttgcctcgactgactggttagctgggattgtttcttttcttttcttttcttttttctcccaggttctagattactgtaactgtaactgcccagtgggttcattttgcctgctgcctagacagaaccgattgatcaaggcaggggaattgcaatagggaaagagcttaactcacttagagccagctgaatgggagactggagttttattattactcaaatcatcctccctttcagaggctggagtttcgtttttttatgtttttgtttgtttgcttgtgtgtttgtttttgagatggagtctcagtctgtcacccagcctggagtgcagtggtgggatctcacctcactgcaacctccgcctcccaggttcaagtgattctcgtgcctcagcctcccgagtagctgggattataggcgctgtccaccatgtctggctaattttttttgtatttttagtagacagggtttcactatgttggccaggctggtgtcgacttcctgacccttgtgatcagcccgcctcagcttcccaaagtactgggattataggtgtgagccaccgcacctggcggaggctagggtttttttttaaagattgtttggcgggccagggaaagggtgctgctgattggttggagatgcaatcatatggttgtggaaaatagtgtgcttctgggtggggccacaggaccagtgggcggtccaggtagagccatgcgaacgcccgaaaagacgtctcaaaaggccaatcttaggttaaaccacagtgatgttatctgtaggagtaactgaggaagttgctaatcttgtaacctccagaaaaatggctggtaaccagttagtctccaccttagcagaatccaggctcctctcatcctcctaacctggtcttaccttagctttacaaaggcagtttattttgggggaagggctggtatttaaactataaactaaatgttttccaaagttagcttggcccaagcccaggaataattaagggcagtttggaggttaaaggcaagatagaggttggttagatcagatctgtttcactgtcataattttcttgttgttctgattttggaaaggcagtttcatagccctttcttactcttctctactgaccgtgttgcctgggtgggattattgattttgccactagagggcatctgccaccagggagagttgaaccattgcaagcacagaaacagaatgcgaaggtgtctgggtgcttgctggtcagaatggttgcctttgaccttgcatagggaaggaggggaggtggaactggggagcgactgacccatatgaggtcgttctcacgcagcagaaattaggcccagatcgctaaagcatttttttttaaggggccaggaattgtaacttgaaatttcctgccctttcaacattctgatatg

SEQ ID NO: 63881 - DNA, 589 bp, Homo sapiens
gttagattaagaaataggatctacaggaaatgcagtcattatttcaatgttttgcaataaatcaacagtgtaaagaccaagcactttttaaactgcttgcttcccacacaataaataattgtgttttatctttctttggttaaaataggccctggctcttctgggctaatccaagttgcaaaacttctgccccatgctccctttgggcatgcttgtgagatgccaggttcacattttggtttggaaggtgtagtcaccacatggttgttctctcccctgcatcctccaggagagcgaagaggaactttactcctcctgtcgccagctgaggaggcggcaagaagaactgaacaaccagctctttctgtatgacacacaccagaacttgcgcaatgccaaccgggatgccctggttaaagagttcagtgttaatgagaaccagctccagctgtaccaggagaaatgcaacaagaggtaggtcagcccctccacctgcaaaaacttttggggggtctctaggcacggtgatgatgggcaccacgggccaggcttctggaaagccctctgagttgctttcttcagaaatcct

SEQ ID NO: 63882 - DNA, 809 bp, Homo sapiens
tacggaaatacctttgtgtatttccttcccctactgaataggattgacctgcataaccaatatactgtggaatgacactgtgacatttgaggccaagtcataaaggacaatgcagcttccaccctgctgtcttggatgacctgctctggggatgaggatattcaagcagttctagaacaatacatggcaggtgctcatatgcgttaaccccaggctaatgcaaaagcttctttatgacagaaaagactccaaacacgttttcctaaaaacaatcactaccatcacctcatactgatgttgcaatttatattagaagtactttcaccacatcttgctttatgctcccagtgaaccctatggggtgggtgggtttatacaaagggcaaatgcagtcagtcccagctcccaagtgaggaagctaagttctaaagggcttctgttccttggttaaggccacacacgatattcacggtgttggtattatgacatcaagttcagagcttttctgaaaatatccaggcagcattccacagggattgctcatctatttgtattttacagatactctcaagactaactctagcagaactttccacagtaatgtatcccccttgtaatgttcccatactatcctttctgtagctggagccatggacagacatggactctgtcttctttccacttgggttcctatgcaacagtgtaactggatcatctgtaacagtttgtgggtggccagacagtgctgccattgttcaatacattcctcattggaagctgtcttcagagagccaatcttcttcccagta

SEQ ID NO: 63883 - DNA, 1473 bp, Homo sapiens
tggaagccccctccccgtttcgagttgtcccgcctttccagaccgaaaaacatgttcatcttacatctgttcttgtctcatgtctccctaaaatgtagaaaacgaaactgggctctgaccacattaagaatacatcgtcaggaccgcctgaggctgtgtcatgggtacatgtcttcaaccttggcaaaataaactttctaaatgaactgagacccgtctcagattttcagggctcactccacctccacaatttctgtcacatctgattcatctggtattatgactagcctataaggttttgtttaaacctacttaccttttcccaacaaatacatgcagtttaaatgggaacctgtcactgccacttttaagtggcaaaccagaaccaagtgataaagaggaggtaatcgttctcccaaagtgtgcagaaaatcaaagacaggaatcaagtatagccagccacctgtggaaagttcggagcttggggccccgatgtccttaaaaacaaaaaatgcggagggccagtgtttgaggccttggcgacattctagaaagccaagctgcgcccggtcccctgggatcaggaagacatctgaaaggggatactccttcccgccaccctgctcagtcattcaccaccgtcccccacccccgggaccgccacctgtcgcgttccaggccgaggcggtccagggtccccgcggaagggcggcggccccccaaccccagcccaggcccactcacagctgcaggaacaagggcgcggcagacggctacagcaggcagagaggcccaggcctcctagctacccatcaccacagctggggcgccgaagccgtcggacctgcctcctggagccacttccgggcctctctaggaagcctggaggtctcggagtctctatgacgcgcaggtgtctccttcaccttcaccggcgttgaggtagcaggaggttcgcttcatgaattcccccacgttctctggctgtgcgttccgccgtggcgggaacccttttagggtcacgtcttcccccacgtcccctgtctgtgcgttccgccgtggtgggaaccctgttagggccacgtcaactgctcttcccacctccagtgtctgcttttagactttcacctccatctttgtttatccccaaggccaagaccagtgcctgataaataggcactcaggtcagcattgcttgggtggatggatgatggaaaaggctctatagggaggcagaatattcactctccatgtatctctttaagtttctattatctctgagtttccatatctatgtgtgcccataggttttcctgtgtccctaattttccttatttctctttgttctggtcgccaagcaggcagtgatgccaagactaatctttgttgctgaaggaaccaaggaatgcagaaaggaaagttggcatcctcactcagaggtctccttttgaggcccatcttttgtctcctcat

SEQ ID NO: 63884 - DNA, 1571 bp, Homo sapiens
gtattattatctgcagtattggtgagcaggtagtggctcagagcagagagagcagggctcattgtcaattaagtagcagagttggaattctaacccaggtcgttctaactcaaagccaccatgttgtacatcagtggggctcccatacctttgaactttgaatgctggttaagatttcttaccaaaactgtggaagtcatgtaggcttgccaacttttaattttgccaagtaagggcatcaaacagcaacaaccgttaagtgtgatcacctaccacagtggtctcatatacaaaaagctattttaatgcctgaaagaggaggaaggctatcatctctgaagtcagtcccttcagtgaggtgaattttcttacggaaattcaatatgttgtccttcctgctgatgtcctctcaccatggaccagggaaagtgagcactctctccagacgccatctaagaaccacttcaggaggtcacgctatcatcactgccctgacagagggttgctctggcttggctgaccaatgtggaaggggttgcaaggactcccctctgctgttgaaaggggctggaaaaacattcagcctagtaatagaggggcatccattctatgagctccccctgttcagggtagaattctcacactctgttcctttccaagaatgaggaaaggaagtggagatggtggatgtaaaatttaagaaatttaggagggagaataagaaaagagggagagagagagagagagagagggaggaagagagacacagagagagaaagagaaagagagagagaaaaatactgggacacatgggcagaaatatttttatacatgtggatctcttaatgtatttaggagaagtaaagttgtgtagacagagagtccttgtcagtatccaagcgagtaaatcgagacagagttcagggatctttcaatctgtgttttactaacagaattcactgattcactgtgtatggaacacaaaggcatgcaggagcgtgccttactcgtcacgcacacgcaagcctcaagggcaaggaggggtctgtatctctaattattggtccggaataaacatttagcaaataattgatgaatcagggagtggactaaaagccaatcatcaggtaaatctattaatgtttaatttcagtggattgcctcaccctacccttattgcttcattttttgatttatagtcataagcggcagataaaggcaaagttggctagggagcagtctccacaaatagaaacccataggaagagtaaagaacatgcaagtcagggtaatttctgacccatcagtcgggaggaggttcctgaagtcaagtgttattgaatgagaaatctggaccagacactgtacttgacatttgaccagcatttatctcacatgaccttcctaagaacacaatgagggagacactattaatactatccccagtttacagactgcagagcccaaggagatgcttagcagctgggcttgagagctgtaatggagcaaggagggaacccacatcggccttcaacagccttcctctggtccagcagctgtgagcaggccta

SEQ ID NO: 63885 - DNA, 1458 bp, Homo sapiens
tgacttacttggaatttatgataattgaggagtttagacatctttaccacgtattatttcaaagatagaaaaaaggcatggtccagccccaagttctggctatcttctcctagtctccccactcctgcccactgtataaaatagataaatatgtaatacatgatatttgcgcaatcacaaacactccaaacattagttatcaccctaatgctcaaaaagcaacaaacgaacaaaaaactcgtattaccaacaagatctctgtgatgtccctgagatgatctgttatggctggtaccaccctgtccatgtcctgaactttgggtcactatgacatcaacacacagtcattctctgcttggcaaatcatgccgtcattatgttaccctcatcataggaaaatgttcttcaattattgtaacaatgtgattttaaaaatgtttgagctctgaaatatctttcaaatatctgaaagaaatagaacaagacatcctctgactccacgtggagtgggaagacaaacgtcaagatgaatttgacctagaggagaatgttctaatatcccgagccatcttgaatgggaaaatcagccttcagaggaagtgaagtgcctgttctcagagatgttctggcaatagacaagatgaccacttggtggggatgttacagagggaattcccattttagatgggaagttccttcttcaagttctcttctaaactcaacatccaccaattctaagaaagtgtacattggaggattctcagcatttttttttccccagcattttttgcccagcaattttttttgggggggcggcaatcctttcttttgggtaggatgttttgttttcagatggcattttccaaaaggcccctctgctggcaggaggaaatgacacattgacccactggcgtcattagcaagaatgagttggtccaattggctccttttccctggaaggctgagagcaagcctgcaagcaaggggacactggccaagccatgatggcctcgagaatagcttcacgacaaaatggtggggacaaacaagggacacgatttagctcaataggatgcaggaaatcttcattcagcggtagctctgagatggactgaccctgaggttgggatgaggacattcagggcttagaaacgattgggctagttctcacctggggattctgcaattccatatattccccaactggtaaatagccttcctttccaccaccgtgcacccccactagtctctgctcctgcagcaggcctcctggaagcactgcgtcctcaactctgcaaggccaggaaccgggtctatattgttcactactgaattcctccatggctggtgcagaactggccacctagaagactctcaatagagatgtgattcttcctatatttttccaacaaatattaattatgtacatgtgatgtgccaggcactggactgtgcacg

SEQ ID NO: 63886 - DNA, 3820 bp, Homo sapiens
agtgctgaactgaaagaagaaataaatgagtgaggaggtagctgtcaagaacctctctctctgctcagaggaaaaaggctaagaggcagtgggtactctcaacaatgagaaaagtgcctaccatccatgagtgcctgtaagtgccagggacgatgcaagaatggtgtcattcacttttcaaaacagcccttggaagaaagactcctcctaccgccaatttacagaagaggaaactgaggcttaggaagggcaggtaacttgcccagtgcctcacagctaagccaggattcgaactcaatttagaagtctgtgagacccgaaagctcatgttcttaatactgttcagccccttcaccatcagggctcagggagtatccttcatgggacttctgtgtggcctgagggtggcttttgctcatagattttaccctccccttgggagccccaggacagagtaggtctgggaactcgcaagggctgcctccaggagaaaagccacctctctcaagtgggcgtgcacttggcaggaagcctgcgcaggtgtttggctcagcccaaatgtgggagccactgaccaaatgccaagactctcagcgaagagccatagctagtcctgtctccccacctggaagctgtttttcgaacggagctaactgccaggatgctctgggctggtgaggccacaaggattgtgagaggtgccctgtggctcagatggcacccaggaaggaattggggtctgttgagggagggagagttcagggctagccaaaggcaattccagatccctgcccctaagcttcctggcctggagctggtaacgtctccctgactcaaatgtccatgtggctgggagggcagacaacagttgccatcactccacgcagaccctcataactgccttgttgtccaaccccacagtcccacagcacagtaatggttcacaagacactgcttcccaccccttctcccttgggtcttgagttggctttgagcccaggtgggctctgcctcacctccctttacaggggatacgctgctgggtcccttccttcccgagtcctgcctccccaacatcatccacaaaaggcatcctctcccttcctcctcctgcccctcatttaactccagcacgtgttttgagacaagtctatactccactggacactttgttttacacgacttcctcttattcttcattctcctcctgtttaaaaaacatgaatcactagcatttatgaggttccttctactgttccaggcaggatatgatattattttatagccaaagggatgaagatctagggaggtgaagtgaccctcccaagactatgtaattaataagtagtggagttaagattagatttgaatagagggaaactgacctcaaatagagaatgtttctctctagctatgccaaagtccagcctttatcacaaccttgcctccctccagccaggcatgtggcccacatggggcacgccctgagcccaggtgcggtgacccctctctggcttagcacggttaggtggtgctgtagttgcagagtgctggcttttaagccgcttgtgagtaagggatttattttttcccagcctcagtttttctctctgtaaactgaccataataataacacccacctcaaacagttttataaggttgaaatggggtgaaagtaggaaagatctagcacataatgcactaatttttttttttttttttgcctaaagcaggcagtggaatagaatgcttaggggcatacagctctgagatcaggctgcaagactccactgctgtgtgatcttgactaagtctcttaccctctctgtgtcctggtttcctcacctgtaaaattactataatactagaatcaacttcataaggatattgtattcaaggaggatgagaggagtcccagtgaatggaggctggcatagaataggcttacaataaagagaaagaacaaataagcagctatacacagcctctgccacaaaaaactaccaatagatattagccgctattagttaattgtcattattatctctccctggcatgtttccactcaggcaagaccaaagcactttcctctaccaaggaatatcttcctctactttcatatccctctccatccaacccttcagcctgcctcagttgggatttgtaggagtcctgaagctatggaccagatcagaggtgccttcccttccagaatctattttccaaacttcatcgattgcctatatttatatgcatgcatgcacacacacgcacacacacacacacactctcactcactcccgagtcagaaaaaggactcagcacccagacatactgcaggctcttgaagaagacagtattttcctgtgagctagaggatcttcctgttattctccatgcagttcaaattctgtcaattattatccagttagtcatcgctccagaggtggactgtcattaaaaaaaaatagaaggtgtgtgtttgtgggtgagtatgtgcatgtgttgtgtatgcagggggtggggaggggcgagagcggtcaaataggaagtgccttggtatttatgttgaagtgcacactggtttaaattacccactgggaatatgattatgcttaatctatgctcagttgaaaggggctggggctgctttctcccctcccttcttgactctctgttcacagaactcaggctgcctccagccagcctttgcccgctagactcactggccctgagcacttgaaggtgcagcaagtcactgagaatgagcactttcttctcggacacagcatggatctgcctggctgtccccacagtactatgtgggacagtattttgcaaatacaagaagagctcagggcagctgtggagctggatggtctgcctggcaggcctctgtgcagtctgcctgctcatcctgtcccctttttggggcttgatcctcttctcggtgtcatgcttcctcatgtatacttacttatctggccaagaattgttacctgtggatcagaaggcagtcctggtgacaggtaagcagacggtgctacaattttcactgagggtatgatctgaaacttgctttgccttagcaggactttgtcaaatctggcttaaaaataaaatacttggcatggagtaaatgaaagccctcacccaagtatttttcatgacactgttttcgttccgttttttccaggaggtgcatttgaaggggctggtagtgggagggaaggagaggatgaagtgcacccagacaatgattttgttaaaatttcccaggaataaatattaataggcaaaatggcaatatttcatgtgttctattgtacccaggaatgtcccatagattgttttttaggcttaaatggacttttgttctgacatcattgtttggccaggttctccacctggactcttcttccctaggtatgcaagaacgcttacaagccaagttctacttgtcccttgctgttttgaaatattgaagggattcacttacctgggctggagactttgcagtttgcttggctgctgtcaagaaccttgtgtcctgtctgaactgttcctcattagacctctaatgtttcttaattggaccaacttggcatcgtgtccaacattcagttgcctgttagctgagctgccagtttttcccttgtttgtgtgtgtgtgtgtgtgtgtgtgtgtgtgtgtgtgtgtgtgtttccccattgcaagtgtgaggccaaattaaatttctttgagttgtaaaatttttgcttggttatggagtttaagcttggatagggctgtaattaggattatccagcgttatcctaac

SEQ ID NO: 63887 - DNA, 1232 bp, Homo sapiens
atagataaactttatttcagacccaaccatttcccaacacctgaacaccattttcaggatcatcccatttcatccactggggttttgaataatcccagtgacagggagttgaccccctattggtggaagttatttcatttttatacaatgctaatggttgtaaatatcttccttataatgagcgaactattcttcccttgaagttaactctgctcttggaagtcacataatctaattaaagtattattttgcatgattgcccttgaaacatgtggactgcatcatatcagagtcaaatcttctttgaactaaatcttctcattccttttaccattcctcccatggcctagtttccagaacgttcatcattctatttagcctcctctgaaccatttccagtttctttcttgacattcctctgagctgttgactcagagttaatatcacataccatcttggtatgagcaacacaaacccagctggaactaaatgaggtgaaattaaatcagaacagatgcagggttcttcaccacatgctgttgctttgtttggtggggtcagtccctaaacagaatttcccctgaattctgaaccaatggagaaatgagacagggggcttaagacatcagctttattcctgatagatgcattggagcacgggtcttaggcatgtggtaataacggtgctcagccaaggcaaggtcgaaaagtctcaggcctcacccacagatggggcctgggctgggcagctgggcttagcacaggtgtttataggctgggaggttggaaggaagagacaatagggtccacgtgagggtctggcctcttggattttctcctctccttctcagtcctgatcatttcctccgagttgtcatttggttctcctgctagagagagaaaagacctttgcaccaggcaaaatgttcatgtccaattctttctgccaaactcaccaatcagatactttgctccacctccctggggggaggagggtagaggagccagaggggccaggaacgtcacactgaaagctatccctccatattgcagacagcataggaagtggggaagaagtgttcccctgtcacactaggtccagaaaaccaacacttctgactgggcatggtggctcacgcttgtaatctcagcactttgggaggccagggtgggcagatcacctgaggtcaggagttcgagaccagcctggccaacagggcgaaacccaatct

SEQ ID NO: 63888 - DNA, 819 bp, Homo sapiens
tagagaattcaaacccaaacttttgcccaagaccagaaggccctgtggaatccgagcccccagatcccacacctctctcccctgctagttagcttgaagcaccaagctctaaagtctttccatttactgttcttttcaccgggaatgctttttcctccaccctttacaggctggcttcttcttcaccttcatgtcttagtctaagacatgacaattaactgcttgtagtcatgcttttgttttgtttttgtttttgtttttaaatcttggcactattgacatttggggctggaaaatttctttgtcgttggaacttttctgtacattataggatgtttagtctctactcactggatgacacaataatctgctccccagttgtgataagaaaaaatgtctctagacaatgccaaatgcctcatgaggacaaaatccctgccaactgataactactagcttaaatattaacttcttgaacaggtattctctgttctccaggctttaagtctccaggtgtatttctcaatcttcatatcctatttgttactttcatagaacttttctcaccttgaaattgaatatttatctagtaaatatctgtgtcatagtcccactagactatcttgactatttcattcaattctgtaatgatagcattgcgtacggctcctggtatgcagtagatgcttaataaacttctgttgaagaaatgcatgcacgcatgaatgaatgcatgagcaaacaaagactgctaggcaggcaagtgccttcccgccagggttagagagattatctagcagtgcaaaaagaccatggact

SEQ ID NO: 63889 - DNA, 1659 bp, Homo sapiens
catcctggcacccagtcactattctgttgcaaacacccattcccacctgacgccaatacatttgcttattgaatgtctcccatgacctcctacaagctaagcttcatgggatggggacttggatggttttatatgttgccgtgtccccatgatgtagaagagtacatggcacatgctcaacaaagagctattgaaagaatgaggtaatgaataggcaggaacacacaggatggagtaagtagcacatatgtgagatgattaagaaatcagcccaagtagaatagaaggtatgtcctaaggttgggaaatgtagaaaactcccccacagtgggcaaatgatagaagttattgacatccagacagcgtactgtatccaccatctatcagacaagtgggtgtcagagcaggttcatgagctggggagagatgtggtaagaatggagcagaaatgagaagcctggattcaaccggaaaaccatgcaatagaagcgtggatccaactagaaaataacacaatgctctggtgtgagtgagggtggcgaattggtttcctctgtggttggtgaggagtactggagtgagtagattctaagggagaggtgatttgattgaacagtgtccatggtggaatgagaagtgtaagctggcccaggtaccaagggtttgtcatctctgttgtaaagaactaggtcaatggtggtaattagcaatgaaacagaaaatagaaaactgtaaatcacagacatcttggattttattcaagtttggcaagttgcatcttgtaccattatattttggaagcggctgagtgagtttttggtcatgtgttggcaagaatgacatcctgtcagccaggaagcatctttcccatgaaaaaaagggacattagtaaggctgccctacttagataaaaccttagataatgataaaagggaccttgggatagtggggcaatttagttgtatctctggttagttttctcttttttgtgttatgctaatcttaagtaaatttactttttatgtagttgcttaacgtgtttttacaagtgttactttacttgtagcaattcttgtgaaatacatggttggaacattaacaaaaaatttctattaaccaagccacaggaaaacataggagaatgaacaaaagaagccagccacaaagaggaccgatacctatttccatctatttaaaacaaaaatcaggtaaaacggatctatgctgttgtaagtcaggatcgtggtaacctgtgaggggtggggacaactggaaggagatacaagggagatctctggtgagctgttgatgttgtttcttaaccttggtgctgattaagtttctctataatgtataatacatagcagattggtaacctcaaaaatgctattgcctattcacaacgataggtgaaatatacactagtcattgattcacggaagttgactatattcagagagaatgtgttagacaggaaatacaaacaaacaaaaacaaccaaccaaacaaaaaaacaggtgccttagaatcttatggacgtagggttcaaatggcacctctgcttttttacttgagtgaggctggaaactttttatattctttctgaagcttggtttcctcacctgtaaaatgggaaaaaatgtgcacttttatgggagc

SEQ ID NO: 63890 - DNA, 940 bp, Homo sapiens
gtttcacggctgactctaccacattcccgttgtgtagctttgggcaagtgtttaatttcccgggcacttcagttgctcatcttaacacaggaatcacaagaatatgggagaattcttcataaaggttatgttccaagaaaaatgcatttgtttccattaaaaaaaattgacatgaaaaatctagctatttcccaaggcctcctcacccgacaactgttatccgttaagaatgctgagggcaaaggaggagggaggtcaagtatttgctcttcctggattaagagttgagcttttattttgacctcagggcagtcctaagtatgctagagttttgttgtatttctctaacattttattataccttaatctattttatggggaacaggcaatgtcaacatgagggtggcaatctgatggattgcctaagtcttaaactaaagggtggggaaagtccacttcccactagtttcccacaggctttctaccagctaaacagctttgattcagatgacctttgtaagtgggaaactgtaggtcagggatctccaactcaaaaggctatggggtcagggtaggctgcattactgagggaagctggtgatgggaatgtgtgtgtgtgtgagagctcttgatcagtgaaccttgtttcttcaagtgcataccccatcagagggggagccccggaggtcctcagcctcagctgatgggtcccttgtgggaatgccgactcatctcctggttaatcaagagaaaccattgatctgggttttcaggtacaatctcccgattctgagtctttgttcaaatttttgcaaaattcattgtgtgggacaaatgaaatgcctattcagatcacatccttttactgatagatagcagatcttcaatttgtgtttgtccgttctaccataagaagtgagattccactatgagaaagggt

SEQ ID NO: 63891 - DNA, 3074 bp, Homo sapiens
tttgaagactatgtagaaatatgtaaaaccagtctatataatagtaatttaaaaatcagctgtcaaattgtatgtgtgctataactgttaaagaacgatatgtaggaaaaaagactagaagaaaaagaacatgaacattatgagagttatgcaatatggtgagattatggagaataccttcttttattgatctcagtattgactgtgagcttttatttcttgtatgatgttttattaatgactaaaaaacatttacaggtttgtaaatttatcccccatcttccttctttctgaatgtagcttccaaaggacagtgcttgtgttccagggcacatgcatcccagcactcagtcctgtatttacagggtggatgcgttttattcaagaggcctggcctgaagaactcccaaacacgcgttattcacaacgtgcccaatttaagacttgaaccaacaaatgatggggtgtttccgttcaccagctaatatggtgcccccatgtggcagtagcataaatacactttgcaactacattacacaattcctaataccctcaaattcaaggtgattcacattatttcccttttgcacataaactgagtctttattaacatttttagaattaactgctatttcaaattcactccaatcttgtacaaatgggtctgtagtagtcattgcctgtcccaagttgatgggtttccaggctgctagagacagaatgatcccaaatgacatagtttaacaccaacctcagcattttctctgccctgttgagcacttactatgagtcaggtgccctcagcactagtgacaaaggaccctctctcagtttgtaaggcacaaatattctagtgccctcttcaatgcttattcatccaacatgtgctttttattgagcatccactatgggctaagccttgtgctttggaggatttgaatattttataccccagttgtttatatcctaatctgtgcctggctccaaactacctctgctgtgtcttagctgaatgacttaatccttctgtgcctcagtttcctcctctgtaaatgggtgatggtaacattacttaccccccagggtgattgagaggattcagtgagtaaatgcatgtgaactagctggaacttggtaaacatgcaatccatacttggtgtgcttattttcaaacaccactgttgggtaactcttatgaaacacttccaacttctcacgaaagccctggctttgttgccaggtttccggagtatacaattattttcccctctcctcaaggagtgattccttagccacagactttttcaaggccctctgacccctgagctgcctcaggacttcatagacaccaggcctagcacagcctgatctctaacatcataagtcagaaatgacgtcacggttacagccacgatactgatgacagccattcacaacacgctgggccagtgcgaaatcctgtcttgctgactgcccatgccagtctaggagggggtgttatgataatcctaccttccatgtgaggaagtggaggttccacatggttatatgtgactttcccaaggcttgtaagtggaagagaagaatcaggcagtctgagtcttaaccaagatgttcagctgacagtcagtagaggcaaactctacatttaccaatattgtgagtggaaacatctgaaaattaaaataaagacacagttttattttttaaaaagactgatgtagtaattgtttggaataggctctattaggcatttcacaaatattaactgacacaggtaccattatttagcccattttacaggtaaggaagcagaggcagagagtaattagaaaggctctctagggttacacaggcaggaatagcagggctagactcgcacccattcgcctatgccacactgcctcatgggtaaacacaagcagatggtctcccgtgatctttggcttcattaatttactgccaaacaaaaaaaaacctcagatttagttaggagagactttattcaaaaggattattgcagtagagggaatgttctgaccacttaatctgcaagtgtctcaagatgaggcagtaaatattttgctttgctaaagaggcataaacaaggttagaaagaagtgggtgttgggggctgggatgatcagagtgacacaatcagacagtggttgagggctgatcaggaaggtctgtaaagaggagttgtctgctggctcaggctgagggtgggccaggacctggggaaaggagagactctacaccaaagttaggttaacgaacactttgttccgactgaccagtggaaacaggcagttaaactaaccacaaaaacaaagaaagggagtttggaggctctgggtctggccttgtcataggtaaacaagtgggggcacctatgagtctcatctaagtcatatggggaagggagttctttgcagtgagctgtttcccagaacacaaaagggtggggacatttcttaacctttgcaattttccagtatcacagggcttgcctaaagttcaacactgttgtcacctgtaggctcttccaaggaactttcctaagagagtcagatcctaggctcatgaagctgctcaaaggcactgccttccaaaatgtgacaaattatcctctactcaaaggaaaaggagtcaagatcacaatgtctcctccttgctcgcatccctttacctgccacgctggcttctttcactcagtgtaatggtttcaatgttcatgctgtagcaagcatagaaacttcattcctttctatggcttaataatatctcactgttgggtataccatattttttatccattcattagttgatggatgtttggttagtttctttttttctgttgttatgaataatgctgctatgaacatttgtgcacaggtttttgtgtaaatatatattttcatttatcttgggtacacacctaggagcagaattgctaggtcgtctggtgacattatgtttaaccttttgaggactgttttccaaagcaaagataactagttttagtgtctgcagtaagtgaaaaagatgttcaggaaagacactaaaactaa

SEQ ID NO: 63892 - DNA, 2656 bp, Homo sapiens
tcctttgcagggacacggatggagctggaagccattatcctcagcaacctaacgcaggaacagaaaaccaaataccacatgtcctcacttgtaagtgggagctgaacaataagagcttctttacccctttttccctgagctccttcaaaagttaggtgacttgcagcctctacttcttggcaacctcattaacccattaaagtttggctcctttgttttccgttaaagactgctcagttccctgtgcccactggccacttcttatcctccttgctgtctctatcaggcagaatttccacaccttctcctgaccttctatctgcttgtccagcctcagtgagaagttccatgtgcctctcatttgggcagaggtagccagagttggaatgtacacattgcttaaaaggatgtttgcctgaaagttcaaactcccaaaatgtcctcttcaataggtttctttgcagctttttgaatatgcatatgaatataaccacattttaaaaatccattcatcagttgatggacatttaggttctttccaacttttgactattatgaataatgcttctctgaatattttttgtacaagcttttgtgtggacactataaattttatgtaagtgttagctattatttctatcactttctgtgtccttgggaaagtcacttaaaccctatacactttagtgttttcatttttaaaaatgaggttcctgaggataatactagaatctacctcctatgacagttgtgaccattaaatacattcagagctgatgttaaaacgctcagaacagtgcttggcatatagtagacacctaataaacattaagagttattatgaaggatccattacatttcaggcatttgttgaatgctctcaggtatatgaccccaataacctatgtaatgttgctattctcatttttcagttataaaaaccaaggtcagaagggttcagtgactggcctgtaagctagaacttgaacttgaactttagtttcatgttctgactcaccaagccacctccttccctggtgactcagtgtaaacatatgttaccaccacatcaaacactaagtcaaagggtctcagatgctcttcccagtggtaccttattgaccattttttgctttctactagctccactgttagatgcttgttccagcccaactcccattcttgtgtggaaataaagtcaacataacccatgtcttctaaatacactcctacgggtgggaagttccaggagtgggatggggagaaacattacttctttaagttcttctctaagaaatgcaatctagagtcaaccatgtccttccctccggtgtccttccctcctacatcttccatccctaaagaaaggaacatgaaagggaaagagtaaaagacatcatgtaggaatacaggtaagaatcttctaggatgccaggcaagcagaatgaagacagactgcccgggttttaatccggtctctaccaatgacaactgcgtgaccttgggaacagttctgaacctctgagttgcagcctcctcattataagataaggataatagtaattgcttcttctggggtccatggagagatgagatgaaataacacatgtttaagcatcagtcttgtgcttggcatgcagtgaatggtccagtagcattagcgacccaaaaaccatcccaccatgaggatctggggcagcagctgacagtctgtatgcttgcagcttcttaatctgccagctgctggtatcaccacctctgactgtgacaccgaattacccttcatcctctgccccgtcacttactagctcctgaggagatgaccccaacaggtaactccttccagatttgaccatgtctactacaggagacttttccccattgtaataacatgttgattatccctcccacataaatagcatagctctttaacccaaatcccagcaaggcagttggataaatatttaaccaagtatcagaggcatgggaggcaactctgatggtacaaagagcagttggaaaatctttctctttgaggcctaaagtcgccagttttgctcttcagaaatgttcgcataaacacttgtgtgcaattgcatgctatgctcaaaaacaagccctgctaaaatgacccaggcctcagagattttgtgtcattgtggcttaaatcttgctcttcggttactagctgggtgacctgggtcaggtcaccttacttgtcatgtctctatcttcaaatgagggtcatgtagcacctgagtccagggcaatatttctcaaccttggcactactggcattttggtggggagaattctttctgtaagggcactgtcctgtgcattacggggtgtttaacagcatatgtgtccttgacccactagataatagtagcacccacccctaattgtgacacgtcttcagatatttcccatgatctttggggtgcaaaatcacccccagttgaaaacctctgatcttggctgcagatttaaatgaaccatgggttttgagtgcttagcacagttactggtatataggaaatatccaagtaaaagggacctctcaacggagagagagtaatcacagttgcctgccacatcaaactgttctttttattattattttttttatttttttacctagaattagaggaag

SEQ ID NO: 63893 - DNA, 716 bp, Homo sapiens
ggagctactttgtgccaggcactattctaatatattattaatttaactttcgcaacgatcctatgatgcatggaccatcattattaatttacagataaaaaggcagagaccaaatataaagtgactatcctgctaacaggtggctaatcaatggcagagctaggatttgaatgcagtcagtgttggctcctctgctaacctgtttgtcttctatctgaccaaccttcaacatctataaaggtcatggagaagtgagaactctggctaaccccacgaactgggattgccacacagcccatgctgtgattttgaacaagttgctgtaacttctttggcctcccttattagtaatagaaaggagttggatttcaaacgctaagatttcatgaaactataaatcacttacataaaaatccgctggccatctgtggcaagattaaccagtttaatgagagtctgcttgatgccagacatcgtgttaaaattatatcagttaagccttgggaccttttgtgtttaagtgacagggccaaaccccaagttagcttacaccaaaaatggaagaggaatttactagctcttcaattgtctgagagacaataaattactagctcaccaattgtctgagagaaagaataaataagctcactggtgtctcttcttaaaagggcactaatccctctcatcatgaaggctccaccctcaggacttaatta

SEQ ID NO: 63894 - DNA, 505 bp, Homo sapiens
atttgtaagaaggaaatattaaaaaatacctgccagaacaacaggattctgaaagattctgtttggaaaaaacaaacaaacgaacaaaaaaacgttttatggggctaggttttatacctctttcccagttattttcttttgctttcttcaccacgttgtggcaggccaggtttcactaactcaggcttccataacaacggtttcagcactgaccgagtggttccatcaaatattaacagctgagagagtcagtgcccttctgcaaaggctggaatgtcacaaaagcccatcaagagctttgcctcggcctttcctgggccttaaatcatgacaggataatgaaggaattcttaacgggacccgtttaggagtaaataagttttattggggggtccaaagaaactccccaggcctccacaaacaagccttattgggtactaaagaaactccccaaacctccatgatttagcaggagacaagacaaaggtattgaccccagcacctg

SEQ ID NO: 63895 - DNA, 1639 bp, Homo sapiens
catctccacagtcgtgtgatccagttttaaaaataccccctctctccatacacatatatacacatatacatcttgttgattctgtttctctgaagaactctactaaaagaagtattatcaaaattaaaaaggagcttgaactcatgtagcctaatgctcttctttttaaagatgaggaaaagagatattcagagaaagaagtgaatttacctaaattacccagctaaggagttacacttcccatatatcatatttattgcatatataagtaagcaacaacttctcgagaagctcggtgagtccccaaggtccccagcgcttctaccctcactgcactgggtaagctgtaccctgactgcttctgtgtactcaagctcccatccgcccgcgggcctcctgagagagtcggcctaattcgtaagctggttcccagtaaacagtgcagagcaggcgctaagtgaatgaatgagcacgagagctggaagccctctgaggcctctctggtgtcccttgtccgcccgccgcctcggccccggccaggttggaaggaccgggtgcccctaccgcccggagtggcgctctcagcgtccccgcaccttcatgcgcagtagattcttggacaaccttgtctttcgctcggccgccatggtagcttccgcccagcgccgcactccggccgcgagcctcaccgcacatgcgcggagccgcgtgcgcagctgcgtccctcgcgtagtgcgcgccgccccgccccgcccctcccctgtgtcttgcgcgcgggcgcggccactcagcgggcgctctgctgactgagaggctcgggtaagctcgcggggtggcgggcgcggggatgagcgcggcagaccgcaaaaaagccgaagtcagaggacgacccagaacttggcttccccgagccgcgggtcgccttcccgggacgtcggcctggccccctcggaggcccatcctccctcggggactcccttcctcagggaccccctccacactcagtagtcctcgccagcctcagagaggtttccgccacgcctgccacccgcctgggccgtgttacccacgtgttttgtcttcataacgtgggtggcgggctccctttgttctgggtcgctttgcagggtccaggtcgttttctcttcaccaggaccccacgagttgctgctttcctcacagcagcccggagtcccgggggagcgcggcgggggccgccccaggcaggctggcttcattcccaggctgctgccgatgcgtgtctggccgagtgatctctgctaaacagaagaatctcaagaaatggcaagggatggaggcagggatgggtgccaaagacacatgaatgagaacaaagcctggttttgatccaaagaattgaaaagaccatagcgaggggcaacatagggagaccccacctctacaaaaaaaaaaaaaaaaaaaaaaaaaaaaaaaatatatatatatatatatatatatatacacaaaaaatatacaaaatatacatacaaaaaatatatacaaaatatacaaaaaatgtacaaaagatacaacaaaaatagctgggtgtggtggcacggatctgtggtctccactacttgggaggctgaggctggagaatcactggaacccgggacgt

SEQ ID NO: 63896 - DNA, 3558 bp, Homo sapiens
gaaggttctgtttctcacctgggccaggattgtgcctgtggtttttgttcatgacaagatgagaagagcttggttaaataaggaacgacctctcgttatatatcttctatcctgattgattgcatcagaaaagccattcatctggtttgaagatagacaggtggttgctgtcactgcaccagcagcttttgaagtttgctcagtgatatgattacagcccatacttaagcttctgctccaggaagtgagattgacctttgatcctactcctcatttaaaaattacagatcttggaaaatgaaccaatctagaaagatattggaagctgctgctgctgctgctgctgctgctgctgaggttggctgtcaaaccaacttaactggcctgcattacctagaattgtttttttttttttttttctggttaaaaccaatgacctttaaagcctttttatttttcctctgacaatctctagtggacctatggtcttttgtgagttctgatgggaatcccagaatctttctgtaactgtgggttccaatgagagaggcacatttaacaaagaccagaagaaaatcaaaactgttgctcaaactgacagtgtatgttcttcatcccactccttcattagctcattcattcattgattcgttcattcatgtgctggctctttgtagaagttgggggtaaacaggcgaccaaaaggtagtccgtgaccccaggatgttgtaattcagaagggtaaacagacaaggcagtcaacattgtccattcagtgtgaatgagcttgggagtacaaccactttggaaacccattttgttaatttacctttgatagatacttattgaacggtttttccaagtgtctgtgaagaagacatggtggtggtagggggtgggtggatggtttctgaggacctgataatgtttctccttgattttagtgccagttacgtggcaactcatggaaaacattgagctgaatacttgggcttttgcacctttttgtagtgccttagtgtattttacacaaaaaaataaataaaagtatgctcagcctcaggtgtgttggaaatacagaggagagaccagcccaactttggaggagaacagagagagggacccaggaaggccttctggggaatatatttgacttgggccctgaaggagcaacagaaattaggcactgagtaaaatgggactggatgtacctgcacaaagccagcagcagaagaaaagacatggagtggagggagctggcagttcatgcttgggggaagctgagagttgcttgtggggctggaggccaaggtgcagggctgcaggggtaggagggagcagccagggagggggtggattggttaagaaacacgatgtgcatgtcatgttgagaaacttggatttcaccctggaggcgcaggaactaggggggatttttcagcagcagtgacagacgctcttaaatctgggttttccaatgatcagcatgcttgtgcctgcaccggggcgcaggatgggagacagatgccttttgcagtagttccggagaagaagactgaagaccacattcaaggccctgagagagaagagaaggggacagataccacagagatcatgagatatagcacaacagataagacttgctaattaactgtacggggttacagggagggacagggagaaatcaggtttcttccagcccagcttctggttggaatcactcaggcagagacacatgggcctgagagaggattccccttatgacataaagccgcaaaaattctcattagtcattgcaaaaacatctatttccggcctacactgcaccagccagtgggggaggtcctgagagatagagaaaggatgaattcttgcccttagagagtcacctagagattctggggagacagcaggtccgagtctctctgcctgaaacctctggacagtgtctttggctgacacttacatggtggtcttggtttcttattcaaggtcggtttcccaactctcatagcatcagctttagggcatccccaaatctcttgcagaagagatggttctttccccttgagttgttttgagccaagcatataacattgtgtgaatgtttgaaaacttctcttggttctcagaatgcaattctgacagtgctgaaggctgccaattaaatgaagatttagataaaggctgtgtgggaggtggaatgcaatattcttaaacctaataatggcttccttctgtctttttgaagctctcaaataatcctgattgactgactctctgctttgggcattcccattttctggacaatttaataccatttaaaatgtttgacaacttttatttgggggcagacatccttaggggatggggccgtgggcaaagatacaaatgctgtaccatcaaaggaaccatggatttaaataaggatttttttttttttcatattcagaagaggtgggtacagaaaggatgagggcagcttctcaggttatagtattaaccacgtgaagcagctaacaaaggtatgtgcctggccttgtgctaaaggctttcctcgtatcagttctttcatccctcccaacactactgaggtagatggagtgactagatccattatacaggcaaagtagctgaggcccacagccatagcaaataaactgtggagctggtggtcccagatttcatgcttttagtcattctcttggctctggggtacaggtaagcttccagaactggaggatggagtccaaaagaaactcaagataatttccctgcctttcccattgtatcaggggattcatctgttcatacattcattcattttcccaacacatttactgaatgcccgcaagcaccaggaaaatagcaatgggcacaaccaggttcctatcttcatggagctattgctttattggcagaggcaaacagtaaagaaaattcattagtaatcagtgttgcaatcaatgagccggtcaatcaagcaccataaaagggtaaagtgtgacgaaggtgctccttgtgataggggttgggggtgaggggaggtgtcctggagaggagacatttcaactgagatctctctgaagtagatgagatggccatgtggatctcaaaaggaaagtgtatgccaggaagagcaaaaagcaagtgcaaagtcctaaagcaggaaatagtgaggctaccgcagtgtcgggtccaagagtaggagatgagatcagggaggcagattaggctgcagggagggtgtgcgtgtgatgctgagagtgatgggaaaccactggtggggttgggggagggcaaggcagtgacatcatttgtttttatgtgcagcagaggaagccaaagcaattcagaagaagcctacagaagcttacctcctccacaggctatttttttcttgtttacatttgttaattttacatatatattaactcagtcctcacaaccaccaaatgaaataggcattgcccttattatcattctttcccattttaacaatggggaaactgaagcttagagtaggcaaggtcgcccagataggaagcaatgccttcg

SEQ ID NO: 63897 - DNA, 1241 bp, Homo sapiens
acctggccaatttttgtatttttgacggggtttcaccatattggccaggctggtcttgaactcctgacctcaggtgatctgccctcctcggcctcccaaagtgctgggattacagacgtgagccgccatgcccggcacatttcaacacatgagatttggaggtgacaaatatccaaatcatgtcacaaccagtaggataaatactacttatttttcattcctcagatgagaacatttagtcacagagtgtggggcagccagccaacttctgatgttcagagtcagtgctgtctaaacttagctttcatgttctttctacctcagaaggctacttctcaatcaattatttgggatcagttggtttcatcacatggcattgcatcatgaatatgctgaacaaggccaagggaaggcaacaattaactggcagtttgtaggcttgtgattagatataattaaaagtcacataaagttccaaaaaatatttttcacttgtttcatatctcaacaacttccacttgtttaagttagtgtttttccaagttgcattgtgatgaggagaatttgacatatttttgagggctaagagtgagaatgattcaaagctgtgagatttgaagtgatgtctaaaagatttttttatcatgacttatgattttttatacacacacacagacacatacacacacatcctagtaggaaaaatatcaaaatataataactttagataataagaaaaatggtttctgtttacactgagttttcacaggtgagatatgcattaaaggcacaaaagctaaaagacaaagagaaatggcaatttaagcacttgaaagccttgctgaattttttacagactgtgtcaagtggagctggaaagtgaaaccacaaatcggaagctagaaaggaagcagctaggcaagagagagtaccttggactgctggctgcagtccccttcttttcccccaagtgacctgcacatcggacttcaccctgctactctctcttcccaaagatgaaatgaagaggttgaatgtaatgattactaagattctctttctgctcccacgatgatctgatgctgaggatttttaagacttctgtgccgttagaattgattacttctaaattgttatctactattcataaaaagaaaattattcaagcttgtacttcttggcacaaaatatacctgtgattttctaaaatattatctcttaatgcacaaagttctcaagtg

SEQ ID NO: 63898 - DNA, 717 bp, Homo sapiens
caacataaaagcaaagctccaccactcttctccttggcacagaaaaatccaagtcactctcctaaggctggaaaattctgcagcaattgtcccagttctacctggaaaatgaggaagggagtgataaaattctctgtgaagtgaggagaaatgaggttaacctcgccaacatttatttgatgtgcgtgtttgtgcgctgagtcagggccggaggtcgtgtcttcgtttaacaaatagaccacatgttgacaagcaaaaaacggctttctttgtctggcaagaaaagccactgcctcgcttcagacaacgcttttttttgttggtgtctccgctgacaaccctgttcaaagagagccacaaggaatgaaagtgaaagcagaaaaagccaacttcggtgtaattaagagatatcactgcccgtttttctcagtgatgaggccgcagctgactcagtcgataagggccgtgaaggagtggggcccagggcgcagtggggatggactggccttttcacggtccaattactggtccaattactagtccaagttttgaagaggattgaagtagaactggatggagatgggaaagagaccaataaagtgttttttgttttttaggttttttttttaagaggggaggaatgaatgaagaacttcttttattttcttttccggcttggagctagctctggttcccaaatagggtcctgggggaaag

SEQ ID NO: 63899 - DNA, 1333 bp, Homo sapiens
gccaagaccactccctgcctctattgctccatttctgagttggtctcactttccaccccactgacggcgcgctgcgtgaggggcggggcatagagggaggggaggggctatgcgaaagaaggcggggagagtggggtggggccgctccttggaacggaagcgcgcggcctcgaggcccttccggtgcgggagaaactactactcccataatgccccgcggtcccgcgagctgccagtctcgtcgcgagaagcagcggcccggggcgactgagcggacaaacggaagtgtaggttacggtctgagacatcaccgccaagctgggcatcggggagatggccgagactgaccccaagaccgtgcaggacctcacctcggtggtaagggacggctgtgagggccggaggccgcggccttcccgggcggcgccgggccaagccctgctggacagaggcgcgcccaccgcggccgcgcgtggcgtctgccgaggccccgtttctggaagcgtctctggccgaggctcccggccaccttgacccccggggcgctcggtgcgggccagtctccccgcgggcgcccccaagcccgaccccttccagtagccccattcatctgtcgcgaacgccctccgggtccctcccgcctacctctgacaccctccccgcccttcaactcctcacacacccccgggtgccccagcccggcagaaacaacctaaagaccctgagctttgagtcgcagcggcctccccagcccagcagtctaattggacaggttggaaaacggaagcccagagaaggaagatcttgctgaaggccgcacagctgtccagaggcagaaatggggctggaaccccgggaccagggcttgcgtcctgatcccaggaagttgtctcaggatcgatgtggaccgtgtttgtttgtttcggtttttcttaggtgcagacactcctgcagcagatgcaagataaatttcagaccatgtctgaccagatcattgggagaaatatcctttttatctgcagtcggcctcctgtgggcctttggagcctatttgccgggcagtggtggggataaatgagtagttttcaggctagcttcagccattcacttgtagaatttgagcttggattgtactgtgtttctgagaaggactgcgccgagagctaggggcaaagctgagttagactcctggctcaaggagcatacgtctaccaatcctaatagctggtgtggtggaccatgcactgtgaactaagcgcttttgtgtgtgtcttttgatgctcagcatgaccttatgagtgggttgtagtgttatcatctttagcaaatgaat

SEQ ID NO: 63900 - DNA, 685 bp, Homo sapiens
aatcttgggaaagtcacctggtcaccgcaagcctcctgactgtcatttctgcgaaggggatagcaataatttcctccaggtttttgtgcagattgcaataagattatgaacgtgccatgcttagggcggggcttaagcactcattcagtgggtgaaaggaagaggagagaagagaggaagagaagcagactgactgttcagtgtgagtggaagccccatctccacgcgaaaacagagcaaaaccaggatgaaggccacccacgtagtaccgtggcctgccctgctcagtagccgcgcccagacttccatctgtggccagcagagggcagcgttgtgcaactaaagccccaggattcgggcaaggccccaaacccagaggacaactttgctagaaggtctggcagggaacctgcataatttactcctgagtctcagaactaaagtaaacaacgccccaagaaatgatacctaagaggcacatgacctgcatgcaaataaagaggcagcatgaagtaatcgctttcggggacggtctaatttcccccttgccccaccccgctcccaggatgagaagcttcagacccctgcatgattttcccaaggctgtaaggaaggatgtttgatagggactttcctgtgccgtgtttcattcgattttcccgataatctgaaagttgggcatttt

SEQ ID NO: 63901 - DNA, 1883 bp, Homo sapiens
tgtatgtgtatatgcgtgcgtatgtgtacatacatccatacatatagacatattctctctctctccacacacactcacacacccctccaacctctgtggctctgagcgtcatgtgtgtaagacactgacgcgaatggtgagtgcctaggcaggggtcaaacaaaggctacctaccatgccagaggattgccacaaacacctcttaagcaagcatattccttggctcctcccagacacactgaatctgaatctctaggattctgatttcggagcccaggaatcctccggtgcaggagttcccaggtgactctgatgcaccgggaggctggaggcgctcggatctagagaggaggcggcacttgtgcagtgcagtcgggaaagagaggaggggctgggccggtgcctttaggcggtcaggtgttaggaccggagtacaagccgccagccgcgcgggagcaggccccgaggcagcccagccgcggggcagtaacctttagccacacttggcctccggccgccgccagagccgctccgcccccgccgcctcgcccccaccgccccgccctcctattggccgcgtccccagccgggctcgcggcctcggccaatggggccggcgcgcgccggaagccggaagcgcggcagcggcggcggcgctccccctcggcagctgttgtggggcaccatgcgaggcttcgggccaggcttgacggccaggcgtctcctcccgctgcggttgcccccgcggccgcccgggccccggctggcgagcgggcaggcggccggcgccctggagcgggccatggacgagctgctgcgccgcgcggtgccgccgacgccggcctacgagctgcgcgagaagacaccggcgcccgccgagggtcagtgcgcggacttcgtgagcttctacggtgggctggccgagacggcccagcgggccgaactgctgggccgcctggcgcggggcttcggcgtggaccacggccaggtggcggagcagagcgccggcgtgctccatctgcgccagcagcagcgggaggcggcggtgctgctgcaggccgaggaccggctgcgctacgcgctggtgccgcgctatcgcggcctcttccaccacatcagcaagctggacggcggcgtgcgcttcctggtgcagctgcgggccgacctgctggaggcgcaggccctcaagctggtggaggggccggacgtccgggtaaggggccgccgtcgatcccccggcagcgcggactggccgccctcctcgagtagtcctcacttgccccctccaagtcccacacaccccgccttccctgcccgatagcacgctcacttcgcccgcagttaccgcctgccaactgtgtccccttcccacgctgtctgagtcctggcctcgtcagagcacacccccgccttcctccagtctgtccttgaagtcctcacttgtatagtgtttactaaatactcagcacttggtggtctttaaggtagctgtcacctctcgtacctgattagtgtgtgctctacagtcttttgaaattattgtagctgagaagtgtttcatctatatggtatacctgaactagagcatcaggcagccttctgagaccctggatggtgtttcagaagttcactgggcacccgctatgtgtgagacattgtcctgagaagtcctgtgaaatgcacaaaggtaaataggactcaaggtcaccaccaccacccaggagtctccatggcttctggccttgtctgtgctccatgacttttgggagggcatttaactccctgcgttcagtacttaatgtgatgattctgagttgacttgaggtaatcaggcattagcacagttcattcatgttaaatgcagacacatactttgagattta

SEQ ID NO: 63902 - DNA, 1543 bp, Homo sapiens
ctagacagcgttccccaagtccccccttgagctgggtgggctgcccagctgtgaacacaaggacacctccgatttcgtcctgtgaatgttgatattagtggtcccttccttcaggggctgtggggatctcaaaagataaggcaggtctggagtcctgcgcggtacctgccgcatggcaggctctttacggacagcgcagggacgcactttgatgctgaaaatgagtctctgggacagatggatcccagtctgggtcctcgcaagcgctgtgcaccccgtcgccgcgagatggcggtgttgcgcccctccagcctcctctgctctgcgcttgggcgctgaatgttaaaattcctaacaggtgaatcgcttgaatccgggaggcggaggttgcagttggccgagatggcgccactcactccagcctggcgacagagcgagactacgtctcaaaaaaaaataaaaataaaaaaataaaatcctaacaggtagcatacctgcactcggaacttgcacagccgctccccactctctcacagggattaggtaacgatactcagagctagagcaggcatttgggactgcccaaaccagctgctcttcctgctttctgaagcttccccgggggaatcttctggctcccagtccgagcctcctgtggtcagctcctccttgcccagtcgtcgtttgcagtacagcaggggcgtggtcatttgcaaatgtcccagagggccccctccagtcgcttcacatcggtctcaagtcgggctgactgagggcatgactttctgtctcaggcatggagcccagatcacagatcgaaactccgctaaatctagaggccacgggtcccaaacaccagtcatttgctgagcactgtcgcaatttttttatatccctcccatcaatacaagctggatttttttattaagtagaagctaaaagtaaaaagtaatataaaaacaaaacagcattaaacttcagttagatacatttgctttctctcttcaaaaaaatcggggttggcgggggaggattaataaatgttaaggttttttaaacgtatattaccaaacagactttctctttgaggactcagaaagtcctcaaaagactcataaaggagcaagaattggaaaaggattaaatgagattattgcttcgtccaggagccaccagattatcacacatctcacaccctgggcaatcctttgaagaattttgcctctagacatgcaaagtgcactttgccctgggtttatctaagtcctgcgctgtcgcccaggctggagtgcaatggggccatcttggctcacttcaacctctgcctcccaggttcaagcaattctcctgcctccgcctcctgagtagctgggactacaagcacacaccaccatgcctggctaattttttgtgtgtttgtaatagagccagggtttcatcatgttggccaggctggtctcgaactcctgacctcaagtgatccacccgccttggcctcccaaaatgctgggattacaggtgtgagccaccacgcccgactctt

SEQ ID NO: 63903 - DNA, 838 bp, Homo sapiens
cacttgaacccgggatgcagaggttgcagtgagccaagattgtgccattgtactgcagcctgggtgacagagcaagactccatctcaacaacaacaacaaaaaagaaaggtgcagagtgctcgcaggctgggctggccctgcgtctggagaggggcatggctcacatgactgtcagttatgtcactgaccctacctatgccagaagtcaaggcctagaatgtttgtggagtctgataagagcagtacacagggtttgtttggtttggtttgttttgttttaaagcagctgtgggaaaaagaaaaaaaggaaagtgatggtccttccccctccagagggacaacgacctctctgtcgagggcaagggactcgtgctggaatggtcacacgcttgttaggaaggaatggaagcctgggcaagggactggagtctgcagacctcctcatgctgcaaagtgacctcctggtatgcaggggacctgggcactcgcccttagggccactgtcactgctgggtcacaggaaaccggcagggcccttgggggcagggacacgcaggtggggctccagttttctgcagaatgagggaggcatgtgcaagaacccagccgtggggactgacagcccttccaggcagaattctagcacatgcttatgggttaggatcctgtatggagaagctgtcacccagagggtctaccctggattccccaggagggccaggccacatgcctgtcattcttgctgtgcctatggactggtcccaaggagggtgtaggcagagaggcccctggtggagtttctcatcctagcctagagtagcggctctcaaacccaag

SEQ ID NO: 63904 - DNA, 2090 bp, Homo sapiens
cagcggagacagaggctccgccagcagacaagtgccgctatccccgtctcacacacagaaatggaagcgctgagaggttcagccacaggcccggagtcacacagccgaaaatgacggagcccagtcccagcttgtctgacgccaaagtggagggcttttacacagctgggccggacctcctgaccactcgaactctgcggcaggcacattccctctcccgccgagattctcccttgggttttagaaaaaagagggaggaatcagggaacacaggatgtggctgcctgaagacacgggagcctccgcagcctcacccctgtgcggccaccctttcccaccctcctcctatggctcctcaccttcctccccgttccctgggccctggctccccagctgtgacaccatcttctccagggggcaatagtgaccctgcacccccaccccctggagctgggtgatgctctctcccctgagcagggcgctgacagctcacacccgtgccctcagtggctttgtctccagacagactgaagtctgaatccctttaccccacttcatttcctatggccttgggaaggctcctccggctttcttcgtctgtaaactaaaatcggtattgtaaatatctgctcacctctgtgttctgggagaatcgatgaaacagtgtgggtgaacaggctctgtaaaccttgtggcaccaaacaaatattagttgtttcatgagctggaatggcctgacctcttcatgccacagctccgggcaggacggactgacagccccagctctgccattgaccatgacttgggccacaccttacactcagggcgtccgtttcctcacctgtagtgtggggaagataatagcaccgtgccctcctcgctggactggtgtgcaggtctaaagcacgggcccaagaaatccacctacagtgtgggtggccgtggacatgggcgggcccttcaggacctgcgggctggggcgtggtgaacacggccgtgtttctggacctgtgcctttgcacctgaggcaagaaggaggcttccttccttgctttgctgtatgtctttgcctggaggtgcccaactctgcagctgggttcgagcctcagctctgtcactcacactgtgtggcctcaggcttgagatccgcctctctgagcgtcagctgtgcctaaagagccctctgttcacagtgcccaatgcctgcaggtgcccagcaatggcagagctgtgggagccactggctgaggaagagggaggcaagagacagaggcgggaagggatgaggaggagtcaagagaggccccttcgaatagctctgggatttcttaggcagagagtgatggtggttttccaacaggggcccagggatccgttttgataccaagaacaccagggatgcaacctgaggccacccctacccgcttttccctggcttctcagctcccagacagcctgcaggggggccgagggaggccgagggaggcctggggagggggcctgccatccagcaccaggggctgctgtgtgggagctcctccccagtgccaggccccttccttcagcctgcatggatcagctgccaccaccccaacactccacgttggcaggagcagtacacagatggggaaaccgaggctcagaaggaaagcacctctactgaccgcactgcctgcctgggcgcttgcagcactgcagggtgaccaactgtcttggcttacccaggcctgggggttcctgggacagagtgaggctttcagtgagaaaccctggaatgtcccagctcctgttagcaacagtgccgaagtccacaccagcagtgtccaacaaagacccgacgagagccacgtgtgtgtcctccaatgtcccagtagcaaagttaaaatgaaaagagatgggtgaaattaattttaataatatattctttttttttttttaagatggagtctcgctctgtcgcccaggctgaagtgcagtgactcagtcttagctcactgcaacctccgcttcccgggttcaagcaattctcctccctcagactcctgagtagctgggattacaggtgaccgccaccatgccctgccaatttt

SEQ ID NO: 63905 - DNA, 3584 bp, Homo sapiens
tcatctgaggtcgggagttcgagaccagccttgccaacatggtgaaaccctatctctaccaaaaatacaaaattagccgggcgtggtggcacatgcctgtaatctcagctactcaggaggctgaggcaggggaatcacttgagcccgggaggcgtaggttgcagtgaaccgagatcgcgccattgcaccccagcctgggaaacaagagcgaaactccttctcaaaataataataattaagaaacagcaaggtgtggggtgtgcagtgctacccacataaaacaggagagaagagcctgggagcaggcttcaagttctaagcatggcagacaagaaggatgtcatgtaaaccctcacggccactctggtagagacaatctgtgacttggccccagttttcagatgaggaaactgaggtgcgggccctaaggcagcttgccagagccctgcagctgggaaatggcaaagctggattcgcagcccaggcaggctggtgccagagggcttttggggattggagggtgcagtgaaatccaggtggaatgcgggaactggacggggtttcgccacttaaaggtactgttattttaactgtgtgcgggacaaagccatctcctcttcgcttatggcaaaggccaggctggctcattcagaggtcactggttcctcctccagagactgagccccagggatgggggtctggctagggggaggtggctgggagggagcgccaccctaggccccctggcaggccgcccagcaggggccctttaaggctggccatgaggcaggcagcgtgacacccgcccagtgtgcaagttcattcatcacgggcccctgctgactcacgcttatgaaagtgattttcctggccccgcccactgcctgcgccgcctcctccctccccgtgaaataccctcacttccctctggcctctcagagcctcttggatccccacagggtaatgggtgtcccgatctcgcgggggactctgtgatccgtgttcccctgaccctcctagtgcacaacttggccgggctcactgggctcctgcaccactgcctgtcaggtgagtgtccggggccaggttccggggcagggaatcaggcacatcccaggcacccgtggcaagcccagctggaccggagggtctgcagagccctggcgccaggcgggggtcccgggtggtcctgagtggaggccctcgcctgggttctctggagcccggcaggattctcccctacaccaggttcctcccagatcctcagctgtgtccctgtccaggtgcctggtaccctcagccaagcagctgaagcggccacagtcccagcgtaccctgggccatgtgaccgccgctcctagcaggaaagaggggtgtggccagcccgggcttactgcccagctgttccaaggccactgggtcggcagccaggctgggtgccttctgggtttctgcttctcctgctcaggagggacagagcccttgggtgcccatgaacagcccccatccctggaggtcccagcgacttagcttctctcaggaggctcaagagtgcggcgggttgggagggcggcccctgggaggctggggagctgcaggagaccctgggctccaggtgtgcggcactggggcgagggctcgtctgtgataaatggcaagtgccgcttgcgtggacagaccaccccctcacactttagcgcccccagggcttcgtgtcactttcttggtctccctgtaatcagctgttttactggaggggacttggcagaactaagatttgtcacatggccgtggtcttggaccctcctaggtgacctggggcaagacgcccactcctcctgaccagcttttcttcctctgcacaatggggataagaacacccacctcctggggtgtcttcaaaggcaaaggagtaaatggccactagaggtgccaaagaaacgcagacatacaggtgtcccagagtctcagagcagtttgcagctttaacaacctcagaagtacaaatgccgcacacttgaaagaaacgtcagtcgaaggtgcaactgttttcatttcttttatcctgtttgcctttgtgaaatttgaaacatcaatttttaatgttaacttctttccatcaacatctgccatcttcaattaaagggacttaaaaagataacattaaaaattgattcttccaactccgtaaaactaaaaagcacaaaaggaattgaaatgaaacttttgaactctcttttgtaagttggcagcatatttgtccgaggttatgagtgacagcgtcaagctgcttcggactttggggcgtcctgtgtcactctgaacgggaagtgacttctcaggtccagcccctgggtggtgacctcatgtatgtggcatccagaagcttctgttcaagagcctgaggacagtcccaggagggagccctggacttggagccccaaagccctggtggtaaaccagtgtcctctgctgcctgcaaagggtgggaaggggcagccagttctgattcctcattggccagcaggggctcctgcaaatgcccttcttggggtggtgggaaaatctgaaagaacaaaggaggggcagggcatggcccagggtgggcgcactggggcagatggagcaggttggctcactcgtttggtgaaggggctggggtgcctgggggtgtcagcccacggggatcaaatatcagttccatcgcccaccggctctgtagcctcagggcacggcttcacctctcctagccttagtctcctcatctgcaaagtgggttgctaggaggatcaaaggaggtgatgcggggaagccctttaccaggaggtcccatgctccccagtggctgctgttcccggggaccatgatgaggactgaggggcccagagccattcgagggtatcaggagcaagccagagaaagcactctgagacccgtagtcctgttctccaaggcctctgggtatactcagcacccagagtcaatgagaaatgatcccttcccagccagaacaccaggtcctcagctgtccctctgcctccccgcctgccactagcgctgcgacagagaagtgggggaccctggaacggacactgcacgttccacccggcagaggggtctcagcaggacctctcacagcacttggggcacagagaaggctctggagcagggcggcctgggctctgatccagcccagcctgcaagagctggttcaaccaccttgcaaactataaagggcggtgagaaacgctctggccctcagagtacttacaacaacccgattaaataaggattcaatttgttaacgtgtattaagtgttgagatcatgcctggcacccagcccactccacagaagtatggaaatgtcagccacatgctgtctttgttgttcttgtaactactactactattataattggtggcagcgtccccctgaaatctccccctcaaggcaggcagcctggggtcttgtagggagctgagcatgaagaggccatgtggtccctggtgactgcagcgtgtcaccttccttctctctggaaagggaggaggaggtcttcggtgctgggcacacgagcttgcc

SEQ ID NO: 63906 - DNA, 798 bp, Homo sapiens
cacctggatgggccctggatctcgagggacaggccgagtggtgtgggtggtggcactggcagggtcttggcaccagtgagccctgggtttcaaagccagctgtgtgacactgagaagtttgtgcgacctctctgagccccgtttacacatctgtgaaatgggacattaatatggccagggctgcacagggtcagcgtgaggcggatatgagaaaaagcatgtcaaatacccggtacacagtaagtgccaaatgctcatcatccctgtgcccacaagggtgttgccttgtggtcctcaggatggcagcatgtggccctcgggtgaggctggtgtccgctgctagctggtgtggggaagaaggtaggtctgatgctcctctgggaaccggcagctctaggaccagcacttgggtccctttgagcgatttgggcctgcggccagcagagggcgcggctgccccagagatggcaggttcaccagcacgtccccaaacctggccactgcttccatttccccaagtccatcccagctcctggggcaggccacagcgctggcccattccctgtggcagattcactccaggcaggtgcttcccgtctgtgatcctactgtgtccctcaaccaccctaggaggtagggactcattgcttccattttacagatgaggaaactgagacccagagaggcccgggaatgggataggaagcaacgtgccagggctggatgacgagtccaccaggccacactgggactcgaggactgtggcccacagaagggtctggcagggctggttcctgg

SEQ ID NO: 63907 - DNA, 2307 bp, Homo sapiens
taaaggcaaatctagaaagacaaagtagatgaaaggttgcctgtggcggggcctggaaatgggcattgactacaactgggcatcagaggtcttggggtaacggaaatgttctaaaagtggatttggtagtggctgtgctgctgtaaatttactaaaaaccactgaatagtacacttaaaacaggtggattttatggtatgtaaattctacttcaatgaagctcttacattaaaaaataagtataaataataaaagcggattctccagattgaaaaaaaaaaaaatgagaggaattacttctcttctgcaagccctccttttcgtagacatacaattggagaccttgacgttaggagggcttacctacacagttcagactaaaggatgagtctccagaattcaacgcaggtcgtattccactccacgtaatttcgaagtgtcaatcagaatctaataacttaatttgtgtagacaaataggccaagattctcaggggctcaacccaatatgaaaggtaaacatcttaataaaaatactgacgatccacaacggtcttaggtagcgcaaccatgccaaggcgaggcaagatttttaagaagctacaggtttaaaaggcaatctggttctgagagttcgccgaacagaatccccgcatttccaaaaaccagcagcgcaatatgcacagaccgagataaggcaaagaatcgacgtcttttaaacctgacgccagcactgccccggaagcgcacctagaattgagtctgtctggaggctccgggccagagcagggcgtattgtttcactcggtgaatgctcatttcacgtaaagaaaaccaggcaacggaacaagctgccggagcgcgcagacccccgcagggccgcggtacaggcacgctgtgtccaaacaagcgccggaggccccgcgcccacctcccccgacccggcccggcccccgcagccctcgcctcggggcctcggacgcaaccggcacacctgagcgagcgggccgccgccgctaggcggagcgggtcggggaggccgcgcgcgggcggctgacgtacctgcgccgccgggagctcagggccggcgggcccgggataacggcgcctccgcggcgaacacgcctgggcactccattcggggctgtttactcccaactctcgcgagactgggcgaccgggccagcgaggcccacagctgggagcctcagctccgccgacccagcgtgccctgtctgtcccgcgctcccggggcttgcgtgcgcgctctggacgccgtgggcagcgggaccacgccgggaggatggacgaaggtctcgcgacatttgcggcggcgggggccggtggcagggtggaagcggaggggcgtggccagcgagctgccaggcggcgagaacgcgctgggggaacccttggtccgctctgcgcgtcgctctaggatccccgaaaaggagcacgggcgcgaaagcggccaggctgggccaggatctagaaagactgcctggcgcaggctccctgcccccgcgggcctgctgtcatggactcgtggagagctcgcttcccgcgcggacccttcctgcaggggtccacgtccaggcaccggcggctcggacaccccacccccggccgggcacctgccctgggtgccccttaacccgggcggtagctcgttaagatggcgaagtgtccggtccggaacacgcgaaaccccaaatcccgcctgcccgacctcctgacccccggccccacgggacgacagactgggcctcccgacgcgcagcgcgctgccgggacaccggtgcgtgcgaaacggaggacctttgtaacgccacgtgtttgctctttttgaaaaaacaagaataaatgtgttaaactgtctgaaaagcttgccgcctaaaagatgtctgggtgacttagatgctaggatcagtttgttttcaatgtaaatggaccagcccggactccgtacggcactagcaggggactgaaagcgtcttcaggtactgctggtgggcggtgatgcgctacaggccgatcagacagttttgtgtcttttggaacttgacactgcaccacggtaatgctgaactgcaccaatattacagatcacagcgcatcatcttccttcaacatgatttaacacagttgacttaatatggtggataaatgtagaatcacaaattaccataccccacctcaggcttctacttcgtaattttgagcaggttgtttaacctctttgtacctcagcttcttcattacaaaaataggggtactagccaggcggggtggctcgcgcctgtaatcc

SEQ ID NO: 63908 - DNA, 1269 bp, Homo sapiens
atggggaaattgagtcttatagatgtaaagtcgcacacccaagaccccacaactcagaaaggggctacctgcaattcagatggaggtatagcaaggcgcagagtcctgtccagggagcccactgtgagaccccccgactgcctcgcagtcacctgtacacatcatgttgggatcgccgaggggcgctgcagcgatccggtttctggggctgcgtctgggtggcacgttcagaacggggacctgcctggttcttcttcccagcccttcccctccagcacccggcaaggcccagtcaacacgagcaaactcggaaatcctggctgaacccacgaccgctgcatatttccattttagaaaaacacggcaacaacaactcaaaccaaatcgttcagaaatgagaataaagaagcaccgacaaaggaggcgattgctggggccgctcgggggaggagccgggtgagaggctgcagggagggcagggcatgcgccggcgacaacggggttcgcggtttggggggcaaggcccgggggaagagagagaacaggggtgcagcgccgcggcggggggcgtgaggatggagccgggggaaggggggctctgagatgtgaaggggcggggctggggctttttggtctgaaggaaggagtctcacgggacggagggacgaagatttcctggggtcaggggcgccaaggggcttcggggccggatgcagcggagggggcccggggcctggggggcgtggtgagagctcagaggggtctcgccaagcagccggctggcgctgaggggaccgaggaggggtctggggcgaaaggaccgcgagagggcgcccagggcgcggggggcgcggtacctgcaggccggcaaagtcttccaaaccggtcccgccagacccgcgcggccgccgcccccgtctcggccgccggagctgctgccgcgccgcgccctcacgtgacccgcgtacgcgccgggggcggagccgtctcagacccgcccccaccccccggcgtccccagcgcgccggtccgtcccgagtgcgcgtgcgcagcggttgcctgggcgaccggggaagcgttgggctgtaaagactagggcgccagcggctggcgaagaaggaaagagggtactctctggctgggctggggccgtagcgacgtccgccgcgaacctgggccccccaaagctgcggggcgttcggtgtcgccgaagtaaacatgcaccctgagccctcggagcctgcgacaggtggtgcagcagagctggat

SEQ ID NO: 63909 - DNA, 4332 bp, Homo sapiens
agcctcccaagtagctgggattacaggcatgagccaccacgcccagctaatttttgtatttttagtagagatggggtttctccatgttggccaggctggtctcgaactcctgacctcaagtgatccacccgcctcagcctcccaaagtgctgggattacaggcgtgagccaccgcacccagcccacatcccccatattttcaccttgctgaaggaaatgccatttgttcttgttcaatttctttaagattttatgatgaaccacttgaaaatctattgctggtttgtaacagctgagtacagtgcatagttagctgaaagtactttctgtcattaagatgtatttctatgtccatcctatgaatgtctgtctgaatataggggaaggaaatgaaaacaggagaggggaaagaaaggggtgagtctgtgaggcacaatggggaattctctcagagtgacgtgaccctactccacccagaggccattactggcattaccaggagcccacacgtgccagacccgtaccctgagggagaaggaggcatcagccatcatctctgagcacgagctcagcagcaaagaaaacagacacagttactgtggggggcctgctgtccaaggagctaagtcccagagagtctgtgaaggaaacggggttcaggggcatgccaagcagagcccagggctcaggggtgcgccctctcaggtaccaggagggtgaggaatagccagtggctgggggagcagagggcagagagaagggcatagacatgagctgtgcccagggagtggccacccccaggcctaactttcagagtcctgtgttcccttgggcctttcttggatgtggcaacagaatactttgtgacattgggtgaaaaagcagaactggcatggtgcattgtagagcgattctgttgtgaaaacagaaactttcagacaccttttcttctgtaaatagaatatgtgctttccgaagattgaggtcatctcgagcttgagtgatgacagtgaccctgaactggactacacgtcactccctgtgctggaaaacctccccacagacactctgtcaaatatatttgcagtctctaaagacacctcaaaggcggctcgggtgcccttcacagacatctttaaaaaagaagctaagagggacttggaaatccgaaaacaagacaccaagtccccaagacccctgatccaggagctcagcgacgaggacccctctggccagctactgatgccccccacctgccaaagagatgctgcaccactcacttccagtggagacagggacagcgacttccttgcagcctcttctccgggtaagagcgtggggccgagagcacagtggagacaatgttggctccccggcctgggatgggtggggcagggcagtcactcagccttaccctgagctttcatgttgctggaggggtcacccaggacagaccacacagatcctctgaaggtcccattcctgagttcacgggtctgaagctgccacttgctggtagccagcctgggccaggaagccaccgagccagcctcctcttgggcagccgagtctgactgtgtgtgggggtcacaatccccctgtggtcatgcagatctcctggggcgggggcctaatgaccgtgcatttccaccccctcctcaccatccctggcctcagcctttctagaccagggcttttggaggggaccaccaacaccactgctggggagtgtggggcaagcgaggtgacagccacacaagggcgtggctgcttcacagtgacccaggcccgggtgaatcacaggccagtcctagtggccttcaaggcagggaaggcaaaggggcaaaggggcaccaggcagggacggcagccagaggcctggctgcagaagacccagaaaaacatgctgaatgtaccggggcctcccctcatactgcaggctggtacatgtgcctggcagatgcggttttggggagcagccggttagtgctgagaacaagcaagctgggactgttttttcattcagcatctgccttcaggtgcactcccaaattgggggctgtgtggagcccagaccgtgctactctcatccagcacgcatcggtggccaggctttttcctgaagacagctgcctggctgactccagacttgcaggcaggaagcagggagtggcctgagtgcatttcccgggaacactgagtggccttctcttccactctaggaaccagcacagaaaagtgcagtctgagctggagcccgtgcagcctcgggcgggggcaggcctggaggacgttgaataatttgtttttgtttgttttgtttgagacagtctcgcactgtggcctaggctggaatgcagtcatgtgatcttggctcactgcaacctctgcctcctaggttcaagcaattctcctgcctccgcctctgaagtagctgggattacaggcacccgtcaagggattttcctgcctcagcctccccagtagctggtattataggggcctgccaccacgcccagctaatctttgtatttttagtagagatggggtttcaccatgttgaccaggctggtctcgaactcctgacctcaggtgatctgtttgcctcggcctcccaaagtgctgggattacaggtatgagccaccacgcccagttgaggacactgaatttggcctggactgaaccccaaggctgcccccctgtccttgcagtcacagtgacagggagaaagcacaggtcacccttccttccacagtgccgactgagagcgccgccacacccccagagacgtgtgtcggagttgcccagcccagccaagctctgcccacgtgggacctcactgcattcccagcaccgaaagcatcatagttttccccagttatatgtagcataaatggtttaatcataaatgtctcccttaggcatgataaacattttaacacccacgcgagtcagtgtatgattgggctagctcctgtttgtgtgagtcacatgcaattcctttcaccagccaacctgaaaaaagacctttctcttactatgtcatcagaaaccagacagacccgggtccctgcaaaatctcaagtgagcattttccccacaggaaaacagaatcttccactgcagctagagaaactccgaggaagagggacttgatgctttagacatcaaaatgagaaggggagggaggaaagaaaggggggagtctgtgaggcacaacagagaattcccccaaactgacatgaccgtgaccctctgctcagagggcactatcgacagcccacaggtgccagacccatgtcccaagggagaaggaacatcagccatcatctctctgcatgagctcagtgtcaggtagtagctgtggcgggacgctgtccagcctaaaaaacgtgaccattccaattcatcttcagctgccaagtgtatttagtccctgaacctggatccaaggcatctccctgtaggaaacatcagaccggggcagagattgacaaagcaacccacaacagcagctgccaacggccgctgtgcccacctcatcagcagctctgcaggggcctcactccaccctcaccaaacacgaggagccagcactcctggcccccattccactggacaggaaggcgtgagaactgagggacctgcctgaggcccccacagctgaggcgcagcggagccctgcctcccagcacagactaaaatcccagcaacacaggcccaccggcacctccagcctgccttgcgggatgatcttcaggcgaatatacaaaatacaaaagaaactactactgtattttgttgccctgtcccttcaacttggctccaaattgcttggctcatcatcacagtggcctccagaaggtggcgagctctgcttctcaagtttcaactgtggaaggcacatctggtcccagaggaaggatgaggggctctctggggcttgagggcagcccaccttgtgtcctcagaagcccattcgaggcttcttccggaggggctgagagctagagaggacgggtgtgtgctgctgggagcgagtggcccggacgctggaggcctgggagtggggaggtgtggtggcacagcctggggtgtccctctggggtggtagcttggccatgtagtcacggagcatctgccgctgctctgatgggacgccctgggcgcatgcatccggagtcaactcctgggagggcggggtcgtggggggcaggggcagagcatcagcaggtggccactcagggctatgaggggagctggtgtcctctgagggatccacatggccactgagcgaaaagctgctggacagctgggtccggcgcttgggc

SEQ ID NO: 63910 - DNA, 1158 bp, Homo sapiens
gcactttgggaggccaaggcgggcggatcacctgaggccagaagtttgagaccagtccggccaatacagtgaaaccctgtcaatactaaaaatacaaaaattagccgggcgtggtggtgtacacctgtaatcgcaactaccgaggaggctgggcacgaaaatcgcttgaatctgggaggcagaggttgcagtgagccaagatcatgccacagcactccagcctgggtgacagagcaaggttctatctcaaaaataaaatagaaacaaaaatattttctcttggaaccgcatagcctgaaacgatcctagacaggcggagggcgctggtggagagcacgaccccacaaaagccctcagacaaggcagcctcgacttccccggccggcttcccgccctcgctgcgggctctccaggaccctttagacctccaaggctacagaactcagtcggatccgcaataacgacaggccggggactgcgaaacgtgagcctgccgcggggactggggattgggggcgtccctcccctcctacatctgcgggtccgctcctcgaacacgcgcagtccgcgcggagggggcgcatgcgtgcacttacgtgaccccggcctcgtcgtggtcgtctggaaaatgggcctcggcgtgatgctcgccggaccctggcaccacgagggaaatctcaagtagaaccccagctttggcactcgggacgggtcagccccgccgcagctacccacggtcttccggtttggaccggaagtgcctcctgcggaggcaggaagtcccgcctcccagccaggcctcttagggtcctggcgcgccccctcccgggaggagagggaacgggcgtgcaggcggcgcgtgggcagcggaaataaagctcccttgagtcccaatagtggaggccgggtggacttaggttcgaatcccacatctacttcaccaatttcctcagagttgtattaaattaatcatttaacgaactcccacagaacacctactataagccagacctgtattggtcagtaggtatcctactgattgtccttaaatcccaagaagcgggctttacaaataagggtacaaatacctactaagagtgaagcttttccaggggtggtcaggcagggagagctttaggcagtggtcttcaaactcta

SEQ ID NO: 63911 - DNA, 2045 bp, Homo sapiens
caatggtcttcaataattaatgtgcttttaataagcatcattaattaatttctttaacataaggttgagaagattaaataaggtaacccagggcatttgatctgcttactggaggtcagagacagaataatgggcccaagacaacagagaatggctccttgggatcttgtcttagaacaagagaaactgccctgcttggaagaaacggaaggttgctctgcctccgtgatggaggggtggacagggaccgattgtctgcaggatggcccccaaggttcccactagtatcctaggaatggcttagtcacctcctgctcagagcttctccaacaggctgttacatggctgcttcccaccctggctgccaagctccaactctctactccaagggccccgcatccctagagccacacaagggtccctccgtacccccacaagctggggagattccaactgcctcatctggacaggcttcgaagtcctgtctgtgtctcagagcccagaggcccttgtgcgaaggggcagcttgagcctgggcaagaagttcctgtgggccagaaggtgacctgtcctgtgctggccacctacatggcctgggaacagttatcagctcactgtcctggaaaagcccagatgggtgtggtcagaatacaagaaggaaaaccccctccacacacacttcagtgtctaccccagactcgcctcctccgtggaggcacccctccctttccgcgtctacacaggctctgaatcccccttcaacacggctggccttggccctgggggaagcacctcgccaccctcttaccttgaccacataaacagcgggaggtgcaggatgattctgatcccccccaggagaccctccctccatcccgccccgctgtccccacccctcacctccccgcagccttcacctctccctcccccgacccgagggcctgaagaggcgtgggaggccagggaggggcagggcccaggcctactctggacccgtctgctccagtcccccgactcagctgggcctgcgcctctgggtcagctcactgcgaacctcagcccaggtacctaccctgccgggcttcctggtgctgtccggtccggtccagcagcccacgggctcctctcgagagccgccccttccctgttgccaggcaacattgctgaggggcagtcatttggtccaatcgtggaagcggaggtgtggggcggaacccaagagaggagtcagccaatggtgacgcgcctcacagggagtgagccgaacccggtgggtgcggctcggggcggggccgcggtctgcgggaggagcggctgcaggcccgggaatccggcccggctgcgtgcgtaccaaggaggcgcctggagagggcggccaatgactcaggccaggccaggccagcagtggtacctggggagaaggggtgtctgggctgggcgctggagcggagtagccagggtgtgggagatcctgggggagaggctgagcttgggggtgaagacacccgggggaggagagtggcccatgtggagcccatgcagaggcctctgcagtgcagcctcctgggccccaggcaactctcccctgactccccggcctgctggtcctggcctagagcctcgggtccgcctcccctcgggcctccctctgccagctgcccctgcctcgctcttccctggcaccaggtccttcccggcagccatcaggcgccagctccacagcctggctaaacagactccctccaccccacgtgcgcctcttcagccggttcccgttcactccaagacgtctgaacctgtcaccccacttcttcagctcgttccttctcaaacccaccgaaacctggtcccgggggcctgctcactacatccgaggtgcgctttgggtcctcgcaggcagcatttggcgcttggtgatcgtgctctcatcagacctctctcttgggcaccccggcgcccattcctggccctggctcgctcgctgtccctggtggtcttccctgggcccttctggcttctgccctggagtttctcgacttctccct

SEQ ID NO: 63912 - DNA, 572 bp, Homo sapiens
gaaactgaggcacaacggagctaagttgctggcccagttcacacagctgggagtagccaggtcaggactccaatccaggcaaagcagagagaaaaatactggtgaggaggagggaggaggaagtgggacgttccagctgaggagaggtcttttttccttaatctgatgttaggggccacccaagcactggggccagacgcccaccatggctctgcgcatttgctggtttggtgatctgaggacatctgttgcttcttgtcctctggtttaacagttacaagtgtacaggagcatgtgggccaagcatcccgcgtgcggacgtgatctggcttggcctgcaggcctgctctttcatgccaggctgcaattttttgagattactcaaccttcggaagggaagctgggccaaggacagacctttggtgagaagcagggggagtttagagaatcagccctcctcctcctcctcctcccagcctcctcccccaggagactcggacttggaaacacccagcagggaaaattgctgcagcagcaggtagcagttattatgggacctggaccgccccttc

SEQ ID NO: 63913 - DNA, 1932 bp, Homo sapiens
tcaggaatagaactaacagtaaaccctgccctggagggcttctggtagggaggagagacaataaaccgaataaactagtacattatttggaatattagacgctgataagagctcaagtgaagcatggggttggaagttgggtgcagagagaggggctgtgacttcgagcagagcggtcagcaaaggcctcgccgcagggtggccgcagggacgctcccgctcagcccggaaggaggcgagaggcgcggtgcccgtcccggcgactctgggccagcaaagagctcccagcgcacgcgtcggtgcctcgaggcccgggaccctgcgtgtctggtccccgccgtggccctgcgtccgtgacggtgggtggcaccagggagcatttcgcgcggcggggctggggcctgcctttgaagggacggagtcgggcgtcgtggtggggtggacaccggggatccccggggcgcggacgaggggggcgtccaccctgcgagctcaccccacggcccccgcgtcccgccctcagccgcaggccccgccccgcgccgcccggccccgcctccccgcggccgccgccattggccgcgcgcgccgcctccgccctcggcctcgcacttcctggcggagccatggctgcgcagcgggctggccgggggtctcctgaacccgggccccgccgccccgaccgcccggccccgccgccggggctgtccccgccgcgtccgtagcgcgtcctgccaggtgggcctccgcgcgcgcccaccctccagcccgggaccgccaggaagccgcgcccggccggggcggggagctggcggagatcgggagggtccccggccaccgcgagccgcgacccccctgcgccccttggtgccggggcgggcgggtgggcgagtgggggcgccgcggccgggggaggggccgccgcccccgcaggtgacacaggtgcggcctgtgcggaccgccccgcgcgtggcaggtgagtggcccccgccccgggccgtcccgactccgcctcctcgccgccggctggagcctgctgggcggccgttgcgctgagttccgcctgggctgcggggtccgagcgaacgacagcggcgtccccggagaccccgccggcgagccggtgtcagcagcgtcgctttctccaacgctgaggtcgggagggagcttggggaggaggcgctctgggaaacccccggccggacggggcctgcggtcccatgtttactggaagaccttttccagtgacctgggattgtcactgtgcttgggggtggccttgacccttcacctgcttccaaaaagcgtcggaggccgctgacgtccaacacgggtggaaatcagaccccacccccacgcacttgcaggagacagcagggagcctccggccccgcgaactctctctaggtatcttggcctagaaaataaagcgttgagcgttagaaggcctggttgattctgggcaggctgcctggggcggtggagagagagggcacctgctgcttgctgttctgtgaccttgggcaaccccccctggggcacccgagcgccaggtctcactgtgggaacgacggtgtcacctctcagcgtgaaggtggaatgaagtcgagtccgcggtgggcaccgcaccaacgctgggtttcttctcttccctctctgggctctccagcatcctaggggagggccggggtgggaacagcttgtcattgtcacaaagtttctagtttgtcgagaggaatccagttgccccttctctccctaggggagttgcacgggacggactgtgcccgaattcattccttccatgggaacactggagtgccctccctgtgtccccagttatctaagaacagtgctgacttcttgtcacattgttctttattagtgaagactatttgttcaataggtaacaaactcttctcatgaactcaa

SEQ ID NO: 63914 - DNA, 2083 bp, Homo sapiens
gtgaggaaaccaaggcttagggaaggaaagtcgcttgtctgaaatcacagctagaaaaggggccaaaacccaagggtggacccactggctggaaaacagtgcagttaggcaggggcccctgtttcttaataatgaatgaaccaacgacccccaaggctggtttgcccgtgcacacgcacgcacgtgtgcaacacgtagcacttgctgagtgtttgctacttgccaggcctcatgtcaagcactttacgcgtgcttttatgccctacgttttgtttttgtctgttttgcttttttcccctaatgcctagccaaaggcgtggcccaggcgcccaggcaggacttggggagtgaatgaagagtgaacaaatgaatgaatgcgcggcaacgggatcttcataaaccagaccctcctcggggatctaatgcgaacactcccgaggcccgggcccaggtacgctgagggcggctcgtgggccccaggccgacctcagcccgcgactcccgggctccgggggcccaggtggcccccagtaggtgaggagccgggcccgccggcgccttggcgttgccacctctacctgcctgccctctccccttccggatccacagccaggcctcggcgggctcctggtgtgcagccgcccggccgcttccgcccgagggtcgcggggctcagagtccggcaggctccaggcggggcaggggatgtccgcggcccggcaggcgcacgcccacctgtcggccgcgcaggcgcagcagcgggccggcctccccgcgccccgcggcgcgcggccagtgcgcaggcgcggcggccgatgcgagtgtgtatgtgcgggcgagaagatggcggcggcgggggaagcagcgtgagcagccggaggatcgcggagtcccaatgaaacgggcagccatggccctccacagcccgcaggtagccgccggtctgcgccttcggccggaaggggcccgagccccgggcgggcggacgccgcggcgggcgggcgtccgcgccctgcccggagcgagcgtgtgggagtgggggagggcgctgggacacgctgcccgggcctaggccggagccacccgccgcctccgcgcccgccgcgccttcgtcccctgagccacccggaccccctagtcccggggaggtcgaagggcgggggctccgggccccgcttggggagggcgtggagggcgccgaaggggttaacctccctggggctggaccgcggggcgagcccggggtgtggagtggggccctccccgccgcgccggccgggggaggcggcccgggggctccgggagtcccctggagcgcaggggccccagagcagctcaggttgctgcctctgcctggagcgagcctcagagatttgggggtgccctgttgcccctttgccccaagagcttcctttctcagcttgattgatgatgcgggggttgccgattttctgttttttagatagaagtagcagagtagcggccttgggctgctgttgcaaagaaaactcgaaataagtcgcaaggaccgtactttcacttgcgtttgagtgacatcccttgcacgaatccatcccagccaggctgacaactaacgcaccctgcctgaacagtagctaaagcttgggggccctttacaataatcccgtggtggaaagaaagagctctttttgggagatgtgcgtgtagagttaagctcttattcccctctcccaccccttctctcacatcttctcccccctccgccattataattattctggacaaaaatcggcatgatgtattatttgtcagccttgctttagactgctaatttgttgacatctggtccctataaattgttgcacacttttaaaccatctcattgtgtatttgtattaaatatggggaaatgaaacaaagtagccattcgggaaactgattgcgagtaaaatcataacccttcatgagcaattgggttttgttgcccttctgcagatgaagtcaatctgactacacctcttttgaaacatgattttcggaactattgtaatgaatgcgtgttgtggaatctaaaatgcgaaaactttttaaaaaattagat

SEQ ID NO: 63915 - DNA, 1319 bp, Homo sapiens
tatctgccatgagcatatggggaatactcattgtatgggagatggaaattctaatcaagttccccgggaggctgagcgccttgcagagatgctcttaaacccttggcactgacttcttagcccgttcctttatttcagttataaaatcgaaaggaccggttttaaatattgctgaagtgtaactgctcacttttaaaagctcatgcatttaaggattaaaatgtgattcacgtgtattttgatggagttgttttttgagctatgtgagccagtgttaaggaaattaagttggagttcaaaacagccgtggctagtgatttgtcaagtgttaaatgatagttcagtgttgcatagctggtaatcagcagttacttatggtgtatttttttgcgtgacatgttttcatcaagtcctaagctgttgtcaatgagctcttgaaactaacatgcttatgaaattatgtctgtgcaaaatgggtgtatttgaagagttgtaaggtgatttctgttgtgtttactttttatgattaatgttttgaataaagtatgtagtcccctcccaagaaaaccctccaaaaaacgtgctaggaaatcccctccactcctgtctgcgtccactcagcgtccactcagtgctactgtcccaaaggtgaagggccacattttttcttgttgatctttccagtgtctctttatgcagacacaaatatctatattattaacaaacacaaatatgttattatatagcaacacagatactctattttcctaccttttttacaccgagagtgctttcttcttttaatagtattttgaagatctctcgctgtctgtacctaaagttcttcctcattttcccctagttaattctgtaatttgattgaaggtacatatctgtggagaaattattgacatgaagttataataaaaacacgcttaaaatctataacattttctcagatactttaaaaataattaagtaaaactaataaatttgaaaataataggagaaaaaaaactcagtgaaccgtttctgagcgttccagctcatgacttgagggtgtttgccgctgactcatgctgaagccacttggtgtctgcgtttgaaacaggaagtgtgtgttagtggcttggaatcttgttttctcctcctctcctcctctgctgccaagatttttatcaaatcatttggatttgtagtgttcttactggattgaccagctctaaaaactttaggctgtatatgaactgaaataagaaagtgtgcttagaagtatgatttaaataaacatttttattttccattgtctaggaagaaaa

SEQ ID NO: 63916 - DNA, 2573 bp, Homo sapiens
tcctaaactttcttacacccaatgtgtccattggaagcatttccaactcttaaataaatgttatggaatagctaggaagaagaaaaatttaagttatttttgagataacctttcagctttttacaaagaagtcagacagttcccattctgctttctgtctgccaaacaaggaatgtgacttctagctgttaatgtagttaattaaggcactgtgttaaaaagggagctgcagtcaccaggctttttgtttatagtgcgctttcctctgctctccgaccatggacctggtcccagcctctactggctgtgttgcaatgtagtgatcgtgaataagaggtgcagtcaggaagagtcatcttcgctagtgcacaaacaaaagtgtctgtggtctggatggtcagtcactgacatcctgtggaaagaaggatgtatcataagcatttcattgtagctgatttacatgtccattggagttcatttttattccttttggcttcattttcggatctgtttaatagtgataaatatttgaaagcatttctattgtgtttttttcgttaaatgaagatgatttagattgcactgactcttcatgtatgttattctgctagaagtaacggcatgcaaagttgtatggattaagagttttaatgaattgttgccttaattaaatggtaagcgttggttttaacattttgttgaattaaaatttgttttctgattccttgtgcagcttcctccatacagtggaacagttctgtgtggcacacaggctgtggataaactacctgatggtaagctagttctctccttatttccctgaagggaatttggccatacgtgctgggtgggcaggctacctgtaaacattgtttcccatttgaataaacatttctttgtagcttgaagtttttgctgtaaactgtaatgtatttaattgctgaatcactttgactagtgaattggttttaaagcgtatcctgtgcttcggagtgccagccatgtaagatttagtttaggaaatggttgttgagttctttttttcctaacagttctgagtgcaacaggtatgttactcttcatcagcacatgctggagttgaagcgaactttgggtcttgttgctaagcagcctgctggctccagcgccagctagcttctgagcctgtgttctttgtaaactaaggggcagctggcatctgttgttcttgcagttcacattcatgtcctggtctgtcgctgactcttgggaactcaggtcaactcttcacctcctggtctgttacttttttgggtctccatcacaggcactaagctgattgccagagatggtgcttatggagatgcaatgattttgtattgcttaagtacccagcgttggaataccaacaaggttgtttaattattgattgcaggctgcccttgcacaattcaaacttgtcgagatcatttttcaatctgaatcactttaaaggcccttactggcctccaggaaactgatgccaaactttttctttgagagttagaggtttggattccctgttcagttagcatggtcagacttatgaaaggggttttaattacaatttaggcttcaatagaagccttgaaaagactaaccaaacgttttatctccagtaacatcagggagtgattatatctaaaattttagatttataagaaatgtgggagaccataagggaaagagcagatctaacaatagcttaggacaagtaataaaatgaatgaagcttgagggaccgggaagccgggctgctcagcctcctgagccaccttttaattggctgatgtcaacctctcagacatctgagtcagtgggacttcctctgtcactgtgtgctttgcacgtggtgagcatgctgctcatgttgaaccagtgcttacaaatgccccatgatgttcccatgcacatcacttctttgagttcaccctcctccctgtgcagtgggcaccaccagctcccccagcctctggagttctgcttccccctccctccttccagcctgcctgcccttttcagtgactgcttcttggccctttttctccattctttactctgttccctctaagtcctgccttttttctgccaaaaacacgactggaatcttgccaccagtttgcacagttagtgacaggcctgcttttctctgcagcctttctgggtatcttgtgtttccatgacattagtttctcttccagtgcctgttcgactgtacagagcctgtgggcactgtcatggacctgcctctctttccagcctgctcagctgctgatggcaggatccatttctctgtgtctgtcactgcgcctgtagtatctggaatgttgtaagccctcagtacatttgttggatgaatggtttaggatgctttattctgctccctcccactacctccagctgcagcaagccctttgcagaggcacctcatcgtggcttcccttttagatctcggccttttctatttttgtgttttttaatttttttatattttaatttttgtaggtacataataggtgtatatatgtatggggtacatgagatattttcataca

SEQ ID NO: 63917 - DNA, 1165 bp, Homo sapiens
cccgacagcccatgctgcagtcagtaaagaagcagcccaaatcagacgtagtccttatatggcttttctgatctagctgggagcaggagggggccacagagtcatcccgtaaatatttatcaaacactgacttagacatcgacgcttcggcggtgaacgagacccgcaggtctgcggtgtgattacactggaggtttctaggaagccgtgctcctcgggctgagtcttagcaatgagcaggaattcatctccctggcctgggccagtgaagcggggcatgtcggggtcatgggatgagctgtgggaacagcatgtgcaaaagcagggagcttggcacaggctgggagctgacggctgacaggctaagtcccgagattcatctttctggcagattctcctaaacacaaggcacttgcagcccaggccaatgacgcaatgagcttcagcccagctccttctccctcactcacttctgagtgttgagtacgatggcgcccaagagataaccatcagggagacccctcgctaaacttggacacatggtttggtgatcccctaaatgtccacaaagcctcggccagggtagaggggtgcggttggagagctcatagtgcaaacaagctgtgttgaaagtcctccaaacttttggcaagtttgagttcaagtcttggtttcactttaaactagccacacagtctcctaaatgccagtctcctggactcagttgcactttctgtaaaatggggctgaaaacagctgcctccctgctagagtccaaatgcatctcaaagctctgggcagcgcgggagaagtgtggctcccgtcgctttgattcgccagctgtgggtctcaccattgaccctgggacctgaaagctctgtccgttcccctcccagcctctgctgtgtgctgaaatctggtgtgttttcatgaggtctcggagccgttatcttacttgtggtcttatgggctcagttttgcaactctggcaaaagagaacaaaatcttctagagagcatttctgctgtgttgtcccgcggtccctagtgatatttcattatcaatgagtggctgagtggacaggatgcaggggcatctctctaggagtggcgcatgcacccggccctgcctgggagcatcaggggtagaagagcagagttagagt

SEQ ID NO: 63918 - DNA, 2403 bp, Homo sapiens
ggccaaatgatatcacccttttgtgccttatccctcgagctgtgacacacaaatgtcatcttttcagatagtttgggccaccaccaacaagatcggttgtgctgtgaacacctgccggaagatgactgtctggggagaagtttgggagaacgcggtctactttgtctgcaattattctccaaagtaagacaagttgatgccgttgtatggggtgggggttgggatgtgtttgcttgccagggagcacccagtgaaaactggcttgagcagcgaagtctttaatatctcacataacaaagaatctagagtttagtgcatctgggttagcgtaatagctaagcagtgtcaacaaggactcgggttctttccgtcttcctgccgtaccattctctcctcatggtcccaagatggctgcacagcaccaacatcacatctccccaagcacaaggaaggatggtcaaagggctctctccttaggtcttttgcacactggcatactttctccttatgttctttgccagaattagaccaatcatagatgagggggaaaaagattgccccaactggctttgcaagacgtcctctgggaccaactgaacaaagtcagaagtgggaatagctgctggctgggcaaccagcatggtctgccctggcagtatgattatttttctctgaaaacatgcagtagacagcaccctagaaaacacatgttcacacaaagcctagcttctctgtttccctccaaagagggtccacatgcggcctcctgatcatggtgcctcctccgcctatagcatgctcagctcatcagtgtggtgtccagcccttgactcatttgctcatgggacaaatatgtgctgattcttggagagtcactcccccagttcatggcctgaggtttgcatgctggccgctggccaccgccgttcttgccccgtgccctgtgtagagtgggccccggggcatgtttgctcagtgactgaatgaaatgggaatgacctcatttatttgttttgggtcaggagtagttatgaaaaggtgggatgaagggggaatcgctgaggttgggaggaaaaatagaagccctctcaaaaccatctggtgtgcctgcggtggcgtggcgcggctcagcagcccacatggatgagcgcagcgggtgtgtcattgcctgggagggacgcaggcaccatgcaagagcagcagactggtccaaggtggtggaattcctggcccagtggcaggtggtgaatgaggaatcatttgacttgactctataaaaaatagacactagaaggtcctatcagaaatgaaattatttccttctgtagctgccccctgcttccttaaaagaaggaataacctccatatggtaaaatatactcatctgaagtatacagtgcgacacagtctcacatgcattagtctgttggggctgcaacaacagaggccacagcctgggcagcttacacatcagacttttatgtctcaccattctggaggctagaagtcccctggaccaaggggtggcagatcaaggtgtggcagatcaaggggtggcagcatcgggctccagtgggagctctcttcctggctcaccaacggccactatcttacatggtggtgagagatgaggacatcaatcctattgggtcaggacttcacctgttgacgtcgtttaaccttaattagtttcatcaaggccctgtctccaagtacagtcacattgtgggtgagggtttcaacactgggatttggggagacacataatgaaagtccacggcaatagccctctacccgtgtaactaccatccagatggagatggacagtgtctcccatgccccagaggctctctcgtgccctacaaagtgcccaccattctagcatctttcccatcggtctgtggtgtctggtgtgggacctcatatgaagggggccacacagcacactccctgtacccccaaatggtgttttgctcaacatcacattggtgaggtctccccgtggtgttgcgtgatcaccggttctttccttttgtctgctgcatattactgcgtgctgtccatggcctctgtcttagagagagggcttgagcccctgggctatgcaggacactgtcccaggcaccagggtgaggagggtggctgggagggtgagtttgggtgtggggggggtcagatcccttgagggggattcccaacccgacaaggggtggggtgggtgtgtacacagagggccttgtgtgtgagggaaggtacttcacggtgctattcaaaaattaaggagactggccagtgcggtggctcatgcctgtaatcccagcctcctttggccgaggcaggagaatcgcttgagtccaggagttcaagaccagccttggcaactggcaaaaccccatctccacg

SEQ ID NO: 63919 - DNA, 1101 bp, Homo sapiens
tgggatttgccatctagtgagaggacacagtgcagaaatgacaatgccagcagcagggcccagggggtcactgttgtggagggacagttcagggaggcatcaagagggctagtcttactgtccagaggggactccttggggacatggctcccaagagaaccctgcagagacacctgggtgtggccatgccctgtcctttccttatttaggtgggatctcagccaccatctctgcacaaagcagaggctgggaaatttcccaggagcttattcccaataggggctgtggaaacccagcctggagtcagagggtggctctgtccctgacggctggtaagcccttggcgagggggcggtcacaggcagtcccaagggagacgtagatgttgtatatactgtgaccagttcacagcaaactgtactttaaatgtagggaatccttcaatcacacaaaccaccaaaacccccaaacaggattctcagcacacggggccgaaggtcagttctgcttcacagtggttttggtttagcaatgatcctcctctagaagaggacttcctggacgttttgaaaggcagccatgcagaaatgaggcaacataagagactagcacctgctctctcacccctgcccacctgggtatcaaaggaaagaaaagacatcaggaagagctttcaatactgggacgaaggtgtctgaatattcttggggaaatgccggacatctgggtgaatgtcagttcagaatttttcttagaccagaaccattttttaacacagattttgcaagagattgggaaatatataaacaatgacagtgagcattcttggccacttgattttttaaaatgtcacctttatacaaaggtatatatgggtgcacagccatctgaatcgcaaattcattcacctaacactcatgggcagcccctgcgctagggactggggacactgccgggaacagaagagagaaaaatccctgtcctcataggggtgtggtctgctgtggcaagtgcagcagagatatgatgtgagcacacatgggattctaaagtttctagaagccaaaggaagaagtaatggaagggaaattttaggatgca

SEQ ID NO: 63920 - DNA, 886 bp, Homo sapiens
gattttcaccatatcggttaggctggtcttgaactcccgacctcaggtgattggcccacctcagcctcctaaagtgctgggattacaagcgtgagccactggccccagcctatctttgccttttatgatgttgacttttttagttaaagatagctggccaatatttcgaagaatgtccctgaacctgagtttgtctggtgttgcttcaccatgaggctcagggtatacacttttggcagataccgcaggggagacactgtgtccttctccgtggctcgtatcagaagccgcatctgtttgtcctgttcctgcagctgctgactctgatggcttggctgaggcatctggcagatctgtccactgcgaagttcctatttatttagagacagggtctggctctgttgcctgggctggagtgctgtgacatgaacatggctcaatgcagcctcctcctcccctggctcaggtgatcctgccacctcagcctcctaagtagctgggaccacaggtgtgtgccgtcatgcccgggtaattttttgtatttttggtagagacagggttttgccatgttgtccagtctggtcttaaactcctggactcaagcattccacctgcctcagcctcccagagtgctgggattacagacgtgggccactgtgcctggcctctgtttttttttaaactaagtaattatcttctggagagatatattgagactatgtaaatagcctattccccataaaaacttcacccagtagtttttgcctctattgatgattctttcttgagacaagtattttatgatggttgccaaaggtgaactttctaactccactgtgctttccgcatttattagttggcgttgtactgtaaggaagagatttcc

SEQ ID NO: 63921 - DNA, 1685 bp, Homo sapiens
ggggcggattgctttgagctcaggagtttgagaccagcctgaccaacatggtgaaatgctgtctctacagaaaatacaaaaattagctaggtgtcggtggctcgcacctgtagtcccaactacttgggaggctgagactggagaattgcttgagcccaggaagcagagattgcggtgagctgagatcgcaccactgcactccagcctgggtgacagagtgagaccccatctcaaaaaaaaaagaaagaatgggtgtagaaacaccagctccctgccccatacgtggatgactctgaggcacgttctagtcacccctggagcccccagcaggcaccccactctttattgccttccccaccctgccttacttccccattccctcacctgtgctccctgggagcacctccctctccttaaactattcgtactcaattccttgcttcaggctctgcttctgggggacccaatctcaaacacaaggaagaagggctcatgactatttggagggtctaggccaccgctttgagctgcccctgacttgtcaggaaggttcttgaaattttgggctgtccttgtcatgagggccctctagccctgtgcaaagtcctggccttgaatcagagcacgtcacagctgagaagcaggaatacggtgcatgccaagcactgaggtcacccccgagtgctctgccacggccacctcgccctccgaccccttccgcagcccgtcctcagcgggaggtggccagatcacagctgtggggagctgtctgtgtcctcaggcgcactgctgggaacccctgggctagggggtggctcctgcccgctgccaggctatccgccgcccagccggtatcccagtgctgactctggcctgcctgcctggcgtggcttccggcctgtcgtcagctgcttggtctggagcctaggggctgaccttggcctgtcagcctggcctgcacttgttctgtttcctttgcccggctctgccgatgctgagctcaacttgctttcttggccttcagcccctggcctccctctctccattgccagggggaggccagatgagatgatgaacttagcagggcagcctgcggccctcttctgtgctgtgacctggcaggggctttggtccagccagtcacacatgggcgagggtggccttccccagccagccaggtggcccctgctgttctgtgccaagcctggggggtgccgtgtgatcacaacccccagaaacagtggacactggagcacaactccccacacaccaagcagacgggtcctcgaggtgtctgtgagtcacgactcacagctgcagctacctccccgcattcacggcaaaactcaagcctccctccagccagcccagaccctggtccttgctgctgggagctgcaggaaaacctgtcctcgttcagttccaactctaacgagcgttccagaagccctttcccaccacctgaatttcatcctgcaccaatgccagctcaccgaaagttctttttttctccagctaacttcactgaattggctaaataacaattttgtttttttgatcacggccataaaagaatgacttgactggagatttgaaaatcacttttccttctctttcctttttttttttttgagatggtctcgctcagtcacccaggctggagtacagtggcgccatctcggctc

SEQ ID NO: 63922 - DNA, 2211 bp, Homo sapiens
ttttaattaaaaaaacttttaaaaataatcatttgagtgaaatagaaaaaactaaagatcaaaagaatttggacagaccccttagccaaccattccttcagcattttctgaacctacatcttctgcatctgtctgctcaacatcccctgcaaacacctttgcagcaccattgcctctacataaacctcattcaccctgcagggcctaacttttctctcttctaggcaagccaacctgaaaagggagttctcttcttctgaggagcactttgcgaagaggtctctagacatcagatgtgactatccggagataaaggctgaaactgcttctgcctgcactactagtaaagcctgactgtcagggggctgagaaagtacctggaagtttctctgcctccgctgaagccctgggcacgctcaccagctctccctcccaggtacttaccacttgctacctgagagctcttgcaggtccgacctcccggcctgatgtcagcccctccaggggggtctgggtctcctcctgccctgtccccctcatgccttgcatgctgtctggcgcacagcaagggcatgtttgctaaaaggcagatgcaacaaaaagcaagcagtccctctctcagattccaatcacctcctgctgatttccatctaagtttcttggtgaatcgttatctgtgggcccaggtacatcaaggccgtaagctgaaaaattcctctgagcagaaccattttgctttatggtgacttctctaataggacacgttccatgagaaaaggaagggtgctttccaggcagtaaaacaagctatacttttgtcagagcacaatgtttgggcagtctgagctctctccagaaagcagggcctcttgaaagtcttctaaaggcacacatgtgacacctgagccagctcagctccgccttcctggttcaggtcctggtaagacctccacggagtgcaggatgctgctgtggctccatgcctgacctgggggtgcggatggcaggcacagctgtgtaaggagagcgcccacagacaccaaacactggccatggcaggacgttcctataagcacatattagggtgacatatcatacttgagggctttagtgccatatctgtaagatccattagaagtcaacaggaaaataacatgaaatccaaaaactgctttattttcaacaaagcaacaaacgaatatagcaaagttaggctggacaaatacagctctcagtaacacagtgcactcactcgtgtctctgagtcactgtatttacacttgagtaatgcaacaggaagggaggggaagaaatgaagaaaccattcctttacatggaagctaatctaaaagcaaacagcacagccatttgagatgcggtattaaaatgtacacattccttaggagcaagggcacagccttattctgcactgaattccaaaaccaccgttgacttcatactcaagacagtttctgagggaaccgtgaaacactgggcactctcacacagatgccccagcatcactcttctaccctaatggccgatttaatgggattttctcaacactcccgaacctaagctctttctcggcatgttaaataaagccctgtttcccagaacaccaaaagcaacactacaaatctccatatttaaagggacaaccacacaagcaaaaactttccgtttcaggccgggcacagtggctcacgcctgtaatcccagcactttgggaggccaaggcgagtggatcacttgtggtcaggagttcaagaccagcctggccaacatggtgaaaccccgtctctaccaaaaatataaaaattagccgggcatgatggcgggtgcctgtaatcccagctactagggaggctgaggcagaagaatcacttgaacctgggagacagaggtcgcagagagccaagatcacgccattgcactctagcctaggcaacagactgagactccatctcaaaaaaaacagacaaaaaaaaccaaaccactttccatttcaggtggaaagcggggtattcccctcatcttgtgatactggccaagaactcatcaattcaattcatggagtcccctccacagatacaccctccttttaggaccggaaggcagcgggtgaaaaggaaggcgtgcctgtcagcttggcaccacgcctctgctttgccacatgcacaggttacctttttagtaatatacaagcta

SEQ ID NO: 63923 - DNA, 3461 bp, Homo sapiens
ttagccgggcgtggtggcgggcgcctgcagtcccagctactcgggaggctgagacaggagaacggcgcgaacccgggaggcggagtttgcagtgagccgagatcgcaccactgcactccagcctgggtgacagagcgagactgtctcaaaaaaaaaaaaaaaaattagaagatcgggtcaggaggtccaccttccaaacaacagaggttgagcacaggggtccctgggagaaaagggcgcaagcagatctccttgtggtaggtttcggctctggcttcggcgccggctgcctggctcctccactccatctgtagctgagatgcttccacgacagtgctttttctgcctgagtcaacccccagctactgtctgttgtctgaaaccaagagccctgactagtttctgaaaacatattctggggtgcctcccgataacccgagatggctcgctgtctcccgccctagtgtgccaagcctccacctgggcccgctctgtggaggtccctgtgcccatcacaccgactgcaagatccctcaggggtcgcttttccctcaagcttctgcccaggccctagacaaacactgacacagcactggttccccaacagagctccagctctcaatcccttctgaaccttttttttttttttttttttttgagatggagtctcactcctttgcccaggctggagtgcagtggcgcgatctcggctcaccgcaacttccgcctctggggttcaagcaattctcttgcctcagcctcccgagtagctgggattacaggtgcacgccaccactcccagctaattttttgtatttttagtagaaacagggtttcaccatgttagccaggctggtctcgaactcctgacctcaggtgatccgcccgcctcagcctcccaaagtgctgggattagaggcgtgagccaccgtgcccagcctaaatgcagcatttatatatagtaactttattcaaacatctatgcaccagccagaaacttgaaatgcttagtaatattttgaactgttttccaatgagcttatcttagcaatgtcttaaaatcggaaactggtttgcaaaattcaggactgtgaatcgcaagcatcaggtctacaccagattttctacaatgagatcaaatctccaattaattttataaattttaaaaagtaaccactttggaaagcagtctggcactttctcaaagttaaacaaatacctaccctgtgactcagagattccacttccaggtatttacccaagaaaaataaatataaatatgaacacaaaaacttgtccgatactgttcacagcagctttgttcataatacccccaaactgaaaacaacccaaacccgtcaacaggaaatagataacaaacattggtgtattcatataatggcatacttctgagcaaaaaagcaggaaaatattactgatacaagcaacatggctaaatctcaaaaatattatgctaagtgaaagaagccagacacggaagaatatatagtgtgattctatgtgtatgatattctaaatgaggcaaactcgtttatttagaaagaaatcagaataaggatttgagcacaagtagaagtgactgtggagagggccaaggtaacattgtaagttgacagacatgcctgtatcttgagagggaagtgggtgacacaggcatatgcgtttgtcaaaacaaaatacaattcgctgtttaaaaaaagcccaatagactatacactttaaattgtggggccgggcacagtggctcatacctgtaatcccagtgctttgggagtccaaggcaggatcacttaagcccaagagttcaagactaatctgggcaacatggcaagaccctgtctctacaaaaaaaattttttaaaaattggctgggcagggcctgtactcccagctgctcaggaggctgaggcaggaggatcgcttgagtctcggaggtcgaggctgcagtgagctgtgtttgtgccactgcactccagcctgggcaacaagcaagaccctgtctctaaaataaaataaaataaaattgtgcatttcactgtacattaatcatgcctcaattaaaaacatgagcaggagaaaaaatacccagcacaggtatgtacggccggtgtgatagtgcaagggtgcggcacaaggcaagtcccagcgagcagtggagtcacttttcttcctggataacccgcgttcctgagtccagaccctgtcttggatttacttgtatctgtaacttcaagcaagtgtcttaagctcttcgcctttacttttttccttggctataaacagaaaatgtatttctcaggaacacactgaaaacaagtaaacaaaagataccagtattctctggtgatcagtgactacagaaaagaaccaagacataattatttttaccactgcactgctaagaatgtccaccctagagtctggtatccatgtttatattaaaatactatttaaacttgtcgttgctttactgttcatacacccacttcagccccataaaaaacggaattaagcaaacctgttttaggacagaaggttacaaaacaaactcaacccctgccatgaacagtccactcaattcaaacatcaggctggggagttggggggtgagcatccaagcacgtactctgtgcaaggcctcaaggatgtgcagccaaagacagcctgagccacaggagcagagcgcacacagcagcgaggtgaggatccaatgtgcaaagtgctttccccaagttagcagcaaagtgtgatcagggagagaaatgaaaacagctacttctggaagaaccagagaaagtgtcaataaagacaacagacagcatgggtgggccccagcagaccagaaagacatggacaagagaggacaatcatgtgacacagcacagaagggaattcagcattccagaggggaatgtgaccagaaggacaagcctgaggtccaatggaaccacagcctgaatgccacgctaagaaacctggaactctagacttcactctgctggaatgggaggcaccagaccttaggtaaaccagatggtttaaaagataactggggccgggcgcggtgcctcatgcccgtaatcccagcactttgggaggccaaggtgggtggatcacttgaggtcaggagttcaagaccagcctagccaacacggcgaaaccccgtctctactaaaaatacaaaaattagccaggcatggtggccagtacctgtaatcctagctacttgggcagctgaggcaggaaaatcacttgaaccctggaggctgaggttgcagtgggccaagatcgcaccactgcactccagcctgggcaagagagcaagaccctgtctcaaaaaaaaaaaaaattaagtaaatggatggcaagagccaggcttctcactgttggggtggaagtttccaggtaagcaagaggaggaagctagaatgacctaagtt

SEQ ID NO: 63924 - DNA, 729 bp, Homo sapiens
ctttcccatctcaatcaacggcacaccacacccaaaaaaaaaggccccgcccttcatgtatctcattccccacctctccacatctagctgatcagcaagtcctatggggtgcacctctaaacctaccccaaatccgaccacttctcccacctcctcacccgcccagaccaaggtcccatgagctctcacctggggagtgcttagatcacctgctgaccagtcctctctctactctcatgcctctgctcacccaacagtccagtcccccatgcagcacccagagtggtcttccacagacgtaaatcagatcatgtcactcccctccctaagctcatgcaatcactgccttttcagtgcgaataaaatcccaccccaccccccactccaccccaccaccatggcctagaaagccccactccatctggagcctgctggcctcccttcctagcagcctctccctggctgcttgttctgccatcacctcaatggaatgttactcatagtatccccagcactcccgggttcaccacgcactccacaaacatttcttgagtgaataagtaagggaaggagggtgcttgagggagacaagaaaaagtagaaaggaagtccacaggcaaacgacaggggcgtgtgataagatctgccaggggagtgggccagaggcccaaaggagcctggcagaaaaggagtagaagagaaatgcacaagggttatagagaaagaggg

SEQ ID NO: 63925 - DNA, 2137 bp, Homo sapiens
agagttcagaaagaaatattaatacacattgacctaaatctctaaaccccttgggatagtaacagtaaaatagataaatacgtgcgcttaagtgcatacactaagcagactgaaaatgcaacactgtagcagcgatttgcccagcactgtatacagcccagacagtaaaagaagctacaaggcaggtagccgcatcaacactgtctcttacactccaatttaacggccacaataaactggttcttcataagctaataaagtgtgtctatctaactgagtgtgacaaagttgtagaaggaaccacaccaggagaggtgagccttactgccctgaaagctttactgtcccagatgccctttcaggcaactaacacccaaagatgactgacgtggagcaggagggaagataactaggaagatgggcagagaataaaagagaaaagtttacagcttaagaggaagagaagccacaacgcgaagtgcgagactgctcattgtaatacctgcctattaaaaaactctttacagcttacacagggtttatagctgctctgtaaccaccaccccgtcattagccacacagaaaaccagggctcggagagctgagtgtcacgcccaaggtcaggcaaaaagctggggctgcaatccgggccctatcccgagagagcaactaaggaatgacaagggggcacctggaagggaagtcaggtgcgggcacggaggtgcccctaggaactccagaaggtcgcaggtgtgcggcggggtggagacagagcggcggaaccgacggaaggacagggcacgccgggggccagaagtggccgggagacccgggagtgagcagcccgcccggcccagcccgccgcactcacccgaggcccgggcggggtcgcccggcgctgcggctcctcccggcctgcggcggcggcggcggcgactgcagcggccgaggcagggacgcatcatgcggccgcgctcatggccgggctggagcgggccccgcggctcggctcggcttggtcccctgggtcccgccgggcaggtcggaaggaggctgcagccaagcaaatgcctcagcccggagccttggctggagagcggggcggtgcgagcgccggaagtgaacccgacgaggtcagtgacgtcacgccggcgcagttccggccgcgcagctctcgcggagaggggcgctcgaggcggtttgaggggacccggaggctcttacaaactggcagttcattgagaaaaggcagcttttagtcacagcccctctcgctaagacagagatgccgccaaactgaagtccggaggagaaaggataggggctacgggctgcagcagggtccaagccacgccgttaggctgcggaaccgggttgggaatgcccttagcggagtgtgtacccgcgcccgcggcggtgtctcagaggcagctccagtggcctgtactatatgcggggatgtgaccgaaggaaatgggaaagtaagggagcgggagtggaaatggctgagccagaaagcacttgggaaaagaggaaagcgccctgaactggggattggaggcctgactcctgaggtccgcggagcccccggcctcctccttgagggacttggacactagagcaccgccactgtcccttccatataggaagccctaagtgtttgaaagtaggaacatgtattttaaggccgggcgcggtggctcacgcctgtaactccagcactttgggaagccaaggcaggctgatcacttgaggtcaggagttcgagaccagcctgaacaacaatggtgaaattccgtttctattaaaaacacataaattagccggatgtagtggtgcacgcctgtaatcccagcagctactcgagaggctgaggcaggagaatcatgaacccaggaggcgaaggttgcagtgagctgagatcaagccactgcactccagcctgggcgacagagtgaacagtctcaaaaaaaaaaaaaaagcatatcttttttttaaaataaaattatgactctcacacaaatataaaatgaacatatgtcaaagataccatttaactcattaatgatggtatatatacaatgctccactagagctctagatagcttaaagacaaaagtaagaccccataagacga

SEQ ID NO: 63926 - DNA, 2188 bp, Homo sapiens
gatatcactgcatttctttagagacagagcttgatcatttaaggagctaccagaaggagcattatagcactggaatgtagttgtacaaatatcttcagaaaatttgaggtgtcagtcaatactccagaaccagattctccactttgctaggtgctggagtcgagtttgacataacccccacattactagggaggggctgtcagtttatgtttctatacttcctctacaactaaaaaggcgtccaaaggcagcacttctattttaaaaactttttttcttttaattgaggagacacagaagaaactgaatggcctgaacgttgtgtttactgtatttgctgaaaagatgccgactggcctagaatttatggagcagctgagatggaatctaccagtctcaaagatgccccgttttaaaaagtaaattggcctctgattgctcttccataccaagtatccaagccggacatttttcttttttaaatctcttttgaaaaatttttataccatttatttattattattttttttagctcctgctcaaagcctcgctggactaattttaatggtatgttggttaataacatgccttcgccgtaactaggggatagggagggtaactgacacggctgttttaaaggtagggaaaccgagggccaggaaacaactagaatccgacggtatttcctagctccctgatggcgcttcccatgcccccaactaaatcatgaaataacccactcacctgtttgcaccgggcctgccccacccactcctcccagagtccgagaacacccagcctctaagcagagccagcaagggggcgccgggcgtacccgagagcgctcccaccgagcgtgggcaggcctcgggcccctcaggctccgccctgtcacgtgacaccaagcgctggccgcctcccgccccccgcgaggggagggccgtctcgcgcctgcgcagaaggggctggaggcgggcgcgtccggttgactgacagctcgcgccgcggcgccgggaaaggacccggctgctcgcgggcggcgcagtcgccgcagcagccgagtctgacggcgccggttcgctgcccggtccgcccgcggtgagaggtgcggtggggtggcctcaggccggcctgacaggctcatgaggggaaggatgacccgggagggacggcggggacccgggatgggggtctgcgaggggtgacagctgggagcgccgtggggcgaggggcgcggggagggaggaggggtccgcggggcgagcgggggcggggcctcgcgggccgagggctcaggccggggttctccgcgggctcctcgcctgctgggaggcaaagggaataggggaaggtcgccgggagcccacgggcggaggggcagtgcggacgcccgtgaatgagtgcaacccgggccgctgcctggaggaggcgcccccaaccccggggcagatggtggcagcaggtggctttgggatggagctggtgtcccagtcttgggggaagaagaaaccccggactcctgcaagggcattctggggagagggtgcaaggaccccgggggaaagacattggcgagtcatgcgtgtgtgcggggtgtgaagttgctgcctcaccgctcccggggcttagcagggtgggggtgagagaaaggggcttcctggcctgggtggccacccctgtccattctgcgtcttccctctgctcttgatgggccagtgagcaaaggggaggattgcagggaggatagcaatggaaatgcggttttagcagctcagtttaggaccgctggatcagatagaattgaacccgtttagaggatcttgcaaaggacagaattgagtgttctggagctgggtgcgtgccccccacccccgcccttgtcctgggtttgtgctttcctgggttgcaggttgattagacttgggaagatgaaaaggggaagaggaaaaaaagactttacaggggcactagccaggtcctattcctctctaggtaggggccaggcatgagtcccagcctccagattgagcaggaacagcctctgagctggcacaggtgaggcgcccctgacgtggaagtagtggctgtggtgagtcagtgttagaggcaggctgacagctgtcaggaccgaggctgctttagccagcctgcgactcgatgttgatgtttcggattcatttccttagag

SEQ ID NO: 63927 - DNA, 835 bp, Homo sapiens
ctttgagggttgtgttttaactttccagctgaacagccaggtcctggagagagttttggattatccccttggtgaattaattccttcatgcgccagcctcccggagggtcttctgtgtgtcatgtgagccaatcccttaagtaaatcgctgtccgattggttctgtgtctttgcggacccagctctactaggacaggagagaccatttcaaaacccgtgtcaggtgtctgcccaccagttggcctggtccgcgctactgccgatggccacgggagggcagcagagacccatctggtggaaaacgctttgctgcagaggtcaagtgggctgggcggtccccggggaaaccagagaagcagctcgtttcagaaaaggccaccttaacacagggtgggagagaggagggtcagagaggaagggcaaagtttaattcaccatcctagaaactttaagcattttttaaaaatgaaggctgggtacggtgactcacacctgtaattctagcactttgggaggccggggtgggtggatcacttgaggtcaggagtttgagaccagcctgggcaacacagtgagatccccgtctctattaaaaaaaagaagaaaaagaaaaccacttcctggttggacaacacagagacatctagcggccagagaaagaaaagttgagaaatgggggctggggcgaagttgggggatgcatgaagccctgtgtgccccggttcagatgtcatgggcctcctcccaccccctctcctgtgtgcccccgttcagatccatgggcctcctcccaccccctctctcctataaatgtttttgtatttatttttgtttt

SEQ ID NO: 63928 - DNA, 1420 bp, Homo sapiens
acaaacaaataaataaatgtaaactgaggctaaaccgctccactcagggtcaacacctgccctgtgacccagcagttccacttttcggtatttatctaggagaaatgagaacacatgtccacacaaagacctgtgcacaaatgttcacagcatctttctctgtaataacttcgagctggcaacgatccaaatatccatccacaggagctgggtaaacaaaccgtggtgtcatcctggagtgggacgctcctcatcaggaaagaggaaagaatgacccatgcacgcagcagcttggaagagtctcaaaaacaagatgccaatgaaggaagccaggcacgggactgcaactgtaagctgtgactctgtgtgactccagcggtacgaacttccaggaaaagcaaaaatatgggacagagtatccacaagtggcattcagggactggagtgggaactggcagggaaaggggaaatgtattgattatttcgattgcagtggtggggaggagggtggacacctgtgccaaactcacttaaaacggatgtattttattgtataaattatgcctcaatgaaatccattcataaaaagaagctgagcctgggcacggtggcgcatagctgtaattccagcactttgggaggccgaggcgggccaatcacgaggtcaggagttcgagaccagcctggccaacatggcgaaactccgtctcttctaaaaatacaaaaattagctgggtgcagtggcaggtgcctgtaatcccagctactccagaaggctgagacagaagaatcgcttgaaccagggagatgcagattgcaatgagccgagccgagatggcaccattgcactccagcctggtgacagagcaagaatctgtctcaaaaaaaaaaaaaacccaggaagctgagtttcccagccctccatgcctgctgttctccgtgctccccatgctcagccccagctctctgggccatgtagcctgggattccctttatttcgcttggtgcctgagtgcagcacttggagtcccgccagtgctgggcacgaagtaagttcaccgggaaacctggcggctgctgaccgagctctgttgtctccctggacgggggcagagctgtgtctgggaggagttctgttcagaacccaagccacagcccacatggctgggactagaagccaggtccccactggacctgcatctgatctggccctgactcttcagaccggcagtgtaaacgcctccactcctggagtccacaccgctgggccgaggcagcctggcagcccctccgaggccaagcaggggccacgtcctggttatcaaccttcctcccacagcctgcagctaccccaagcccccaggttggccaccaactctatctacctcacagatgagggaaactgaggctcagagaggtg

SEQ ID NO: 63929 - DNA, 513 bp, Homo sapiens
tcaggatgaattccctcctcctgggagaggcccctgtttcctatccctgaggagcgctgccagctctgcatgccctcgggttctgcaggagtccaggcaacctctggctgggaagaggcctgggccccacctccctcagtggcctgccaggccccaccctcccagcctccctcagcaatcgcccccgccctcctctccccggctggtctgtgtttcttggccccagttgagatgagtcactggggagcccctgacagctctgagggtggcagccccccgcaggacccaggaagtcagagtccccagggcagccaggcctgagctggcctcgaagccaccagcccactcagaacaaccgtctgtagggctcatcagaaacacaaacagcccagcgggacaaacacgcttggagttggccaccctggggccacagcccagctgcccctgtcagtgacaggatgtctccaagttcaaggccatcatctccaggtggaggtaagagccccagcccac

SEQ ID NO: 63930 - DNA, 1860 bp, Homo sapiens
gttttctcttaatgccagagctcaacttcccttgagtgaaacctcgggcttccaaggaagaaatggagtcaggaagaagttcttgaatgactgactgagggccccttggcctcataaccacaaatcacccttttccaaaggggtagaaggagctttaggctgggagtcaggaatgccgagttctagctggactttgtgtgaccttggtcaagtcagggctgtcctgggccttggactctcaaattcagggggtgggctggagcacatccaatgcctcaactctctctaaaaattcaggctttggaaggcaggcacttctggaaggtgggagccatttcagggagccaggtggggggtgctggtggtggggagatgaacctttgagcagcgtttactgtgttcgaggccctttggcatttgatctcttgacaagggggtgtcacgggcatggttgttgcgacacacccacgtggagtaaggaaatgtggctcgcaagttcagccacttagcaggggccacactgataataaatggcagggttgaatttccatctagattttgaaatctagagcaaagtagtacagtactcagtgtggtctctggagccagacagcccggggttgaaatcccagctctgtctgttagaagctatgtgatcctggccaaatagcttagcctctctgtgcttctgtttcctcatctgtgaagtgcaaataatacttgtgcacccacctcatcgggcactgaaaggctgaaatgggatgacgtgtgcagatttagctcagctagctaagggctcgggattgctgtattgattaagtctcactcgaagacacatgtgcttgccactgtgtcggcctgctgcttgtttgcttggactctgtgcggtgtgtatatacatatatatatatatatatattttttttttttttttttttttttttttttgagacagtttcggtctctcgcccaggctggagcgcagtggcacaatctccgctcactgcaagctccgcctcctgggttcacaccattctcttgcgtcagcctcccgagtagctgggactacaggcgcctgccaccaggcctggctaattttttgtatttttagtagagacggggtttcaccgtgttagccaggatagtctcaatctcctgacctcgtgatctgcccacctcggcctcccaaagtgctgggattacaggcatgagccacagcgcacggccggactctgcacagtatttgaacccagaagtcccccggaagaaatgcacattgaacccaggcccggtggagtcaggacccaaaatcacaggcgattgatctcggggactgtaagccactgttcctggtgagcactgtccttcagacagctggaatgttctaaatcattctaagacccaggcagattggaatttaaaaatgtatttccccttttagagtgagccatgcctaagtatttctggcctgtgaaaggaacacagtttcagagccagggcagaaaaaccatgtgtgctcacaaaacccaacccaaatcttggccatgaagaccgtttcctctgtagcttgtacggacttcattgcagctgctctggaaggcagggggtgccctgtaagaagccgcccagggggttgggctggtgggtgagcagctgaggggaggagtcaggaagggcggagtctgggaaccagggagccttgggaattccataggcctatgaatgtgatttaaaacatctcagtatgcattaaagtcaaatatacactgaccccatggttagcagttcgactcctaggtatttactcaacagaaatgcattacgtatttttgcttttagaggtttctttgcaggcagctt

SEQ ID NO: 63931 - DNA, 1930 bp, Homo sapiens
gaactcatacacacatgctcacacacagggtgcacatacaaactatgcacatgtacacacacacatataatctaacaaatgcagaatcatgcacattcagatacgcgcacactcacacctgcatatgtatggtgcaatacctcctggaggattccggctcagccaagaaaaccctagctctctcttttggtctggttggccccgtgatccttctccctcagactctgtgtgaactcagcacagtggccctccctgccgccctgcagtgtgccctgcagtgcggacaggcggcaggagaacctcttcatccactggaaagaggaagaggcaacacacgtacacggtcacctatagcatgccagagcccatgcctgtgcccaaatccctatttatttaacaacccccattgtacggagcagaaaaccgaggggtggtgtgccaggaagtccacccaaggctcacacagctggcaagggacagaacaggatggagacccaggtgtgtgggaccaaggcactgagccaggccccagatctccagtgagcaagacagacctagctcctgcccttgagagggagcacccaggattccggggcggggcagacaggagcaggggacggaaaaatcaataaaatcaatggcaaactcctgcgctggggagctgggatgagaagcgcggaacagcacctgctctagagaggaaagggaggcctctgaggatgatgctgtgaccatggccatacagatgagcccaaaatgcatttgaagcagaagggacagcacgtgccgagccctaaggaacccatgtttaactcacccgctgacctgcatgtccccagccgggcagtgtcttactagcaacctctcggtctgtgtgggacctaatagtccctctttaactgtgcaaggatgcaattcaacagacattgtcctttaaacttttcctaatcagccctcctcctctctccaggtattaaaaatgccaggagccgagaagccccctgccccgctcccaacattccttcaggacagttttgctgacacagcattcctctgggccagggtgaaggcccaaagtcccaaccaatgatgatttcctgttaacccttggactaagggttgagccctggaatatcccccagggattccggaggccttcttcttgcgtttgtttacaatgcatggccctcttccttgccaagaggaagcccagttttatttacatttcagtgtcccagagggtggaggggaccaccgggcacctttgtccccaggctgattctgggctgctgcttgcaaatgaggaagctctaaactgcccagaagtcagacactagtagaattttgaagctggaaggggtgccatttcacagatggggaatgagaggtctggagatgcctagattggaccagggcctgagccagatcatccgggaggatccagggatcctggccttgtcctgccatggacggtcccgtccccatcagcagactggcgacgtggaccagacgtttgcctcgcacggctactcgccctggtggtcaagagtagggcctggagcccgacgtcctgggtctgaattctgcttagcccctttggacgaaaacttaacactcaatgccacttctttcctgtatgtgaaatggggctgatcaccacagttaaccctaagcgcctcgcaccgcaagtccctctgcttgttaaataaatacaatggatctctacacatgcacaataaagacacggaaacagttaatcccctgctgcagctcctgttgaagggaataaaatcaggacccagagaggttgattcactgaccttgggacacacaggaccctttctacctctgctggtgacccagtgacccctgtcgatggtgggaaggggcagagcaggcctcagactgtccgcaggatgatgcattcact

SEQ ID NO: 63932 - DNA, 3075 bp, Homo sapiens
ggggcatgtctgtcatccgcctgataacattggtaattagtccagccgtgcgggtcacagagaggtctccgtgctcacccggtttgaaacacatcagaggtggaagttcctctccgttctagctcccgtgtggcttggcttttccagagttttccacctaagttcacactgttcttttgagaccgtgcttgctttacggcggagggaaatagggttccagacatgggggtgtggaatttgagggacagtggcctaaacagacttttcccccagcgggaagagagtctttcctctctgcaagtcagctgtgcaggaggcagacgggaggcctggcactctccctgtttataaggcgcctgccttcctgctgcccgcccgcgaggagccagacggggctcagttaatttgggatccggctttgcaagggaccaagcaggaactgcccccggtgggtctggggaggtagatgtaggcgtctgtgagtggcagtcaccaacccggccaccggggcatggatgctcatttctgccaaagacagtcagtgcgacttgttttaatcaaacgcctgtagtggcagctgctggccatgtgtgggcagagggacgtgtggatgggaaaggtggcgctgtcgtgttcagaaagggtcattccaccctttgaaagcttcctgatcctgcctcccacctgcacgtgtggggcacggaggtggactatctgggggacatgttcacttacagtggctgcacccgggaagtgcgctctgccatgatttgcccacctctcccccgatacgcggcccctgtcttcatgctctactcagatttccttttctactgatgacagctttggactttcaagctgtctttgtggctttggtgggatggtctctcgttttaattggatgagcacgtcgtctcccgtcacagatgctgaagctctcctcttcggcatatagcagtgcagcccctgggagtcagaagagctgcagttcccaaaagggctgaaactgggagaagagaacaagttttggagcaagactgaccccagttcatttgttccttaccatggcgctgcgaggccttctcatctcattttatagatgagtcaaccaagactcagataagtcagacaacactcagtcagtaggtatctgaggcagatttcgaaattctgccctttctcttgctaagtacctgtgagttagtttcttatcctggtggaatgtcagtttccttggttgagaagtggaaacataccacttgctttgtagggacatggtgagagttcaatggattgggggaaatgtaagttcccccagagggtcagatgcttgacatatagtgggaccctcgtgtcctccaccctggtgcataggagcaaattcttcttggatgtgggttggttctgtgtgcgaggtgctggcttgcaggctgggtgccagttttatacctggcagtggtgtttcaaggggcagtcagaactctctgcaaatcctcaaacacagggttttgtgcaaagtatccaaattctggtgtattttctcatgtggatttgctcacgtgtcaggagttgatgggatgctgcccgtcggccttgactgataagaacgccaggaaacaagaagccgccgtttcccaggcagctgggaagggggagtggacagtagtctggtgtggacgggaacgcaggctggtgtctgcccagaaggggtcagcatgggtttggtgaggtttcatgtggtatggatgtgtgctctgttccctagaacaagttagtgcattcactccttatcatggctcttgaggccttcttatatcattttatagacgagtcaaccaagactcagagaagtcagacgacacaaagccagtgggtatctgaggtgggttttgaacctgcttctgctccctacgccctcttccaccagctgcctggaggaggtggagcttgagtcaagcctcagaaaagaggtagaatttgttggaatgaggcaggcaaacaggcccagaagcaggggtgacctgttcagcctccgtgggcgggaggtgcctgttggggatgagaggaaataaggttggagtgaactccaggccttgaaatcaggaataggaggttggatttgaagttgaaggctcaggggagcaataacaatttcttgaaagaaagtggaacggactgagaagagatctgctcagggcccagaggtggcagcaatccaggtgggtggtgaggccgctggggcaggtctgcctacagagaggacagctctgatgggtctcaggctcccctggacgggagggaaaggagaagcctcagctctcagctcccagggaagcacgattgacagccgggagaatgccggaaatgcagccttctggtcttccgtcctccctccccctccttcccattcattcaacaaatatttatggagcgccagctctgagccaggcgcggttccagatgctggggatctggtggcaagcacagagcctccagtgtcatgggggagggggacacacatgaggagtggagggaaggagccacttccagcagagcaaagtgccgagaagtagccgagcagattaaacttaggacccagtgccagggtgggcatgggcagcgaaggtgacacttgcaggagctgggaatgagagctggggctccgggcaggggagaagcctgtgagccccctggggagggagagagggtggaggggctgtccccaagcccatttcctcatgccagcccccaagatcttgatcctcacgtgcatcttcccatctgtcttttggggggtggtttgagaatttaggtgggatgaggagggcagtggaagttagctgcggggaagccactcagctggggacgtggcatgtcccagaaccatgatctctgctgcttcctgtgactcctcagttgttccctattgttccctatgatgtgttcatgcgttagcgaatcagctttaaaacacaagaggaaacatgagaaaaataaagagaagaaagaaagaagaggaggagggtgtcccctgcaccttctgctttggataggatttgcacttttccctccagc

SEQ ID NO: 63933 - DNA, 573 bp, Homo sapiens
ataagggcggcagctgaaaagtggcgtggggcctccacacttccagacacgacaggactggccatggggctgggacgggtcctggggtccagacccagcagcaaagggaggccaggaggcacctggatggcagctgagggtaggttgaggcctggatgtcccgagagcatggcggggccttgccacagctgcagcgccagctctgtgaatctgcagtccctttgagctggcgcgtcctccaggcgtgcccttgccctttgagacggaccgtctcacggctgtacactgttctttctcttgtgcaattgtacccaggagcctctggacaagggagccccggaacgtccagaatgtggcttcgtgctctgcttccaggctgcgcggcatccccagcaaggctgttcacaccaagcatgggggacgcacggtggacagcgagggctcctgggaagccctcccccaccctccccgccccccgctgccaggagtccgggtagtctgggctcctgtggggggaggaggtgccatcgtgggaacaatacccaccatcagcctcgtacagaaggccagaat

SEQ ID NO: 63934 - DNA, 2117 bp, Homo sapiens
ttctgaccaaaagacttgaaggagggcgatgtgtttattttaaaatgtaaacaccctctccaagaatacaaaccagagtgtccagctgcgtttaatttatcagaggcgcatcggcttagctgcgaaaagagacacgtttcttctccaggaggcccctccgctgatttctgggtaatgcgtagttttttctcctgtgaaaagtgctgcgggccggaacaccgagtttgcagctcttccctttttttttctctctgaagtctaagtttgggagctcaggatccaaaaaggatgacattgggacattctattcagaaggtatgctttgcccactcagccacacagcagggaacggttttgagcaggggtgtgatgtggctggcagacccccgtgtggagaccaaggtggcttccagaggctggtggctgggagagcagggagggggctactgcagtggtccgagcaccagtgatgggacagcgtggatggccactgtgggatgtggaggacgagggggacacatgaaactcctaggccagaagacgcagccaccagcccctgcctgactttgccctcttctctttttgccataaataaaaatagctgtgggctgtcaccctgccttctgccttcgtctcctctgttatcccaccctctgcgggctgaagataattctgccttttccttcacccgcttgctgacaccttgtcactctttcctcccaccttcaaatatgctcggatcccatttttatcacataatacacaggtttgtccttggggcccagttttatatctttctaccaggggtcttgagtttcctcgggacagggacctcatagaacccttggatgtttttcctatctcccacggcaggtgggctcgccaacctcacctttatctagtaatcacagggagaataatgaatgtttatggagcattttcctgggggcttgggtctcggtggctgcaagtatcctccatctccttgaagaaagaaggaagctttgcttagagaggtcatgtggtttcccccacgtcacacagctcttatgcagtggaggcagagcctgaacccagggccctgttctctaaatcctgacctgtcagctctgggcaggtgtttccaggtgtgggctgaactcttaacaccggatgacgtgtttcaaggggccctgctgacgcagcattcactgacaatgaatcaccccaagaggacattgccctctttcgccccacatttaatcttactgcaaggggacagttcaagggctagtaggtcacacaaacctcaacaatttttgtcgtgctaagatgacgggaaatggactatttcagctatttttacgtgtacagttcggtggcattaaatgcgttcacagtgctgtgcagccaccaccaccgtccgtcaccagaactttgtcttctcacactgaactgtccccggtaaacatgaactccacttcctgcagccctggctgctctctactttcttctccgtgagtctgaacaggccagagacgaactgaccctggtggcaggctccaagcctggagcagggcagtgtctagaacagaacgaagcagtattggttttgttttcgttgtgtggatctgtaaccccttatctgaaaacccttgggactagaggtgtttctttttctggagacagggtcttgctctgttgcccaggctggagtgcagtggtgcaatcatagctcactgcagcctcaacctccccggtttaagtgatcctcccaccttagcctcctgagtagctgaggccacaggcaggtgccaccacacccagctattttgtttttgttttagagacagggcctccctgtgttgctcaggctgagtttgaactcctaggctcgagtgatccttgcaactcatgtttccctttggtgttttttttttttttttgacttcagaaagtgaacgtgaagccgggcacgatggctcactcctgtaatcccagcactttgggacgccgagggcggtggattgcttgaggtcaggagtttgagaccagcctgaccaacgtggtgaaacgccatctgtaccacaaaaattagttgggcatggtggtaggtgcctgtagtcccagctactcgg

SEQ ID NO: 63935 - DNA, 624 bp, Homo sapiens
agttagccaggcatgttggcatgcgtctgcattcccagctacttgggaggctgaggtggaggtgagggggatcgcttgagctcgggaggtggagactgtagtgagctatcatcgtgccactgcactccagcttgggcgacaaagtgaaacgctgtctctaaaaattaaagaacagcccctcaccccctactattataataacagtgcaaaggacctccctgtgtactttgtcattgccatgcttgcagggcacaattccaacagtggcatttccgagccgaagtgtcacgtgtccgggctatggctcctgcacggattgcaacagccagcccgtgtgtgatagtcagcaaggcaggctctgctgtgtgaggaagacacccccagcccagagtctagagcctggactcacacgcatcaggggtgcccttgcagggaccacatgaccttgaactgagctcaggctctgagccgattctcaaagagtgaagaacattgaaggcccccgctgcccagcctgtgggagtggggagcagagtccataggcagctcagactcacaggccctgaggacagagggccccaggctgttggcagctgtgccaggtcagtcacgtgggaacagagg

SEQ ID NO: 63936 - DNA, 1040 bp, Homo sapiens
gccgacgtctctttgtttctggcctgggccagggaaggcaggctctcctggtctcctggccctgcaggtgacaggacttcctttggaacaggtgggcagcatttcccagggtgaccccagcctggaggatgggaatccctgctgctattttcagctgcttcaggtgggcgctcccttctcccatgagccacagctgcccagacttggtggcctgtgtgttcttacatgatgtcagagcatccttctggctggggggccagcaccccaccctcggcccctcaccctttctcaaggagcacggggaaatcccaaaacattttcccctctgggccagaagcagctcggcgttaccccgcacctgggatttcaagagctcttcctggtccgctttccagtgggtggctgtgaaaatggcacttggtttcagttaggagctgggggcaggcgggggtctggtttccctgctcctggaggaattaccggaccacatgttgccaggagccttggctgggagaggcaagcgaggctccaagccggcgagcgggcggcggcgcagatggaaactcgatcacccccggctcagcagactgtttgatttattttaaaatcaagcagatggctgcaacaggggtttgtttaagttcagctcagagccgggcccgcggccaggagcctggggcagctgtgccaaaaatttttcaatgactttggtcgtcaaaccacctcttcccctcccttttgaacttcagcctccccacacaggcgggcttctcgggcctgcccgctgctgcccgctgctgcccgcttgccctggcccgtctcgctttgtctctgtcttgctgcctggagtccctggctttgccactctcgtgctctctcgcgctctctgcacctctggtgtctgcctctatccctttctctctccttgcttcggtttctctttttttgtctctccatctctctcagtatgtgtctctgtctctgattcactctctcccaccacttcctccccatcccttttccgttgcaggaaaccttcc

SEQ ID NO: 63937 - DNA, 2610 bp, Homo sapiens
ttctactaaaaatacaaaaattagccaggcgtggtgatgggtgcctgtaatcccagctacgtgggaggctgaggcaggagaatcacttgaacccagaaggtgcaggttgcagtgagctgagatcgtgccactgcactccagcctgggcgacaagagcgaaactctgtctcaaaaaaaaaaaaaaaaaagaaagaaagaaagaaagaaattaagagtctcgggccctgccccagacctagaatcaggacctgcatgttaacaaaccccacatctgtgatccctgtccacagtaaaggctgagaatgcttaatccaaaacaccttccgcctcccagagcttgtggctttgatgccatttgtctgaacatcacaaggaaccacgtgggaaaacaggacttcgtggcgtgccctggcagacaagccaaagcaactgtgggcatcaggctgtgggggtgagtgaggcccactatcttgggcactgggcggtcccccagaaaagatggaggggctggtgtctgggcctggcacagggcgggatgtcccctcatctggcctgcagcccctccccggtcccgagctgctgagtttacagcccagggcgcatgtgtgcctcttgcccagccaggaggtcagcagactgggcggtgatgaacaagtgccagcaaagggccccgtgctccgagcatgttagcgggaggaggacacagtggccacttgatattttccaatacggggttcaggcgggtcggcccacgggctggcagaggctctccgtgtccttgccaagtgactcattccagatgggaacatttattcgagggaatgtatgacaactcagctgtgacaaataaaaagggggtgtctgtgtctttgtgcccggctggtgcctcatctcccctcaaattgctgccgcagtccgtgttactgaatcaaggacttggtgagcctggtgtccgttcaaaggatggtcttccaaatgtccgttcccacatggggagacttccatgttaacaataggttattgtagtgcggctggcccggaggactggggactgtgaaaataaattaagagtgggccggtcggagctgcaacagtcatcgtgggcagctcttgggcttgccagaaattatttggcgctgcggtttacgcatctattagtccaattgcccaacagcttcagactgggttgggattttttttttttttttgaaagatgaaagatttgggggctgtttgaacatctgctctggtatcacttgggaagtttaaagtcagacgagttcgtatgatcagcgagtgggatgttttcttccctgtgtagggattaaaaacaaaatagtgagaaaacgcagtttttttcgttgtcccatagtatgggctccgtgggctagggccgggtcggaagcagctctggtggaagagaagcctttgcaaaatgtgcttccaccctggaaagcgtcgggggccgcgggctccagcgggtcactctgcccgccccgggtgccgcccgccacagctggactcttgtttctccagcgcctctggcctccctgcctgtctccggggacggggactgagctggcggcggcagatgagtgttctgcggtgtcactgagaactctggctcatgcacgaggccagctggaggcgagtgccggggtctgtttgagacagatggctctgtcagatctggctcctggaaactgtgcaagacgtgcaccacttggtggggcttggaggcctgagctcccagggtggcctttcgggctgacgcatggggccggagcaagctggggagtgggggacttgctgcctgcccatccccctgcaccagccaccccagggttttgtgggacctcatgggagacctcaaagtgaaacagccgtgcatgtccctacggtgactgacaaggcagtaatgatccacccacacccccgcctctggcttcatctcctccacgcacccgctctgttctgcccctgctggccttcttgctgttccttgattgcaccagccacgccgctgcctcagggcctttgtacccgctgccccctctgcctggaatgctttcctcctgatttccacacggctcctccctcgcttccttcggcctttccatattggtcactttctctgtggggtctttcctgaccaccctttctaaaactccagccccagacttgacagtcctgaccacaccccccgatgccattttcctccttggcatgtgttaccagcactggctggtgagttacttactgaccttgtacctcttgtctcctgccctcacccctgctgaagcctaaaggagccgcaggagctccatggctggtctgttttgttcacagcggcatccctaggactcagaataatgcctgcgcacagtaggcacggaagtatttgtggaaggaagaaatggagatcatcatgaaataagcgctattggccgggcacggtggctcacgcctgtaatcccagcacttcgggaggccgaggtaggcggatcacctgaggttaggagttcgagaccagcctggccaacatgatgaaaccttatctctactaaaaatataaaaattagcttgatgtggtggcgtgcacctgtaatc

SEQ ID NO: 63938 - DNA, 757 bp, Homo sapiens
agcatctgcaggaggcacccaccctgagagagagggagtgggggtaaaattcagtcccctctttgccaactgagacaggaggcccagcctgggctctatgggcctgagaaatggtgtgcctagcactaggacactgcagggaggggaggtcagcgagaaaacaatggtgtcaggctctcctgagcctcggccaccttcctcacctccacctgccaggtctgtggggcagcagctctcaccacctacctctgaatgatcagatcctgggctcaaggttcattttatcttcaaataatctttggcacagccctgagtttccggcagggtgtcaccttgaccccttctgcttgcaaagctcatatacaaacaggcatgacctgctacatgggagggtccctggagtcctccctgcagtcccagaggctcttgtgagttcatcctcccgccattggcctcccctccaatgctggggttttttcccaggcccgagaggctggctttgtcagtgaaagaagcagctgccccacaaggactcacctgtactgtggccacccgtgtccagctcagctcccctgcccctgacacactcgtgtccaggccttgcttcgtgtcccctaagtgacacatatgtggtgccaggcctctcaaaccaatgtgtgtgaaccctctgggagccttgtggaaatgccgtttcccattctgcaggtctgggatgaggcctaggactctgcattctcactggctcccagggaaggcc

SEQ ID NO: 63939 - DNA, 468 bp, Homo sapiens
gagaccctgtctgaaaaaatagaaaaataaatgaataaaggtcccctggtgatttggttgcagccagggttaggaactcctgctctagaaagagagaaccttcctccaagaatgtattggtctccagtttccctaaagaacagtccagccctggctgtgctcctagccagcctcatttcctaatcctcctagctcaggaaggaggctggctgggtcacgttgacactctggcatgtggacctggcgggtcaggtctgcgtgagtgcaggaggccacggtgcctgagcggcagttgagggaagtggggctgcgtcatcacaggggcgtggtcacatggtcgttgcttctgttgtgagttgtgctgagagtaagtagagtttttccggtcagagccaagggctcccctcagactgtgggtaggagttgcaggagaaaggctttgagtcagtaggggaaataactttctag

SEQ ID NO: 63940 - DNA, 634 bp, Homo sapiens
gagggacccatggggtgagcccaggagggttcccagcacagagcttcgagctgtccctctccgtggagtcctggacagtgttaactcctcatgacaacagcgtgtgatggcacacagcattgccaaccagggacgctccgccagcctcggtgtccagagtctttgctgggccttggtcacgtgggcacggctgacaccatgtgactgaccttaacctccagcacctccgcacgtcaagctgatgccctgtggttcaaggccccaccatgaatcttatcattagcataggctgttcagggtggctaagccctcaggtaaacaaagacactctcatcaggcgggactcttcaagggcctagaggtgaccgccccaggagccgggggaaaggtcagactttctgtgagttcagttaatccttcactgtacaccagtacttgggagtttgggaatttggattcagctgtgaagctgatagcaggttctagatcctcaggggcgggcttggttatttccctccgggggctgtgccggcagcgtggacagcttccaccaggcaggagggaggtcaggtgcggttctgtgggcaaaggagggacttggtcatggacttcagaagactccgagtaagtgtct

SEQ ID NO: 63941 - DNA, 1308 bp, Homo sapiens
taaaaaattaggccaggcatggtgactcacaactgtaaccccaacacttggggagactgaggcaggaggatcatttgagcccgggggagtttgaagtggcagtgagccacgatcatgctgctacactccagcctgggtgacagagcaagagccagctcttaaaaaaattttgttaatataaataataatgtaactgggtgtggtggtgtgctcctgtagtccagctacttgggtggctgaggcagggggatcgcttgagcccaggacttttgtgccactgccctccagcctgggtgacagagtgagagcctgtcttaaaaaaaaaaaaaaagaaaaaaaagttctgcctgtaactgacggaagaatctagaggctgattggaacatctagagtaacagcctcggacactgaggctcctagaaggacctaagcagatgcagcctaaggtcctgagccagctggggtagagccagaccccaagtccagcttcctgaccgccagggccgtgtccacccactgagcctggccgcggctcctccctgcctgggcagtgaccattgctaggggctggcgtggagcctgcgtgggaaggtgcctgaggctctgcacccagcaacttgcaggtcagaagagctgggactgggtggaccttccaaggcgctcagagcagtgttgtttccaagttcaacattctgccttgccagcggctagctcagtgtcacatggcacacgttccaggaaacagagcggcctctgccatccctggaggccagtctgggtctgatagtaccgggtgggtcagcaccctgaaagccccgggcgggcgggggggaaggtggcagtgggggaaggggagcagcccacccagagttgctgagaactcccggaggcttctggaaatattgtaactggccacactgtttgcactttcaaaccttgttgcaaagaaaaataaatacataaacctaatcagaggaggtttgcaagcagtgaccaagggactgtttgtactgcagtgagccaacagtggatacttgcaggggtctgctgggttcaggacctctctgccgtgctctagggatgttgttcccagccctcttgggtgactttgagcaaagggctgttatctccattttgctttttttttttttttttttaagacagagtattgctctgtcgcccagtctccagtgcaatggcgtgatcttggctcactgccacctctacctcccgagttcaagcgattctcctgcgtcagcctcctgagtagctgggactacagacgtccaccaccatgcctggctaatt

SEQ ID NO: 63942 - DNA, 1409 bp, Homo sapiens
tcctctctcctgtctgtccccaggttctgctcatccttgaaggacctggtgtcccgaccagagggtggactctgaggtgcaggggcagtgcattgacttttggggacgcttggcgtggggtgggccacttgtgaggagccccttattggggctatgtgtgacccatggagggaagccatttttcttccccctaaatgtgggggctcaagacccaccaccccaaaatatggctgtaggagaccagaatgtgccaccccaaaatatacttcatcagcgtattcactgccggttattctgagaaactgcggagccaggagtcgctctgaaaagctgtccttttgtaaaagcaatttgcatctgtaaaggagagccgctttagtgaggtgtctgcacccggaagagagctgctccaacaacttttatcaccagggagactttatctgcacagcaagacaagcttgattcaccaggcacttcctccctcacctcccgccacccctggaagccccagacccctgctccttccttcagctcggatgctatctgtacaagcgacagtcacctgacccttgtttgagtttcccgtgcggtgggactcccgtgcctgcgcatgtaattaaacatggtttttctcctgttaatcgctcatgttgatttattcacagcccagccagggaacctcggagggtggaggggaatcattttctctccctacacccatcccgggaggccccagctctgagcccgggggtgagcggccctgagtagttttcgctgacacagccctttgccccatggtggcactgctgaggccgggagcagccccgggcccgggtggagggccgtactgtcttggcattctttcctcggcaagcgagtgagttcagtcggctttttaatcagcaagacctttgatccagcaggaatgagtaattagcgcggagccgggagtgggcagttgcaggaggcggaggccgtgctgtgcgggctggcaggaggcggaggccgtgctgggtgggctgggctccctgcaggtgctggggcgtgggtttgtggggtgagggagtacatggcccagaataggaggaggtacatggggtgaggccgtgcaccgcaaaaggtgcccggctcctcccacagccactgctgcagggtggcagtctcatgcccggcaccaccaacagtgacagcagcaataacactgttggctgccgggagaaagagaaggaaaagaggaagggaagaggtagaagggagggagccatgtccatttcggagttgggaaccctgatgcccaaataagccagtgccttgtctgaggcctccaagcagccgggcgcgctgggagcagggcgggacacccttcagacctgacgtccagtgtggagtttccctgccaccccagatgt

SEQ ID NO: 63943 - DNA, 982 bp, Homo sapiens
agtaggtactgtcattgtgaccattttacagatgaggaagctggggcccagagaggtttaatcacttccccgtggccacacagcccgcagtaaccgagtcagtgcgtgaagcagggcaagctgtgatggacaggtgctgctgccggtggcgttactctcgtgatactgctgaggatggaatgagcgcgtgtctgcagagcttggcctggcccgcagcaggcagaagcatggggcatctcatcctgtgagcgtcgtcggtttcggtgttggggcgggtgtttgggtggactcgcagctgggcatgttaccaccccccaccgctgtgactgtcatgggcaggtggatgcccccaaccctgctctcttcccctgaacctttgctgtcacctggaagggagggaggtcactgggtctggtgtcatttccctccccaccagccaggccagtagccaggcccgtagtagttctcatggctattttacgtgattgcaaattgattttcccagtgatctgttctagagtccacctgggcgtggatgccaagctggctgacccgggatttccagccggcgacatccttttcctcctgtggaaggggcacatttgtctttgcctggacccagggctgtgctcgctccagccgtgatttctccggacaaatggccgcggtgctgacgaggccctggcacgactctgcctgcttgctgcgccctttctagaagcttctgccttttatttcctatgtttccttttcccctttccaccccaactgggactcacttcagtcaattattcccttcagatcttttcagggaaggcggcagtgaaaaggcactaaaattgctgtcttctcaatgttctcccattattagatttctttccgtggatgtgcggagggggaggggggcagagagaggcggcgggcgcagggtgggggtgggggcggttctttttaatctttccatttttcttctctttaaaaa

SEQ ID NO: 63944 - DNA, 360 bp, Homo sapiens
cttaagtgatctgcctgcctcggcctcccaaggtgccactctcattgtactcaaaaggaaaccaaggcctggaggggtgaatcactctgctaagatctcccagctgggagagtagccaagacctggggcaccagctgtgccctgctacagaggaggccgggagatggaatctggctggatgcccaggagggagagggaactggctgcatgaacagccaaccagttcctgccgaagaggctcctggagaagggaattctctgtccagcagcccctgggctgctgtgggtcctcaaactggaatgtcctttattgttcaaaatactgggtttacacactacaacatgacaaacctgaaaaca

SEQ ID NO: 63945 - DNA, 4170 bp, Homo sapiens
cagagggctgtggtcaaggctctgtcctgcccccatcgctgcccccacagcacgggagacttgagacccccagcccagcccgcccctggtgccaaccacagtgagggcagtgggtccaaagcaccccatgttattgggctgagccggggaggagatggacagacaggggactgctgggggcctggggacagctggcccatcccccaagccctggactttgatctgggacctccatctgcagggcaaccccaataccgacctctttctctttgtgtggtaggctccggggaagggaaggggctggccaggggctttagggacgctgacccctctgaagggcttccagacactggcggttgaggtcagggtggtcaggccacaaaacaggccaggcagggactactgtccccaccttgtctgaggacctgctctgccgttgccttgagccagctaatcagagctcctgatcacaaaagccaggccattgtcggggaggaatggctaagagccttggacaagtgagtttccctgctccgtgcctcagtttcctcatttgggaaatgggaagaaagctaatgggagtgcctggctcacggggcagatgtggggattaactcagccaggacccgagcgtgtttgtgacaggccttggcaccctcagtgttcagggtgcaggctggggccagggagttatgatttgtttgcgatttctcacgctcagctctgggtggcagctcaggctgggtccacacccacctgtcactcaggacatccccaggggaggctcaggcagaggaggacaccagtgttcccctgtgcctagggcaggccgggtgcccctgtttggcgatgcgtcctcctgggcctggcggctcacgggtcagtggagggctccgaggaggaggcagcttgcctggttctcaccgtttctctcccacagctttgggcagagccctgccccaggaaaccagagtcctccggagcagaacaaggcccagatggacccctaggcggagtttggctgtggtttggggagcaggcccacccacttcttatctgagggacctttggcaaatgaatgagtcatcctgagcctctgtcctcacatctgtaagagggagccctaatagtaggtgttggtagaggtttcgtggcaacctcgtgagctgatgcttgtaagctgcttgaagagggctgggcaccgaggaagaaccaagtctgcctttttcccactcatgttgggacacatgtcctcctccatcagtgaaacagtgtcctgcaggccagagaggctgagcaatctgcctccactcacacagtagtgagcgagggggatggggcacgaaccccgacgtctggctcccgcgccgaactcaccctcggcacaccaggctgcttccctgagtgctgggaggccgaggagtttgagaccagcctgggcaacccccaggcgaaactctgtctctacaaaaaaatacaaaaattagccgggcatggtggcacgcacctgtggtcccagctactcaggtggctgaggtgggaggatcacttgattccaggaggttgaggctgcagtgagccgtgattgtaccaccacagcccagcctaggcgactgagcaagactctgtctcaaaaaaattttttttaattaaaaaaatgttttaaaacaatcaattcaggggttttcagagtgacatttccaaaaggagccctttttggagacctttggggatggggctggtcactcctgagtccctggtcccggtggccaccaggtccctggaaagaaccttgtctcatcagcaggtccttgctgcaactcactgcgtactagcggggtacgttgggggcgggggcctgagagtctgggggtgccaagaagggtgcagaggttgtgggggacccccgtgagtgtccctgcaacaacggctgacctggcaagccaggagcccctgccctgcggccgggtgggggcaggtggggcagggccggggcacgaacctgcgtctgccagctgctccctgtcaggctgcagccaagtccgggcagctcctcagccagagacccaccaggagcatgtcccgcagtcaggccccgcctgggcagccactgctgctcagaaacgtgacagtgactaatggtttattacacacctgccacctctcatccggcaggcgggcgggcgctgtctcccgggcccagctgtgcactgccagctgggcggcggggcgggtgcagggggagggggcacgtccagacatgcagacgcacgagacagacacagacacagtacatacacgcaaacacacagacgaaagcaggcactcggagacacagctcacagacatggcataggcacgggtgcacgcgtaagtcagacacacacacacatacgcagacacatgggcagacccagcacacacacagatacacacacagaaacccgtgacacacacacacacacctgcatagatttttcccaagcacacgatatgcacgtggatacacagacttacaagcacagggccacgtgcagacagacacagaccctgtctgcaccacaaacataccacacacagccacacacacagaagccaaacatcctcgcataggtggatacaagcacagactcacatacacatatgcgatacacatatggatacatacacagagtacccccacaaacacacagacacacacgggcagagacagacagagacaggcacagaccccccccacacaaacacacagacacacacaggggcagagacacacatagacaggcacagaccccccacacacaaacacacagacgcacacggggcagagacacacatagacaggcacagaccccccacacacaaacatacagacgcacacaagggcagagacacacagagacaggcacagacccccccacacacaaacacacacacacacacacaggggcagagacacacagagacaggcacagacccccccacacacaaacacacagacacacacacacaggacacacattccaaatgcccatccccaccacagccccgtctccctctttccaggccacggcctcaggggcactgagccctctcagccctctctgccctctctgtctctctggccccctgccatggtggccccaccctggcactggctggggcaggagcctttaccagcagtgggggtggccagggcaggtggcgcgactgtaaccgcccagggccgtccgtttctgacccccacttccctggaaatgcctcgtacgtggggacagcagcttttgccagggaaaggaagcaggtacaggaggagcctgtgccgacctgggccctgggcagagtcccccagggaaacacgtggccgtcagctgccttggtctcccccagaggcgggggttgtgtgtgttgtggaaggcggtgatgagtttggtaacactgggttccctgccgtcccagactcccggggcagcccacagagcttatcagacttgcgtcactacggtcggatagggccactgccgtgtccagagtggggccactcccgggcaaaggctcctggtggctggccaggctctcaccatgtgggcagctttggttcccaggtgttgcatttgaagtggccgtctgggaggtggccacttgctggctgccgggagtacagctccagggctggggactctgccctcctgtgaaggccatgaggaaccctggggctgggattcctctggcaggcaaggcccaaacggactgaccaggcatcttcagctgccgggagaagggtgcaaccgaaaccttgtgatggatgtccttccctcgtggggcgggtgagcagttgagctcatctctttccaatactcttcggcctttagtcaaatgaagacccatttctcatgtgccatcgcatgcagtataaaatctattgagaggacactcctaatttatcaccagtggatgggaacaggcttccctagaacaattatctttgtgttgtctgcagccaccttgggagagaagcagcactggttggtgataggagggaggggcttggactcaggtccaagtttccaagtcctagcattactacttcccggccatggagccttctcaaggttcaggaccttccctgggctcagctgctctgactactgaataggcatggtaaaaata

SEQ ID NO: 63946 - DNA, 942 bp, Homo sapiens
tcccttctgctatgtggatttctccttgggcctgagcaactgcccccaaccctcacggtcctcacccccgccaaagaaggtacagactccaggcttctctcttttcatccccagcccaaacaagctctgcacccgctgttctgcctcccctggcaagcagaacatggtgagatggccgcagagaggcccaggaaccagaccccacaggcacatctgagcctgagtttctctctccgggaaatggggatgatcgaggagctcgacctcggttagtcctggggaggtgcctgggtgcctggcacagtgcccctgcccgttaggattactgcaactgttggaaccctgcccttctgctcccggcccattagggctgggctggggtgagttcggtggctgcgcgggctggtctggccacctcctggctccttgatggcagatttgggcacagaaagagcctgtggccgggtggtgtgggcagagtgggctgggggctctgccctccctgcctgcctgccgggcgtgtggtcctggctggagacacaggaacacagccctggctctgttctcgaagtcgtgggaggcgggctgtcaccacagtggctgggagctggaggccagcccagagggagagaggacgccatgtctgtgccctcacccttcagcacaggccctgccaagccacaggtgcctctgctgcacagggagtgagagggggctttgctgggcagagagcagggggctggggctgggagatggaggtgggggctgtgaaggggaggacaggacagcaaggattgctgggaaaagaggctgtgtccgtggtgccataggcctctctgcacacccctccgcacaccgcacaccgcacacccggccccgcgttacccgacggcccctcctgttgtgcaggttgcacgctgtgcagtcgcgggtggccgtttg

SEQ ID NO: 63947 - DNA, 1176 bp, Homo sapiens
cggggcctaggctgggattcagctgcagatcaggcctagaaagtacagattatttctttatctatttataaaattatttatttgtagttatgatggatacataatagttgtacaaagggaactgtgtattcttacacatacttctgtgtccctgaaatctgggacagtcgctggcacacagtaggtgctccaaaatactcacggcctgtagctttgtgcggtcacaggcacggttctgctggcgttggggtgggggtcatcactcaagtgaccaaggggaggtgtccagcaacagacggggacggggcctcctttgctttctggcaacaagatcagggtcagattcctgctaagtggggggcacccgtgccccccagggctgtgcctggccggggcagctagtcccctttgagccctaattctaagagctagcttcgtgtccctccatataacaatatgatgggttagggtcaagctgtggtcctataacttgttggaagacatttcagaacaataaaggtgtcgggctttatgtctgctcatatttcatcctggctctggcctctcctgctcactcaccttggatttactgtgcggatattttaaatggggtgagcttggacgctagtgttcccgtacccccgccttgtcccccccaccgccttgttctgccccccccacccctccccgccaccgcccagctctgggagcctggccccagcccgaaccccgtgctggccttgcctgctgaaatatttacctcccggctcctctgacaggcagagctgtctccttaagcaaaggttattggactgcgaatgttatgacattacatttttgtgtctgcactttggagatgcgtcatgctggcagaatgacaagctctgggcagggctgagcagaggggccgggcaacgcggggaactgatagcggtccactttattgcagtgccttcacggctccgccgctgcgccctgggagttgacaggacaaggcgccagcctccttggctggggctgcttagctggtttgatgctgtcagctcccaggcaccgcccccccaccgccccagctggcagccccagcacctccaagagagggctaggatggagcaacaggatggagcaaggcagacccacagcagcaatgagaatggtcccagcagcccacgtggc

SEQ ID NO: 63948 - DNA, 453 bp, Homo sapiens
gagtggaatataaattgcattattaaatatgaaccgctcttggaacccggctcgccagcctgctggaggagggaggggcccggggccgggagctgggagggccgcctaatttctcaaggttgaatgtataattctgctctgtggggtttctccgttcagagcccccaagtgggagcaagtggtgagatggggtggggccatgggttcagagcggctcctcccgagcaggtgggagtccaccgggcggtgctttctgcccagctccttcccggaaggaggtgcagcccctgccacgtgggatgcggtgtgcccacttgccctctagggggagcccgggttgagggtggcaacctgtggggcctgccagactttcaggggcccatcacatcctgtacatttcagcagccctgcaggtttccttgctaagagttgctaagcaggtttccttgctaa

SEQ ID NO: 63949 - DNA, 955 bp, Homo sapiens
gctaggggtggctgtcaggatcctccccgcacaggcgaggctcccggcaagactgacagtaagaggctctgcgggaaggagctgggcggggcgggggggggtgcccctgtggagccactaaatgagggatgtcggttcctcccccggaggcctggtggatgggagaagcctggggcccacgcgggaggcagtgtggggtggggctgagcaaggaagggaggaggaggaggagcagcgtgcgggagtccccttgtacacacgttcacggagcagccactgtgggccttgccctgttctggccaaaagaaaaaaaaaaaaaagcagacagtaggagagagaaaggggcaggagagagggggcgttctggccgcaagaagcggcattctgacctgaaggaggcgagaggagagagatccaggcagaggccctgcaggtgcagaagccgcttggggacttgggaggccggagccagggagtgaggagagaggggtttgggggcgctgctgccctgggtttggactcagcagactctggaaagcaggcattggaggaagggcggctgaaccctctggctgctcattaaccaggcctgacgctcggggctccaggggtggggccgcaccccgcttgctcacctgcctggctgctttatcttgacaacagattgcacaaaccccagagctaatattgaacttgcctggcttttaaatagcacctgtaaacaccactactcccagcccctggtccacacatccctgcccaaggaggcattgaggtgaggctggccccaggcactgcctcgcaagcactgaagtggagcagagtcagctccccaggaaccagatcctcatcatttgccccacccctgatgagcgaaaccttctctgctcaccttttgtgctggaaatggtcaggggaacccttctctgcagggaaggggcaaacgcccagccaa

SEQ ID NO: 63950 - DNA, 1177 bp, Homo sapiens
cctcttcctccctccatctgccaagttaatgcaaactggcaggggcgatggaggggggctccgggggcaccactggcagcccgccccacgccgcccacatccccggccctgcaacccggggcaggaaaccaccaacgtgtttatgaaagaggcaggcggcagctgctgctaacaggtgagcccttcccgagccgagcctctcccagggcctcctggagaaatcggtaatgaagtgcagctgtgaactccggttttgggtcagaaaggcaatttctcatctctacgcgcagcaattgagtcgaaaatccaggagctgtttgcctctccccgcccctccacccgctcagccctcactcgcctgagcaggaggcctctcaggcgtcaatattgactctgtcaaaggcaggtggccgggcgcaggagggagccgggctggaaaccgggccgggagcagcccctggggccagtgaggtgggagcagggagcagctggccggggtgccctgggagaacggaaggctgtttttcctctcattttaattggtctttgtgactctaatggtgcccgtttcacctagtggcagtgtattggcttggggccccaccgcgcaccacatctgagccattcaagaggcgccaggcagctgttcctggcctaaccgacttttctggatggttctgggcctggaagggcccagaaaaacaaagccaagggatggctgggaaacctcagggcctccctgggatggcagccggcagctgggccgaggccgcatggggggcggggaagatcagagccccggctcccagatccggctgcggtcgtggccctgtctggccacctttggccacagggtcacctgagaatccaatttccataggcccagatgaagtaagcaacgcttgccaagtgagattgattggaaatcggagtgggcggcagctcctgccctctcttccggaatggacgcttatgaagcccaaatgccttgttcccagcccagctgagatgcattcaggaaacactggtagcctttgaggaggggccaggtgtagtggttgtgagctgggggcactggggccagcatgcctggggtttggatcgctgctgtgtgactttggagagatcgcttgacttctctgatcctgtctcctgcaaaatagaagggttgcatttg

SEQ ID NO: 63951 - DNA, 600 bp, Homo sapiens
aggggaccgtgagagtgggctgcaaatcaggacgtgaagtctgatgacagatgggaaagggcttggtccagtggggtagaagttaagagatttcagctcaacacaggaagcaattgtaacagtcacaggctgacggcagccagccgggtgggaaggagtgagctctggagtgggaagggagacccagggaccctctctccccacacccttagggagcacctgcttcgggcaagccctgagctgggcgcagtggaggacagttcctgaagggcctttgcctggtgggggattggctcaccctgggtttcttaaccttgggactgttgacatttggggttggctgattcattggtttggaggctgttctgtctgctggagggtgttgagaagcatccctggcctctacccaccaggtgccagcagcgctgtgacccccagttgtgtcaatcaaaaatgtctgcagacactggttgctaactatgccctgggggacaacccccactccccctttgagagccactggtttggaacaaaggatctctaccttggctgcgcactggaagcccccagggagctttagaaactaccaatggctgggtc

SEQ ID NO: 63952 - DNA, 446 bp, Homo sapiens
taaccatttttcttgccagaccaatgagtggcttcacttcccagctattcagtgagcactttgttctaatgattagtggagtcacatccgaagtcagtctgtactttgggatgccttaaaattgtttccaagtcctgtgggtggatgagctcattggcagcggtgtggacccagcctaagagcttagcttttcctttggggcccagagggcaggttcacatctcagtgacagcagccggctgtgggaatgtgagaacacgggcactttgagtggaacacgtggtcagtgttgaaaggacaagggcggctcatccccaaagccaggtcgtggtaacctggctgcctgccagctgacctgctctgccagggcccaggctctggtagccaggagtgctctcattgtgcttggaaattaagggctatggagcagttgccacgcaggcgtg

SEQ ID NO: 63953 - DNA, 1100 bp, Homo sapiens
tctgatgaggagaggggcagagtgggggtgacactgggcctggctggatgcagcctggagggtgcccctttcttgggagacacagcgccccttgcgaggtcagccagggggtggctgtggcctgtgttgacaccacatggctccattcatgtggacaggaggtgccttctgtctgcctgtccctgtccccgcctggtgctctgagcaccctgtgggctggggcatctttctgcttacctgggcaccaccaccaccaccgaggtgctgggaagctgacccctggacacgggcagccaggcctggagagctggctaccactggacacgcccgcccctccgaggcagcgggtgccagacaggcttggccggagcctccggttgacttgcttttcctgcttgtcagaaccagctttttggcggggacacagggaccttgatggtgagcgtgtttgatctataaatagactagaggctgccggaggctgcactggctgggagccgcccccgtcggcctgtgctgaggtttctggggttccatctctagcagttcggggactcagattctgtccccgccagcaggccccatccctgtttgagtccccctctcaaatcgaatcccctcccccttgctgcacgctactttcttaggaattctttccctggaattccagcaatgatggcaacagcagtaaatgcttacctggtgcttacgaaataccagcccctgttctgagggcctcacccacgttcacttgtttaatatccacaagagttcaatgaggggaggtactttcatatcaccactttacagatggacgactagggcccagagaggccgaacagcttgtctgaggctccacagctccgaagtggcagaggttggatttcaacacaggtagtttccagattcagcgcccttaagtagccacactgcctaccagagatgacacagtcaggcctcttccctcccagagggagccgtccctgggggattctgacacatgacctcacggtgcctttctgttccttcctgagtttgcctggagtggtgctgggctcagatcacacatgttcatcctaggagtatttgctgagcatctg

SEQ ID NO: 63954 - DNA, 2841 bp, Homo sapiens
ctggaatccctggggcctcctaaagaaaacaaaagaccccaggctccccgggtgattccaggctgaagaaagagggagtctcccttgggtgcagaggtcagggctgatcactctccctgcctccttctggaagaaccccttgcccacccagccctcttcccctgctctctttctcctcttatcttcccccctcccctctcttcctcctcttctgtctcccctctcccctccccggtttctctcttcccctctccctctgtgctcttcctctccctccagttgagattcaggggagaagggccaggaacccccaggccttccctggaaacacctctgcactgctgcctgcatttcctccttcgtgggacaccacccccccatcctttgcaccctctgagtcctgcccccaggatgcccgcatgctctcgagtccccccccccaccccagggcagctcctggggcatccttggctctggaggagggacagggcagtcaggcctggaggtggcgggcttggctgtgtagcccccttgcctgggagaatgacaccgctggaagcttggcacggcctccgggaaggcggccagccccactcttcaccctgctgggcttgtcacacaggcggctgagctcagaggctctgcgcccattgtccctgggaagggcctctattgccagaaacctctcattccaggatggaggtttcccaagtccagatcacacgtccaggccccgagtgcctgctctctgcctgccccttgccccagggggttggtcagggccttggcaggaggttcctgagcccccaatagctcctctccctgtccctgcagggatcctgggagctgcaggccacgctgatgagtcagaggcttggcagggatgtgtgtgtgcatgcacatgtgcgtgtgtttgcccgtacgtgtgtgtgggcatgtatttgtgtgtttgcctatgagtgtgcatgtgagcgtgcatgcatgtttgtgtgtgtgtgcagttgtacccatgggcacatgtgaatatctgtgtgggtggatgtgtgtgcatgtgtgtgtatgaatgcatgcctatggatgtgtgtgcacacgtgtcaggggtgctccgcctccggggagcccaggaggcaatcttgctgctcccagtgtgcctcactttgacaaacaagccctgatgtttcccaatcggcattccagctttctgaaatcacagtttccatctgcgggcacccgcctcacctctgcccccatccccgtcctcagggtcctgcactccagcccggaggcagtgcccggggagccaggaggggcctggtctcagcccacgctctcctgaggctcctcctgccagcctcctgggccgtggggcttccgtgctcagcagggttaagtagcgagctggcagtgggtgaggaagaaacacaactgcttctttagcttcggggcctggggtcaccctgagagtctgctgatgagatctggcagcgggtgggcggagggacgtgggggaaggcaggagctcagaaagaagggccagaggctggtcttagcctggcctgtgtcctctgaggaccctggggcgccaggggcccagactgggccaggcagttttctgtgtggggggagatcgcctgaacaggtcggggggcgtggagggcgggggctggagttggaaatgtccctgatgccttccagggcaccctgcagctgggctgtgcagacctgaggtctgaggctaggatggggtggggtggaaacacattggaacctgctcttcagtggcccccagcacatgtggacagagccctttaagcaccccagaaacacgggggaagaaagccggtcccctcctgcctcttctgccaaggccttaagcctgcctttccccaccggctctggccagtggctgttcccacccggagcctgggactccactctgctgtcacagcaccgcacacgttgggcagggggcaagcaggggaaagggcagagaggagatggcaggaggaggaataaaatgccagtgcctggcagcagccgaggctgggaaaggaggcctgggggtagtggcatccctggtcttcactccagtcttccctcttgacagagcttccccagagctaagtctgtggtccctgctggggacagattgtgtcacgtgagcctcacagggaccagacccctggagtactcactcctgggaggcctggggaagggggcggagctgggctgtgatctggtgccagcacctgtgatctcaggaccttgggcaggctgctgctctacctgtgaccttgtgactgtgactgggagacagagccggcacccactcaccagagttcaagggggcggtgggcgggaatgttggagtgtggtgtggcccggggtggtggatatttcaacaatgattaaatattccctggagatcagcctgggctgcatagagagacccccatctctacaaaaaaaaaaaaaaaaaaaaaaattagccaggcttggaggatctcttgagcccaggaggtcgagtttgcactgagacatgatggcaccattgccctcactctacaaggcaacagaggagaccctgtctcaaaaaaaaaaaaaaaaaaaagatttaagaaattacccgagactcagtttcctcagctgtaacattagagggccaggaggtgggctggattctttctaaggcccccctgccattttttccaccttgatttgaggagccaggtggtattcgtagcgttacctactaacctactaaccatggggtgcagcttggggcagggatgtgtcttggttctttttttttttttttttgagacggagtctcgctctatc

SEQ ID NO: 63955 - DNA, 3035 bp, Homo sapiens
tgcgtgtgactgtgttgtgtgtgccctgtgtgtgtgagacctctgtgtgttgtatgcgtgtgcctgtggttgtgcgtgccctgtgtgtgcgtgcgtgcatggggcatcctgcctgtccagcagagctccctctcccactttcgttaaaccccatctccatcctccatgctcaggaaggtgctgggtaaatacattgccatctggctgatggaacagcgtcctggttgggaggagttggccacactccccagatcagggagagtctccagggactgtggaaggagccagggctggggccaggaaggaagcagggctaaggaacccctgggagccgcctcccactccactcctggccccagccgtgggggctggagctgatgcagttccagggggctgagggacagagggggtccctcctcgtgcctgcctccacccccaaaccttccctgggttccagtgtcactgcaggcggcctccccgaacactgggagacactgagagtcttagctgcctggcctggtagctcagtctaggtgtcacgttttccccaggagaggggctggccctcaggcgcagcggtctggttcagagccagcaacaccacggggctcttgcctggagggcagtgctgcgggaggcggggtcaacaggcccaggctgagcagaggtgggagggcgcaggagggggcagcttactccctcggtttctggcccactgaggaacgccttggggaggggagggcttttggggtgatgctgtttccgagacccctgtgtgcctgccttgagccctgtctcccgggtggtggggccagggccagctgctgcagccaggagcccctcatccctctgacttccggggcccaggtctgggggccggtggggtgcaggggacctacacgttcaaacctccccgtctgattcctgtggctgcaggtggctggctctctctggctggcagtcaggtggccaggtctctgccctttggatgtcagcagaggtgacgcggggtggcggggatggtaagagctctggacttgagacccccagggcacctcagatgccatcccagtcctgctgcttgccggctctgtggcttcaggaaaggaactctgcctctctgggcctctgtctacttatctagtaatggggctgcctgcgaagctcagaatgggatagcagagacataagggctcctaaatgccagcacggctgccgtggctgtggtggttgtcagatggggccctgctcccagagccagtagcagcccctgggtcttgcagtctgcatctcgggcttgccacgtgtgggagggtgagggtggggtccagggggagccgaggggtgctgaggcctcatgccctgggccgggaggggctgtcagcctcggccaggaagccaggtgtgtgtacactgtcctgacctgtttgcattcctgggccaggaagcctgaggccaggcctgtaatcacgagggggagagggcaccggggccagtcaacttcccccgaggggcatctgatggcctcatcacatcccgtatgggtgggaggtaggggcaggacatttacaccctagggaaactgaggcagccggtccatggtcctgggcttgtctgcagcagccctgcctcatctctgcattgctgggatctcccgaggcccccgaggccatggaggctgccattagtgagcccagcaggattaaacatgaatgagtgagtccccgccatgcccgcttcccctttccccaaacaaacaacctgctccctggggtgatccggccgtctcactggctgcccgcagcctctgctgcaatcggccctcgtggttgcgtcaccacgtctgctggcccggggggtttcgccagcctcctggcctccacagggaacctgagggcagtgggccagggggtaactggcccctggccggcccagtggtttcatcagccggggagggcaccttggcagcagctgcccctctgcctgcagctgggctcctctggctcacttgtcccccccccactgatggtgaggtgaccgccgggggcacagacagcccgtctcctgggatcaacacccctctgttagctgtgggcccagtgcggctggctcagcccgagggaagggcggctgtgggagagcagctgtcggcgtggctgtcatctccccagcgttggggaaatccaggatgctgagaaggagcgaggtggccaggctggccctaggcttccttgtttcacagtttccctcctaccctgctcatgatgcccagccagccggcaggctttcctgtgggggtgaatacctcatggtgtgggagctgatcccccaaatggggggtgtcactgcccacatgcctgaggaccagttaacgtcacagagcccagactacagagttacccgcctttagggggctccatttgtccctcagggggcagtgtgttttgtgattagaccatggactttgccatcagtatgtctgggctcaaatcctatctccacagttgctagctgtgtgaccccagacaagctgtttaacctcgctgggctccagtttcttcctataatgccacccacatcccacaggggtagtaataggacctgcctgcctagtagagggagcactggctgccttgggtacctcactggtggctgagcctgagctcgcggccctccagcctcccatcagccttttcggacaccagccagcagccttggactggctgcattgactctgccggggtagaaaggcagggacctgccagatgcctccagcaagggtcctgggaccgtgcaactttccctgtcccctggctcatggctcctgggtgcagacagtccccacctggtacagctgctgagagacaggcacctgagcctgacacctgactcgcagcccaccagccggacatctctgcacccccaccctgtgctcagcagcaaaagacacattcactgagcacctactgtgtgccaggcccagctcctccccagggattagctcgagaaccctctccacagtccctcaacatagg

SEQ ID NO: 63956 - DNA, 1168 bp, Homo sapiens
tgctagtgtataaagaactaaacatggccaattttgttcaggatgaattaagacttgtaaatgtaaaatgagttcatctatttaattaagtagcagcaatatggatgttaaattaagttcacagtggaagtgccaaaacagtgttgtaaaaatattgtccgtggtgcagggatttggggagggggtggccctctccctgcgttcacctctccggtcaggatgatcccgatgaggccgtggactgcgccccacctcctctgtcttcctgagcagcggcctgacttgaagcccagggagctgcagcgaggcctgtcatgcttccccctcgtgaggaaccgctgcctgggcttgtctccccactggtccgtgggcgcgcaggggctggctccggcctcgcccacctgtgcacacgcgcgtgttaaagggcgtcatgtgaggcgggtgattgatgagaaggccactgcccctgccgggagggagggaagccgaaaggaccatgctgaagaggttcgccctcagaagaacctctcccagagaagaagctgggctgggatgaaccgggattaccggggaggcaggggttgaggacaaaggccacatgcccagagctggggccagagccaggctcttgaccctcttccctgctgcacgggcattgccaaaaaggcagttgctctgtgctggggaggcggttacttcctacgcacccgcgccacactgccccgggaggggcttgcagcggtgaatgggtgaatggagttccgggaccagcagcctaccccggtgggaagcggggccggcagccctggcaggggaatgtggggccagcagcgggccggggaagtgggctgattgcacagcctgtgctctggaagagagcgcacgggcttgcccacaccgatggacgtggacagctgtgaatggtagcacagacatatacaggagtgaccgtcgaaggagggggattaactggtggaatgggaacagagtcagggaatatttcctgaagtaagagatttcctcactgggttttaaaggacgcataggagtttgcctggtaggtggggaggagaaggccgttcctggaagagagagaggagcatgtgtgtctgttctgttctcacactccagcagttcacggcagagggagagacgaggacagctgcag

SEQ ID NO: 63957 - DNA, 1339 bp, Homo sapiens
cacaccagcctgggggaggcatgaggaaggcttgccctgtgtgctcccggctgactctggttcctgcctcacggtgccgagatggtggagcagccagttcagagccacagtcatacaacaaggcatccttacggagccctcggggaacgaggtgctcgtctttgcctccccttgtctgcggccacagccaggtctccggggggtatgagattctcccagatgggaaaccctggcctcggccttccttctctaccccgcctgggttacctccagagtcagtgggattttacagacaccctcagcctgtgtgacccgggagcttttccaggccgctgaggggaagctgcagagggtaaaggttggcctccttatctgggcccgggagagagggattaaaaagcaaagccaccgcggccctctgggtgtgacagttggctgataagaggaaggctgcttgggggttggggtgatactgggtgaaaggagaagtgggtgggacccccagtaggtcctatcactgacctggagctgcatgtgtcaagataccagccccagggcctgagagagcaacacaaaatccctggctaggcgccaatgggaaccatttttccaccctcacccctactctgcctgcagaaataaagctgttgccgcagggccagcggaccttctttcttaattccctccagcttcaaaggcctgtcctgtccggccctacctctacctcatgtggtctctgacgggcattcattgggcacctgctgtatacccggaaagcatttattgagcacctgccatacacaggctctaggcctaggctttgggattcaaagatggaagacacagtaagggctgagtcatcaggacaggggctgcaagaggggacagtagcaaagcagacccagaaggccacgagaaagagattcagaagaacttggagggaatgtcccagggaaacggtccccaggagggaggcccagccacctctagcgattaatgggttttggccaggtcaccaacaaggcttctgtggttgaaggccaggaagttctgagttctctccgtggggcctccctggcttgcttcctttagggaagtgggtggtgctcaggaggtgtcgactggggctcctctgaaaaggagaggctgaaccttctctcagtaagtaacagtggagttggctgcatgggggtgagaagaaatagagccccatccagaagctccaggaggcaggacggtcggccaagcagcctctagttcccagggaggaggagggtctccagggtgttccctgcttgccaggcgcctctgcagtccttgcctgtgtgggccgcgggca

SEQ ID NO: 63958 - DNA, 1103 bp, Homo sapiens
cccatgtggattcgtgcccagcccccttccgaggcgcctggttggcttcgtacctggccactgacttgtccagtcactgtgtgtctgctgcatagctgatcccatggtgaaggccgaagaggccctggcgagaaagatgaatgaaggacagaaaagccaggtgtgaattcagaaatcaaatggtaccctaaagccccgcagcagagtgaggggtcaaggaggctggggcggttggggtgggcctctctatggagtttgtgtttgagtacaggctgggatagagccaggagccatggatagccagacagaggcctgaggcagggaggcgagcgtggctggagcaggggtggacggaaaggcagctgaggccagctcttgagtgagggccatggagccagaagtgcagccttgggcccggacccctccctgggcaccatttcccactggccacccggctggattgctggcctctcatctcccacagccgtagctgaatcaggagacccaggccagaaggggaggggagaagagaggcacgctggccgttctgagccgttgccgggccaccctagagccacctgtggccgcccggctggcccgccagcaatgggtttttaattatctaaatattgcctctgccctttgctttcagccaggactgctgagccctgcaaaaggcaaatcgctttcagtggctcaacttgtggggagagacggaagcttttctccctggcctgagtgcagtgactatgatctgcttggttttcttggtgagaagaaatacagcagtgcggcagggagtttacaagtgtgggggtactggggagcagaaatacacaaattcccttcagtccccagcagcctttcacctcctggcatgtaccgtcttgtcgccggccccatgcgtcctttcttttctctgacggtgcttgtagccagggagcttgacaagggcctgggtctcgactaaaggtgccctgggggagccagccttggaagccagccggtggtttcactggggacttgccaccttcggaggcccctgtggggaggaagtggaggaggagagggcaggtaccgctgcttgcagggaggaggtcacc

SEQ ID NO: 63959 - DNA, 644 bp, Homo sapiens
taaagaatggataactcgaaattataacggtggggggtgcttgttttggcctaaaggattcagctttttgcaatagtcattacacctctgggttgtttttctccactgttggaggccgttctgtggctgggtttgttttttcattagcgcctgcgttcacacagagacatgtcacgttgaagggaaatttggggttaatcacctcctctcacctatctgctcactgactagagtgattcaccaggctcacccagaacaggcggatggctgccctgtcccctccctgaaggccttagtccagtgtgttcatttagttagtttgctactgagctcccatgtgggcagggcattgctctaggggtcatggcagggaacaaaggagagtcctggccctcgtggggcctgtgacctggtgagaggttagactgtgccgcttctcttgttatgatttcctcttctctgcagacagctgcaggctcgtcttttattttatatcgaagtcagcagggttgttgtacaggtgcctataattccagcttccaaagtcactgcaggtctgcttctgtcagctgttgtggctgctgattctcgactgggaagtgtggtttgttgtttgcctggttatttttgattgtgtacagctc

SEQ ID NO: 63960 - DNA, 5938 bp, Homo sapiens
aaggggggcacccagcagattgggggagcacccctccctctgtaccatgcctgtgattggctcataattacaggtttattgcctgtacagctattgtgtaatgacatgtttgcaaattaatttttatggctcctgccattagcatatacagtggaggaaggtttagtattaattactactgttgttcgtgtaatcccggagaattaaaaaccaatataagaatgacaacagaaactgatagtttagggtcttttaaaaatagttttcttttttttttcccccaagtaagatgggagatttttccagtttgtgaggggttagcgggtgggcggtctaacccgcgctctggccgccccccgccccgccccccaggggcacagatcatgcagctcgcgggtgataaatgggtgggaggggaaagcgggggctggagcggaggcccggcggggcgcgcggggtgggggcagggagggcaggtgccggaccccgaccccgccgccccgcttgccaggccgccgccgccgccgctgccggcgggtgcaaggggaggcgcagagagcgcgccgccacgcagctccggaaacaaagggccgccggcgccgagggcctggcgcgacctccagggtcagcgcggggcggagcagccagaggttggcggcgggcgcgggcggccccgagcggccggtttcctacaggtcagcagctctggcgccctcccctgcgcccgcgtgcgctaggccgcccgctgggagggggcgccaggcggggcgcagcagcgagcttggggactcaaagacgctcctcgcaccccggcggtcgagccccggaggaaggcggccgccagcacgccgcagccaccgagctgctggcggcggcggggaagagcgccacccctcccttggctccgagcgctccgcccagctcatttaagaatttttctggcggggtaggcgagggtttggcaagtggcttggagaggtcaaaaggcacgccgctgcccccactcccccatctcctccaatttgccctccgtagcttttctctagggtatcgtattccgggagttcaactgtcatttgaagccgctgcatttagcagggaccccggggctgccgctggggacccctgatttacgcagtggttggagagcgttggcaggaacccaagcctggtgtgagcgcggtgccccgccgtgtgtacctgcgggctcaggtctgttcctcaaaccatgattgtatctggggtcaaaaggtgaccccttagtgtcaccaagtcgtgattccggctggttgtgccaccgaggggcccctcaggaggtaaaagggcttgaaaataaattgtcacatcaagaggcagctttgcagcgtgcgtttaaggagagggtggggggacgtgggtaaatggatcctgtctctttaaaatcgctgggctggacaatgagcgcacaggatgtggtttggcggcagggttttttccccttcgatttggggaattatcacatggggccttcttgagctggtgtgaaagggaggcggcgtggggaggagagatacaggctccacactcacactctctgtgcagttgatcgttttcttaaaccaaattagccggggctttcgttactatggtgcagccggggcttgcagaatcccagtaatagcatttattaggtctatttgcctggaagcatgccttcccggatctgataatgcaccagtgcagggagagtgtgggagatgctatcaagcatttgattacacttgcaacagggatttttaaggggtggggtgcggggtgaggggtgagaggaaaagaaaggagggaaacaaaccgctcgcccgaggagctcaccagggccggccggcgtgtgcgttgccgcaaccccgcgtgggttccacaaaaggcggccccgagtctccgggtcacggtttggggattctcctcccgggtcctggcggagggcgaactcccggctcccgcagctgtcagtcgtggggggggagggagggaggacggacgggcgggcgggcgggcggccagagcgcggagttgggcagccggagggggggccagcggcgcccgcagccgcccactgtttgcaaacggcccccgcttcggagcgaaggggagcaccctgccttcggcagcggcaccctccccgggtttggagaggcgagcccggcttcctgcgccccgctccccgtccgcatggatctgccgcccggctcggcggccgcgcggggggaagctcgcaagtgaaactattattatcgccctgcgaagcatggagctgttggaagatgccgcgtagagacggaaggagccgccgccgccgccgccttcagccgcccgccgctgcgcccctaccctttcgctttcattaggggagacaaatctgctgtcaggcagccagctttccaatttaccgataatgattcttgcatgaaaattgatcgaggggctctccaccgccgtgcgctctcgcctccccgctctcctcctgcctccttctgcccaggcgccagagcccccgcgagttctttctcctcctccttccaccccctctctctgagtcagtggtgggacgccgggccagggagataaccaaaaaaggggggggaggggtgttggtggcgagagggggaggggagccggctccccagcctgctttctcctgccggagacttgtttgcaatcgccgcctcttttatttacgagaagaaatctccccctcggtacttcttggctgtttgggtattaattttctcctctcccctctcccgctcgccccctcctcctctccccgccaccccgcccctcctcacccagtagctaaggggaaacaaaacaaagccgatttctccttggcaacaagagataccccctcccgccgccccccccttcctttttccttctggttctgaacgtgaaaccctgttggaaacaggtctcttgaccctcgcccttgacattcaaatggctgaatggaggagagattgctactcgcacgtcctgggggctgttttttttttctttcccccctctctcttttcctttcaaatgagtaatccctgaagatcttaaccccccaatttcatcaccctcacctcccccctttatttttctctcgctcctcttccccgcctgcttccctccgccgcgctcccccctccttttttttatttgcatctcaagtccaaaaggcagaaaatacacacgcggcgaagacacccgggcagccgtggaggctccggcccgtccttggtcgtcaattacctcattgtggatctgccagggccaaggtggccgaaattgcctgggcgctggtcggagagagagccttttgatcatcttgcggggcgggggggggaaagactgatttttttttttcgtcgctctcgggatcgctcttctgcctttattttattgttttggacatttttgagcgccgtggcttgaacggtgctttttgttcattcctgggttttaatattattttccttcttcatccctctctggccactatggaattctaatttgaaccatgtttggattgaagccgcctctgtattacttaccaggtaagcgagccgtgcgcctccctgggtcccgcgcggcgccggcgcgcccgggaccctccctcacccgacccccctccgccagacccccgagccagggtcggggcattgggtccgccggtgccccccgcagacgcgcgcggcctcggatcctcccgctgcggtcaagcccgcggtgtgcgcggctacgtgcggcggggagcgcccacctggcccgccgcccccatcgcgccgccgccgggggttgcgcgtctcgctccttttgtctgccgggagccggctccgccgcggcggcggagcgagcggccgaggcacttaaaccttccaaggtgaagtaagcgccgagtgtgaagttactttcctgcaggccgccccgatcgggtagcatgccccccccccccccagtcctggggtttatttccctctccctccagccaacccccttgcgcggtctcggcgcgagcgtggctcgccggcccccccgccgccccccttcctgcctgggattccctggaaggttttgttccgccgaggtcggaggagggggccggggaagctcaggagggtatttggcgtggcttcctgtttccttaaccttcctgcgcggtgacagccgcttgccctgtaactttctgtttcggggcaagtcgcgctttcagcctggaggggaggggaggggagggggttgacagctggaggtttggggagcccctcctgaattcaccttatttggatttctaaaccttaaaaaaaattaagtgtaggctacatggaagctggtgatccaggaattcaggcgagggagccctgggtggtgaaccccagggttcttccccaccgcgcgccgtcacccccactcctgtgccccctggggtcggggagaaacgcacaggcctgccccaggtggggccacgtgacgcaggtcaggaaggctgtgctgcgtgtgactgctggttctaggaatgagctgattttattcctccctccctccgagttgatctcccttgagctttgacacacggtacctaatgaaggtggggtgtgtgtgggtggggagggtgatgtgggggtgtagggaggagaggggaagttcctagttttcccatgttgaggcttttataaaattctgcagaagacgctgccctggagctttatttctgaattgttttgctggggaagggtgcacgtggcccggtgttcggtttcgggtttttttttttcctctgttcagaagatcctgtcacttttgctgaggcttccacacctctctggagtccccaggaggagcgtgtggggcaggaaggggcctggacaggacccagctcccttggatctggcctttgctgccctaacctgggcaaacgttttcactgagttaacagagcagggcagagggtcaccagagtccaactgacttaaaaaaaaaaaaaaggcaggagagactcctcctggaggaaatctgtacttttactctttttgagtttcgtggtgtctgttttagttcccagtaactgaccaggtctatgtttttttcttggtgtgtatgccgttttgataggaagaatattgaatattttccagcgtttccattccattcttgatcttttttttttctcctcctctgcctgaaatgcaaagcaacaacaaacagcaagcttcgcttttccctccctcccctagcggatccaatccaaattagaaccgggaatccccaacttagtaaaataaaggttgtaaggggagggcggagtgagcccttgggaactcagagctatctctcccatgggaagattccaggtaaatgagggctgggtctgagtcgcgctgacattcatcagagccctttagcccaaaatgaaacagatcctcatgctgtatctgggtttttctcgtctgtctccccccgggtctgtggctggggaaagcagagagcttgtgcctccccggcagctatgcctgccttggaggcgctcaggaccagcttgtgccaagaatgaatcttcttaagtacagggcgtcttcaaagcacaggtgtttgtaatctacacccctcttcacctgccactggaggctgctggtgcatatttattcatcaggtgaccgattttctgtttacacagggagactcagaaagaggaggaggaagtgtcaggctgggaaattcaaagccattaaggaagatcagcccaggctggagtaaagcccccagtgggtaggcaggaggggtgacttttgtcctgacccccagggagattaagagaggtcagaagtgaggggaggggaggtcggggcacaagtaaatctcagcctgtggatgcaggctttccccgcattatagtttttttggtggttgtatttaa

SEQ ID NO: 63961 - DNA, 1847 bp, Homo sapiens
tcagccaaacagatccttgtccctgtctgggattgtccccttttggtggtctagctgcaggatcagcagaaattttgaagctgtaggggcaccgtgtattcgaagggaagagggagttcgggggtgagggaatcaacatccacatggtatcctcctcctcctcctcctcctcttcctttttttttttttttcttttaagagcgccatatagatttaaagtccttttgttaatttaggaacataaaaccgtgtgatgtatagtttggtttgctcgtaaaattactaagtgtggcatatttagtgctgtgaaagcttggggtaaaaggaaaaaaaatcagtgagaattttcttacaagtctttaggggaaaatgtatttttccggctttttcccacacatgccaggccctccgcagctggggttggcgctggtcgttaccctcagccccaattacagctgtgctggaagctgggagtgggtgctggggctgggggattgcgggagtagggcactggtggggtttgggtaaagccaggtccaggtcttatctccagagggtgatcccaccccattctggagctcagccctgccggaagcccaggccctgaaggatccgggcagctccatcctctgctccctcccacagtgagacaggaagcgccctctgaccaggcctggaccgccgcccagtgggcatttggctgcttgcttaatggcctgtggggtcaggaagtcacggaacattggacttgggagggacctcagaggtcagacgggctgtccctcccttctctggatttgggggtctcgtggtcacctcaggctgggcacgtgcaggtcctgctcctgggttggaccgggctgtgccactgtggcgagctaggatgttgttgcttttcgcacagaacacgtgcctgtgacctagtcctgtcctctgaggacacagaccaagcctccccttcccaagcacctcccgtcaggccccctgtgagctgggcagggcttgcgccagtgggtgccgggcactgcgctgcgtcagtccactgggcaggagcagcagaggagatctatgttttatctgtaagtcacttagggagcaaacagagagctgagcacagatggattgctctggaaactcttagaagcatcctggcagagggaatccaggaaggcttcctggaggaggtggcactaaaagcaggctttggaagtatggagcttcgaggtgagtgaggctgggaggaaggaggctaacacagtgaggagggaggaacagaaatagggaaactgctcttacaagactcagcacattaggttcatgtcaggtgtgccgggagctgggcatggggccatccctgcccacgttgtggtgttggtggtggtgtgtggggggcatggattgagtaatcagggtgacaagtactggtgctgagaggtgtgtgtagaattttctgggcgtgcagaggaaaacagtttggtttgagatgggggtgaaggctgtgtccaagaaggccacagagcggaggtgacatttgagctctcctttctactctggggaaacccacattcctcaccagtggggacttggcagggaaggccaccactcctgccccgttgctcagcagcaccctctaggggtggggctctgaagcctgtgcgtccttcagaggcaccatggggaccagagggtgtccggcagcagggccctttccagaagccaaggaacagtaggagagaatgtgcaggcagagggagcctgtgcggaaggggtagctgtgcctgtcaaatctgttccctgctcctcccaggctctgcaggccagagagatagatgcattaggcccagtcc

SEQ ID NO: 63962 - DNA, 5894 bp, Homo sapiens
gtccgtggtaaggagcaccgcgtgcagcatccccagggcaggtgtcctgctctgggaggtgcctccgtaggcctggccctggcacctacctagctccttccaggcaaatgggagtggagggtgggaaggaggtccagggaaagagagctgtgcccaggaagggctcgcactatctgggggcgcggggctgtgggtagggcgctgcttaggaagagagaggaggaggagcaggcctggagggaaatggagggaggccagccttagccccagtgctgggaaattaggagtcaagcgacaaacctcgttagcgaggagcgcgccggctgcaggagagcaattcccacccttaaactcggaggccgtgctccggattactaatttccgggggccgggcgcactgacagtgagtgtcatccatctcccccttgccagcccgcctggtggccgccagcgtttcccggccaggactcacagagcggctcgctgctgccccccggcggttgccggggtgtccggcagcgcctcgctcccctaggcctactgggttgggaaggggagtgacttccaggtgtgagcagtttggggcgcagcttgcatgtcacctgtgtgcacatgatcttgagcaactcagggcctcaacttcctcatctgtgaaacgggaccagaccacccatctcgcaatccaggggagctagatgtatacgccggagggattggccggctctaaaaagccgagtgatgcacctcccagtggccactccacacgtttttgtggttggccgtcgtggtcctgctcaaacaggtggagaaacctaaccccaccttcacccctggcccaagggcctctccaaggaagaagggagtaggtggtggcaccgtgtccgggtgagagacctggaggtggggcctaggtgtctacccggccaggtgcgagaggttcatttgcatgctgttcccctccccccgcagcttgtaatccaggtgggaaaggggttgggccagtcccggaggtgaattttgtttttaaggctcggggccagtcgtcgtccattccttcctaacacctccctatcctcccctccccccgcccgtgactcccagtgggggtggaggcgcccctccccctccccctccccctcccagccctggccgcctggggccgggtgaatccgccggccagtgcgggtataaattacccgggcccgcgcggccgagccaccgtgtggtgcgtaaattatagcgtccggccaaggccgcaaggggggcgccgccggtgagctggcgggtcgtgcggggaagcagcacccccgcgccgtgccagggccggccagcgtccgcaggtaggagccagtaacggcccgacccggcctcgccggtccgtttcccttttcgtttgtggtctgcccggagccttgtgcaaggcggggggccggcccgcgtgcgcccccacctccgggccccggcgcgcgctcggtcggaggtcgagcggggagcgtggggcctgagggagcccgccagaccctgccccccggagggcacacaggctggttctgctccccgctggcgcgggccccgaacgctctaggcccgccagcgtcatcgggaacagatggatggggggtggcaggcgcccagcgctcgctcccgtcgcaatccgggctggcgcggggagggggagggaggaaggcgggggaggcgggctcgcggggacggcagcgtgcgcgcctgccaagcctggcgcgggcatgtcccggggcaggtttggggctggcacgagggggctgaaagtcgaaacccgcaccgcagcgcagcgctggggcggccgcccagggggtgctggtttgccccagggctcagaagtagggacgcgctagatcagaggggtgttggaagaggatgaggagggagcgaccccggggcctcagagccgcccgggggggttacagcccagggcgccagaaggcggcaggggaggctcgccgacccctgcccccgaggcccgcccctttaaccccgagcttcctggggacgcgcccgccgcgatggggtgggggcggggcggggcggggcggggtgggcggagccggggggtgggaaggctggggccttcagtccctctccgcgccgcctgtgggtgcccaggaatttcaggacgctccctgagtcattccagtcaagtgcctgggtgaggtagggtggggggtgccaggaatggggaggcgctgcgctggggccagaagcgcaatgggtcgtgccagtttctggaggcgggcgacctcgcctctgaccgcaaccccagctacttaatgatccccctggcgaagcggcgcctccgtgggttctccagcccctgggccgcgggttctttaaagaacaccccccgcagcggcccgcaattgtggccttcccaaaagttacttaaaactggggggtggggtgccttatggaattttgaggccaagttcttagtattcagccttttctagttggggtaataaggtcaggcatggggggggtggggcttgggtacacagtctgttttgtgtcgcctccccccaccccacgcgccaccagcgcccagaaagttgttctccaaaaggcctccaggacacggagttacccgtccgcccattattgggcctgctctgtgtcaggcactgttctaggttcccgggacgcagctgcgagacagggctccgctcacgtggcgagggtgctgcactactttaagagttaagtggccggtcttagccaccaaggtccccgggacccccgagcagtccagccaggggctcccgagagtgtgggggtggcacctccgcggccccgctggtgtccccggctcacctggccggccgggccggggaggggcgtgtgcctgggcgggtggatccgggcgcccgtcggtgcgcgcgcgcgcgcctgtgtgtttgcggctgaaacccgacacctcccgctggctgaggtcagggagccgggagcgagccagtggcccgggagtgggcggcgttgcgtttgggtgtgtcctcggcggcgacagcagcaggtgtttcttggccggggccccggaagctccacctccccagcgggcccgagctgccgccgccgagcagccccgggtgagataagcagtttagacaaacactgggcgacggtggctccagcatgtatcagccgaggtggagctgcggggccctggcatgaaaggtgagcgcgccgcacccggccggggacggggtcctcccccctccccccaccgcactgtcctcctgcaagttcgcgggtttcgcgggggcggccgccaacggctcccgggcaacttccccggagtgttagcggcgataagagccgggagggcgggcaggcgaccaaaggccacccccttcctccgcccgcgggtcgcagcctgggaggcctggctgcgggcggggactcgggggctccgggctcaggagtgcgctcagcgggggatggggggggtgcgtttaagtgcgtgcgggctagagggcaggtaaagtggggggatgggggtggcggggggagtctccgagagctgcgggcgctggagagctggaatgaaaactttgcggcgacgcgggagggagcgaatgggggtggctgtgcgcccccgcggcaggtgctggcgacggccgaggaagcgggggtgtggggggggggggtgctcgctactggggccgcgccggttagggttcttgtcttgctcccctccccctccccgaccccttgtctcgggggagttggtcgggagggcgggaccgcagcctgccgggtttgtgacccccacgccctgcttcccgaggaagggcgcgccccgggctcggccgcttctctcctctctctccccccacccccggcggagcggctccctgcccctcccctcccccccgcagaagatggctgccccagcctcggaggtgggagagggattgcacatccgccgccccccacccgcactggcctttttccctccccggcccttcctgctccgcctggatgcgcctccccgcccccagccctcccgggccctgcggccgcgctgatgggcggcgagtggcccgaccgagtggagccgattcaattatattgcagcaccagagacacctcctcggccgcccgcccgcctctctagcaggctaattaaattcccttcatggaggcggagcgggagtggagctcaccctccctgcgcccgcccacccccagctttccgcctcccctccccagcgccgggtgggggaccaggggggcacttagaaatgtgcggtggagactcgaggcgcaggccatagggagggggttcccagatggggggaagggacaccgcgacaccctcattagatgggggagtggaggctgcgccctttccacgtggtgggccgggggcctggccgcagtgcccgtctgagttccgagggcagcgtgctggcggtgggggagcacctgccgggttcccagctgggcggtggatgccagccggagttgagtcggtttggctcttacaaactagcctttgtacaaagtgcgtttaaaacacactaaacccttgctccccgctgcggtgccttatctggggcctgaggggtagcggccacacaggttggggtttggaaacaaaaagcggggccaccaaatggaaagagggctccttttgtaaaaggcgcctgaacaaaaggcccagccgcactccgggtggaagcgaacccgcctaagccgatttccaggcggcgggggacaaaggggcagagagaaggtcttggtgggggcgttgtgaaatgtgccccctggtcggccgtctcgtcctctcctctgggattccgtgctcccgcctcccggcaggggtggaagggggaacccaggtgagcagccttccctggcctccctcggtgttgcttaagcttggggcacttcagtgttgctcaccctgtgtttacggccgcctccaccagcagggacggcagaacctgaggcacaggctgtgcctgactcagccgccacgccacaggtgaggggcccagggcgcaggctccgacggcgaagtgtgtcatcccggccgccggctgtgcagggagtcgccccgcccaggtagattcaggagcgctggaagaggccctggcctgcgagagcagcgacctcggtgcttcctaagagactttccgagacagccagccccgtgtcggcagcgttcctgatctcctgcgggccgggtgcgaggatggcttttgtcactctggcagcagacaccaaagtcaggaggggaagctggggaagctggagccaaccacggttttgacgcttggagttttctttcctggagccttgggggcggtgccgggccagagctggtgagagcccgccaggagcctccggtgacctagggtcagccctgccttgggaagggaggtcgggaagtcctagttctaggcacagtgaggctgagctcaaaacaaggaaggcaacaaggtgtccactgtggcgcaggctctgagctgtttgggacagtttttaggatcttggagtgtcagagttcaaaggggcttgtacatctccaaactcggtgttttaaaactgctgctggccaggcctttccaagcccagttaagccacagcctctgggttcctgacccgggtctgggggttgtcagagctccccagctgatcctaacgtacacactgggggtaggaacaaggggcaaactgaggcttggggccaggcgtggggcggacaccgcgctcacagcaggaagcctcctccgatggccccgatgagccctcccctccagcagtcacttccctgtctctgggggaagttcaggggctgcagatctgagtgccttgtggtttcagagcagaagccaagcctgcctgtgggctca

SEQ ID NO: 63963 - DNA, 922 bp, Homo sapiens
tgcagaggacgtggtcaggaaagggcaggtttccctcctcgccaaggaaggtggtagagaggtgttcagactcgccttccctccctgggcccagcagcggccgtgggcgtcacagcaggagcctgctcacagggccgtcgcttcctctccgctgccccatgctgctggccccagcacttggtttggtggctcggccagcgggtggcctgagtgccagaggccgctggtccccactggccaggaacaaagtgccgctgggcgcccctggcgggaggccagacaccatggcctcgtggccctgctccctcccagctgcaacctgggcactgggaagggtcccccatggtggatgccccccaggaaagatgcccccggggtggatgcctgggaactgaatggcagagggtcgggagagcgggcgagcagtgccactgcctgagccatgtgcccatcggttcactcacccacctcaccccctattgagctgggaatgccaaggtttgtggggctcggagtctgcggatgtggagcagtgtttgggtcctggaacgccctcagccaggcctgggccctcgtcgcccccacccgttttgatgaatctccagctggtcacccctgtcaggccttggtctggatggggagggactgggtgactcgttcctcgtgacctcagccactcagtgcacctggtccccattctcatggagtcacccggaccctgacctcacgtttccccgtccatggaactggccggcagccctcccgggaccctcgggcagctgagaaggccaaagttcagagaggacaagtcgcaagacggcagccacagcgggtggggtcgtgtccgtgtcccactgctgctgggccttcccgggggggggctgggagagccgccgttaggacagttctgagctggtggtcc

SEQ ID NO: 63964 - DNA, 1039 bp, Homo sapiens
gcccttttgcagctgtgaggtggagcctcgttggtggacgcaggccgcgggtcgggagagccctgccctgggagccttgtagggcggctgctgctacttggtctcctgcttctccctggaacgcagggggtcgcggcgtgacttcagccttgcgctgtggtgtgcctgctgtcccgtgtaccagggctgcggtgactccagaaggtttcccagcctgttcttgtcacttgtgcgatggggacttcaccttccagacccgcaccattcccagtgggtggggggctgattggctctttcctctggggtctgctattcccgttccactgggcagatttcaaggaaagtggctggggtgactcagctcctgtcccacttccctactcactggctggcggcttcctgtggctcccgtgggcctcctaggccaaggggctggacctcctctggccgggctcctttccacatccatgtcgccacaagtccgcccagggctgggttcccaggttttgggtggaaacaggtcggtaggcgaaagtagaaagtggaggagcagccctggcagacacaggctctgtggacctgccccgccctccctccagctgttccagcctacaccggctgagggcccagctggcatcgccgttggtgggtctgctccagagtcatggcacgtggcacactgagtctcctgctgagtggactctgcccagagcttttcaaggttgagctgggagctgagcatgatgctgcatgcctatagtcccagctgctcggaggctgaggtgggaggatcacttgagccctggaggttgaggctgcagtgaggcatgatcacactgctgcactccagcctgggtgacagagagagaccctgtctctaaaaatattttgtaattaaaaagaaaattttaaacactaacttggggacagaactgatgacaggaagagcccccaggttagcagacacacagggtcccctgggttcccaccctggccggcacctgcccctgcatggttgaaagcagggggcaaagtgcac

SEQ ID NO: 63965 - DNA, 711 bp, Homo sapiens
tggagacggcagtgagaccccggctgccgctatcggggtgcctttggggtagctgccgagcctgccgggccttgcctggatggggggcagccctgtgcctcactccaggccccgctgacctagttcccaggtgtctgtgccagggttggccgggcgccagccagacggaagccacagacatgtgggtctggctcgccgggcccctgccccgcctgctggctgccccccagccccccggactccctgtttgtcctcagccaggccaggaaggtgccatctggcctgcgagcagggctttgtcctcggctgaggggagaaggggttcaagggccgtgtctgggctggggacaggcccctccttgtggcggggcggctggggccctgtgctttgccgtttgacccggcccacggcgcgggcagcatgcggaggagggcggcaggcctgggctgttggtagtttgaccctgggtgctgtcctcaggtcgaggtctgtcctccagccctcttctgactctggccacccaaggctgggtgatgattgaagcccctggctgtcgtctccctcctgccctggaggcctccccaccagcctgggagggggagtccaggtaccccgggtgcctgagcaggcgaggcccctgttctgggcatccagagacccactagctttaggcctggtgttcattggggtgctacttggatgctgggggg

SEQ ID NO: 63966 - DNA, 662 bp, Homo sapiens
cacaaggtctgagctgaacccctcctttttgaacttactgtgacaagcacaggaacggtcagaaactgggctcatcacaccaaggcaaagcaacgggcgagtcttcctccttgtcctagttactgcctatggaggcagtgtttagatcaagaaggcctctcttgctcccaagggccctcaccagaggccagggctgccagtcactggtctggggggtggaggcctgagctgagggcagggtgcctgacctgtgtgccggctgctcactgctgtgaccagcagccgagcccttggccctagcccttgctgcgcagaacagcttgctggcagctggcatcgtgtcgctttatctgcccccgcacagtttgctttgtacgtctgccaagaatcttccagttattagcaaactcagacgaatgtaccgccagtattatcagcagtcaacaagcaccttcctctccacagaagcagctggaagagaactcgaggggctgtgctgcaggcctcccctcgaaagacactgggaggtcagcatgttccacaggtgttcagagggagtctgctacaaactatcagggcaaaatctcactggatttctccactgaaaacctacttgaggtttctggtctgaaggcttaagagtcacatcttagcacttccgc

SEQ ID NO: 63967 - DNA, 666 bp, Homo sapiens
cctctggcctttcctgcgaaagacacaaaaaaactcaaatccacctactccaaggagaaacaggagtaaagctgtgctaaataaaacacatacatggcaaagaatggctactgccgattctgtgagatgctggtggctcacactggggtccaatgtcgagtgatgtgaggcagaacaaaaagagccaagggcttcaccgggaagtggagaaaaggaaaaatgagagacagagaaaggcaaagaacagacagaaagacacacagagacagacagagtgcacctggcaggtgtgtgtacacagatgacctcatggtcactgacctgagaaacagggcggccagtgttgccacttactgaggcaataagcagggaagcggagaggaaggacgagggttaggggaagggcatggcgagtccagtcttgggtgtggcctctaagaggtgagatctacttactgatttaacaggagcttcgtaagttccatgtagtaagggctgggcattggggtaaaagtttcttcctttcgttcatgatccctcatcttctccaacttttctgaaatttagaagttaatacattttaccatcattataaccaagatatttattaaaccttccaaatttaccaagtgcctatattatctggcaaatacattatcaactagc

SEQ ID NO: 63968 - DNA, 720 bp, Homo sapiens
gagaacactaggatcacgcccatgctacaaaggagaacactgagctttggagaagggaggtaacgtgctggtaatacacagagcctggggagcagggctggggcttgacgtggctccaggccccactgccctcaccattgctgggatccgcagccctgatccttcaaaagccctgagccaggcaagcccgtgcccgagacgctacatccaggctctgtggaggatgcccaggtccctggggtcagggcaccattccctgtgccagctcttggtgaactcccggccgcccagaggtcaccgcagacacccgctggagacaggagcaagcgtgggcatcacggctcacgtgcgccctctactagttctttttcatttcatttaaattaatgaattgattttttgagacagggtctctctctgtggctcaggttcactgcagcctggacttccctggctcaagcgattctcccatcttggcctcccaaagtgctgggtgaaactacaggcactctccaccacacctggctaagttttaaacttttttgtagagacagggcctcattatattggtcttgaactcctaggctcaaacgatcctcctgccttggcctcccaaagtcctggggttacaggtataagccaccccatacggcctgattcttttaaaaacagcgtttgggcttgcaccccagacgtttcacttggaggccctgaatggga

SEQ ID NO: 63969 - DNA, 804 bp, Homo sapiens
ctcagagatgaccgggtgtctggatttagtgcaggtctttcaaaagcaaactgataaattcctccaagggttccagatgcgtttaatctttttttttttttttaattccaattacagggaaagctttgtgttattatggatgaggctggggtagctcttggcggttttaccttttcgaggcatcccaggcccgatagagacagcagtggatgttttaaatctctttttaattaaggaaaaagccctagcttgcgtcagggatgagctgctggagagagacaacctgagaggagctagagacaggagcttcgacacaccaaggtgggggaaggtgcccagccgcctggctctgcccagccaaaccacattcctgccctgggcactgactgcacttcctccctcctgggcagccctcccagttcccgtggtctgttcctgctcatcctagcactgggcgctctgggaaggctgtggagggtgtaggtacagtgtggtgagcccagattccaaaggccaggtccagggtcgggcacagtgactcatgcctgtaattccagcactttggaaggacaaggacaaaggattgcttgagcccagcaattctgttcaagacaggcctggacaacatagcaagaccccatctctaaaaaaatttttttttaaattagccagatgtggtgatgtgcacctgtagtcccagctacctgggaggctgagaagggaggattgcttgagcccaggagtttaaggttacagtgagctgcaatcacaccacggcaccccagcctgggcaagagagatcct

SEQ ID NO: 63970 - DNA, 750 bp, Homo sapiens
ctggtcttcaactcctggcctcaagcaatcttactgccctggcctcccaaagtgcttacaggcatgggccactgtgcccagcctacttatttatttgtattgctggggagagtgtgagtgcagttccccacatatgaagaaatcgcaggggtcagcacatctggagtgcaatggacgaaccttgccctgggaaaaccacctttgtgatcttggtattttccctgacaggtaaatacgttttgcctgtttaaagtggctgatgacagccccactgtgatggctgtggccagcaaggacaggaaacgctgttgggtaatggggcgcaccgtgtaaagcaggtccttgcctcattccaaccagaaagccctggtgacggggatcttgagagagcatctcctaacggaaggctcccaggaagccagtggagagtcgcctgaagcgggcagtgaaactgctgctgggcacctgccagctcctgggccaaactccaagcctcccgggcccgccttctccatctgcacgctagcaaagcagcttgtccactgtaacaagtaagagcaacctcagggcagctggcagtccgtcaccctctgagaaattcctcagcctttccacatcttctccacgctcatgagcctccactgctggctctggccctgccgccacccaaccctgataaatgacacctttctaccttaagttaatagagctaataatagagcagctcctccaccattcctgcaccatgtc

SEQ ID NO: 63971 - DNA, 2496 bp, Homo sapiens
tcggcctcccaaagtgctaggattacaggggtcagccaccgcgcccggccccacagaaattctttagcttttaaaagccatggaaacattctagataagttgttaaccattaacgggaacaaattctctttacacaaagctcaggcacattcaatcaaggggagccaggcctaagatgcatcacacagatctgaccatgcaactacctttctacaagtgtctgagctccggggtgcccgagtaccgacagccaaagaagcatttacactttgccagataaggaatcggctctgcgaaggtgcgaagaaccaaatcctagcgattaatgtcccaacaacgtgaacacttcctgcaactcgaaatcctcaagggaaactctgtcgaatccccaccaagtgaacgatgacttgtttctacaaaggctactgatttcaggaaactaacgtataactcgtcgccttaaagtgcctctaaaagcatccacgacggttaaagtcgctgctactacgggacgctatttattcagcgccaagacccaagcgccatcgtggatcaccccattcctggccacggcaaccctagggagcgggtcctaggagcctgctggagggcgaccgctgggccagcttcctctctgctgactgaggggaggccaggctgcctgcaaggggaaggggccctttccgcgcttaccagggtgagagccacctccagcatgggggcgagggccagggtgccgtggaagagggggatgcagtccacgaagagggtgtggtgggcgccggggccgcccagggggaggtgctccttacgcggcttctgcttctcggccaccaggagcccgttgacggcgcagtgcgggtacttggcgccgtgcagcaccatcttgcagtaggcctgggtggtcagtttcaccccgggcatgctgacccgggagggccccggaggcccctgggcgcgcggctgaggcctggacccgctgcctggccgcgcggcgcctcagccgagaagcgggacgaggcggcggcgattgatggcgcggccgcgggctggcgggggacccttcaggcccggccccgtttgggcctcggctcctggaaaagcgactcgcgcctctgggaagccgcagccccagactccagtcgcgcttctcgcccggcgccgccggaaagcagcctctccaacgcctgccggaaagcagcccggcccggcattttacgacgttcgcagcgctacccttttccgctccacggtgacctccgtgcggccgggtgcgggcggagtcttcctcgatcccgtggtgctccgcggcgcggccttgctctcttccggtcgcgggacaccgggtgtagagggcggtcgcggcgggcagtggcggcaggtgagacaggaggtggccggtgcggcgccgccaggccgggccgggtcggggggccgggagccatcaagtctgcacgtccgcagcctggccgctcggcttcagcaggaagcaccgaatgggcctcggagccaggtgacattgaggccggcccgtggggactccgggctcggtggctccaggctcggggggccgccccgaagtgcccggtccatcttacccggtctcgcagcggctgcggaccggcctcgggcactgaccttggagcgcccgctggccgagggctcaggctgcggggaggcgggcccgcgctctgtgcctgcagcctccgcccttgctccttcaaaaggtccctgtgcaacccctcccgggttttgcggggctcccgggcggcgctcggctttccagcctggaaggcgcctattgtttgctcacgcaagggctaggcccaaggagagaagctagacgcgggcgttcagccctgacgtcatgcttgtttattctgccccaaggagggtatttccccacatcactctcaccagtcctccgaagggtcgatttaaagggggccgtgtaaggttgatgggcctgaatagaggagggcccgggtgagggggggtctcataggttttccgctctcctcagggattggaaattgatcggggctgtgttggcagccttctccaatttccccttctagtctatgtacaggcggtattaggttttaaacactcagttgaatgtgatgcgtgccacggtccctgtgagctgtcacctccccccaccgctccctgaagaatggagtctgtcacggcagcacagtgctttaatgatctctagctttttcagagtcaccttgttagcattttttcttcttgcctttttttgtttgagacggactcttgctctggttgcccaggctggggtgcagtggtgcggtctcggctcactgcagtctctacctcccgggttcaagcgattcttctacctcagcctcccaagtagcggggattacgggcgcccactaccatgcccggctaatttttgtattgttagtagagacgggatttcaccatgttggccaggctggtcttgaacccctgacctcaggtgatctg

SEQ ID NO: 63972 - DNA, 901 bp, Homo sapiens
tagaatcacctgggcgactgtttcaaggcgccaccccagacacagctacagtttcaagttcccctcaggtgattctaatgcaggttcaagccactgcatgcatcccacgttgcgtgatcacgaaagtcacctgggaaattggttgaaaacaccaatctcttggctccaacccagagctacttaatcagaatctccagggggaacagatctgagcttaacagcccacaggtgaacaccttgaggccaaaggaacccattcataaaggggtgggggcccagcttcttctgaagaaggctggcgggagttggggggaggtccgcaatgcaaggttgccctccacacatcaacccctcccccaggactgtacccacctgcccgcatttgaatctgggccaccttcccggcccgcggcgcggagttggcggtcatatcccgcgtgagcaccaggtggcgctagggccccgcgcttgtcctggagccccggcagctgctgcgcttcccccaattaatctctcttctgaaaccatagctgctgagaagctgcagagggagcctgcgccgtctggattacgtggcagtgacccgatggtcctgccacacaggtcaagttcctttaaaagtcttgtccttgatctcgaaaatccatgggaatttcccattttgctccatggtgcgctgctgtgtttgttttaacacagaaataagtatttccataaattccacaagacacagctcccaaagatgcacctgcttttacaggtttcttggccctgcaccccctcggaggtgaatggagcctccctggtgtgagaagtgcaatccacgtggttggggtgtaggtctccctcctgatctaagagggagaaaatgagatgggtgggcactccccacacctgtttc

SEQ ID NO: 63973 - DNA, 1233 bp, Homo sapiens
cccagtaggcggaggttccagtgagctgagatcccgccactgcactccagccttggcaacagagcaagaccctgtccccaaaacaaaacaaaacaaaaaataaattgtgctcacttttcctcttaaaggtgtagcagctggaacaagaacgggcggagcagcttcgttcaagatcagagaccggccaggtgcccaccgacgggagaatggatgaacacgccgtggcgttttgtgcagtggaatgtcactctgtagcagaaagggacaaatgacagcgtgggtgaggctcagcaaggctgtgctgagtggaagaagccctgcccagacgggcacccccggtgcaattccgtgtctgtcacgtcccagcaccggcagatccacccagtggtggcaagagcccagacgaacggtggtcgctgttgtgcatgggcaggactgagcaggaaatggcaggaagcaggaagggcttcggggatgtggtaacatgtactttgatacgggtttgggttacacaggtctatgcgtttgcccaaactcagcaaatatttaagcaactgtaaacaaatgttggccatgagctagcaatatgcacactaagatattaaatagaggacggtgctggagtctgcagtctgctctgtcgtttgtccaaaagccaaggtggatggatggttgggtgagggaggattgacgggcggctgcctgaccaggcagggagagccagtgtccatgcggcctccgggtagtgaggacgcgagctgcactgtgagatcctctctgccttgttgtgtgtttgaaatgttcgtgctgaagtgttggggggaaagtgtcccaggtgggataataaatatccgatcacccctacacacagcccgccgtctgtctcccagcaaggtccagggcgggagagggcaccgtggattcagatggatcaggaaaggacgttccggacctttctctgcaaacctgcagcctggggctggtgccagcccttatcctgcggtgtctcaaaggtttggaaacacggtgttgtgagaaagtagaatgctggctgctgggggctgggggccggggacaggactcagtgtttaaccgggacagagtttcagctttacaagatgaaaagagtctggagatggatggtggctttgcttgcacagtgttctgaatgtatttggtaccactgaactctacacgtaaacatcgttgagatgataaataatattataatat

SEQ ID NO: 63974 - DNA, 1177 bp, Homo sapiens
taatagttctacctcgtagggtagtgagatcaaagggagatgtcagaaagtgacctggacttcctgggcaatgcaccgtggcctgcactgtaactaacctgccttctcggccacatcagagatgttctagttgcaaatccactgactttcctggagcatttgaggttaaccttaatttaagtcagtcgttccctcttggctcctaagactcggcatcagcttcctgacactccctcctcctcggtcctacccgtccacctgaaactcaccatgttccacatttttttcccctccaaaatgtcctaaaagaatccaaaggctcactttttttttgtcctatctggctgtcccaaggccctcatgccaacagatactcttatcaggcatggcctcccaagggcttagcagtgaccctccagaagctgagggcaaaggtcaggtctctctttggtcaaagataaattctttactacacactgtgacacttgcttgacgaaaacaagtttggcagaggtgacgcaagccggggccatagtgcgtctgcatgatctggcttggtctccagtgcttctggcacctaccatgaaaacagcatgctccaggtagacaccagagccagggaaggcctggggaccagacctggagctgccctgcagccttacccaggatgcccttgccaacccacagaccatgagctaggacaacaaacgtctgtgactgtaagccacttgtttgttatgcagtgtgattcagcaaaacccatagtagggaagacttcctgataggatatattccaccagaaaagatggagccatttgactgagttaaaatgaagaacttttgctcttcgaaaagaaccttgaagaaaaagggaaaagacaagttactcactgggagaacatagtcttcacacacataaaagtttagtagcaagactatataaagaactcttgcaaagtggtaagaaaacataaacagcccaattaaaaaagggggcaaaagtcaggaacagacatcgcacggaagacagtgtgcttatgccaatgagtatagggaagggtgatcggagagcacaactctggaccctgatgagacaccactttgcatccactgggctggaagcctgggctgctctgtcaggtgtctgctggggtaccgaaggatgttagataggtcc

SEQ ID NO: 63975 - DNA, 1728 bp, Homo sapiens
ttcaagacacttgaagataaatttactttcacgccactgcaggaaaagagagaagggtcttgtcatggataagtactcagtgataaattgacatatcatgtcagtcatttgaggaaatttatgtgtcaaaacagtaaataacccaatccaagcaacaaataaggaaataaaagcatgagaataatttttagggaaaagaaatctgacattcatagttcagaaagataaccatgcctagtccagtcaatgtgggggagtttcagcagtgatatctggcactcactgtctctccagaacaactacatactgggatgaaacaaacaggcttccatcaccactgtgtaaccatttacttaaatctaaaaaggagtccctggaaattattccataaagggatagttccaaactccttgaggttccaagaggaacccaagaaatggagccaagtgacaaaacagatttgtttttttttttggaaacagggtcttgctttgtcacccaggctagagtgcagtgattgtggtcacagctcactgcagtttgaactcctgggctcaagacatcctcttgtctcagcctcctgagtagctgggactataggcatgcactacaatacccagctaatttttaaatttttagcagagatgaggtcttgctatgttgcccaggctggtctttatctcctgggttcaggggatcctctcacctcaacctcccaaagtattgggattataggcatgggccaccatacccagccaggaaagagaattaatgcacctcctgaggcttcacgtggacctacctgaacctaatttttatacacgttccatgagcagcccatgaggcagatgttgtttgcactttcatctggcttggcttgaaagtgatgatgcatttatttgcatgagtgggtgacaggggctaaaaaatgagatcagaaccagaagaaggctgtcaggaaggaaatgactaactcgacaagaaatttcagccatttgtgtcctgtccccagcaactcccccactaagttcccagtaggttcattttcagtttgtagaacaactctgcctggaagattatgtacaatcataggcttttaggtctggatgaaacctgagtgcctcacttgtgcaaccatttcatttcatagaaaaggaaacagaggtgtgaattagacacccctgctctggactgcgcctccactccctgagcaaagcaatgcagagcagtggaaagagtcttgggtttgaaggcaagaggctccagccccccgagcctcagtttccccatctgtcaagtgaggataaccacgcctgccctgctctactgggcagggcaaaggagatgatttaagagcaagtattttgtaaaagagaaagcaagctgcaactttaagttgctactcctagtgcccctcaaagctgcctagcaaattgattcttctccgtagtttcctgcattgagttctagaactcagtgctgggagtcaaagggtccctgttgactcctgggcctggggaacccactctgcctcggaacccttccttgcatccttcctttgtaggcaatcatttggtgcatcccagccaaccatgcacttacagagaaagaaacagccaaaagaaatagagagaagggaattacgacctggggtgcatttgactgcttcagttccgaaaatacttactaaagacctattaggtggcaatgaagttgacctcaaatcac

SEQ ID NO: 63976 - DNA, 953 bp, Homo sapiens
taaaaatttatacctgaaaggcaaaacgttattgaatgcttaatgaaattttttcctttacattaaatgtttacatactttgccactcctcgaaggagggttatgaattaaatacctaatacattacagctgcttaataaacagccaataaatgaacgccaatgcatttaaaagtaatgagttttaggatataaaaaatagaaatctcaggtttttatttgtaatccttctagagtaaagaaacagattgcggcaatattagcaattcgtaaatcaccatccaaacccaccatgaacagatagagcaaactgactcagtgaaagagaaatgactggaagcaaaatggggtcaaagttcatgtctttagggcagatacattttacccagtaatatttctcttcccaagtcccctgagtcggtcccaacttactgccttttagagatctcacttttattgtaagatagcttcttacacgaaaacatttaccacttgtgcacgtatatatatatatatctatacatatgcacacacatcctttgtattcaactgcctgataaactgtagtcatttgttctgtgttgtggagactgataagtgaatcttttccttatctgccagggtaaactgccaactttcaaatactctttggttttcccaggtgagtcatgcaccttccagtgtctgtagccccagggctgctcatgcatgtgactgggtcttagttttttgacctagagaaggcataccaaagtctgcttgagccaacatctttgccaggtgccctcattgtgtttatttttgtcatataaaccttaagtggatggcaggattatgtttccacatgtgcacacctgtttacagaccacccacatcaggtagggcaatccctctgaggggccgcagcagattgtgaggggcttcctgttttcattccaaccttcctctgaaaca

SEQ ID NO: 63977 - DNA, 1204 bp, Homo sapiens
cacaggggacatcttaacgcccacccaggagcggctggtcccacagaggacctcttaacgctgacgctttctggagaaaaggatttgtgatgaaaatttccccaaggggaccttctagcgcctagcaccttcgatgctcctgtttcagtcgcggtctcagcgggcagtggcctcctttgaagctgggattctcctgcccctcccgggcagcgcaggccaccggtgacccgggacggtctgtaaacgaccttcgcgtccccgtccccgtggaataacgcgcggcgggcatcactgcccaatatccagcgctcgtgaaggcggagaccggcggggcagctagtttctggctgtggattctgattaatgggccgcaggcgcacggtctgcaccgtccggctcgttgctagtggctcgctcgggagccgccgcactcccggggctgtccgcccgagccggcctggaaggcggaggacgcctccaggtcgctccgcggggcctccggaattcctgggaaagcccccctgcagcgccgcccctggaccccaggtgtgaggagcggggctcggccagcggctccagaagaggcccggaccccactgccgtggctgccgggggcgggaaagtgatttctcggaaagcagagcacttcgaagaaggcgggccgcgcgagccaagctgacgctattggtcggtgtggccgtcgctctgcgcaccgcccgtcccccccacgaccctttttaaggccgcgcgaccgctggcgcatcgcctggagcgcggcagcaagcgtgggaacgcgggcggcgagacggcggcaggacggcggcaggtaggcacagtgggcgggtagggcgcccgtgtcccgcgcggtccggtcccgcggggtccccgacgccaggcggggcgtgggggtggaactacctaccgtaatgtccccgggcgcagctcagtggccacccgtgtccctctctgctttttgcctattttccagccacctaagtccaatctgaatgcccaagtcgttgattgtcgtttgcctgtttccaaagattggtagatagatgcctttttaaaaatctcatttttctttaaatctggtttacatggaaaacgttaggagagctcatataatgaacggcaatagcaaccccctatcttgaaacgcgctctatcatcccactgaaattctaccacgtggaataatgct

SEQ ID NO: 63978 - DNA, 567 bp, Homo sapiens
gaaggttctgattgatattttgctttctggaccagtgtggctctaccatattttgggatgttatgtcttgttactgctgattgtttcaaactcgtttgcccaaagaggtcacattttaatcagaagaacaaaaatgctatttttttttttttttgggtgggcgtctatccagctgtcttggggatttccagcactgttcttggaaatgttggctctaagtcgataggtcatgctagttctctctctctttctctgtgctgttggggaagctgtctgcttgggtgagagtgttcttccaaaggatgtctttgggtgccctgggatggttaggtccctagagtgggacatgttctggaagaggagcccagtgaactttgccctgttcggtagctgcagtttatttcctcactcttgtccctatctttcagttggtcgtaggagttgcccaggaaggaagtttggataataataatgacatctggcatgtaaggtccaggccctgtctcagttgctttccgtgtagcatctgaattctcttacaaccagtacaggtagtgttttgttagc

SEQ ID NO: 63979 - DNA, 1108 bp, Homo sapiens
aaaatgggtataataataatctaccttacagggttaaatgtgctggtaggtcccaagccctgggcacagcacctgatatgagctgtgtagaccatagtctgtggtttataacttcaggagtcttgtctgtgtagataagcatttgtcctgttacccagtttctttaactggtgcttacctgtgccgagcacaaatacaagctccgataatcctcacagcagcccagtgaggtggatgctgtttttatctctactttgctgatgaaaagctgaggcacagagtggggaagcggcttgccccaggtcatccagctgggcagcagctgggctgggaccgcacgtcaggcaggtgggctgcagggtctgtgctgcgggtgtctttgttgctgcctctgtggtcaggccgttccccagcaaggctgttcttgtgggtgagtggctctataagggcagggctgggtcgcagcaggcccttactgttgcagaaggctcacctgcctcaccttggcagcccttggtgagctgcttctcacctgtcaggtacaagcctgacagctggaaccttctcttagcataagacgttctggggtgtgtggtcactaagacactcctgcttaggcgtctctgaagcacttagctgttccgggtgaagctgccagttcacatgactgagaggtgctggtaccaagataaggccccggaaatgacagggcaaagggccaaaggggtgacggagttgcctgaagcgtttcattcatttggaacaaagttcgaaagttgcttcagggtaaagggaggggagtgtgtggagtccgcaggcagtgcagaagttgcagacttggcgtggggggaagatgatgagtgaggaagagcgagaccagcggggaagatggtgagcagggaagagcgagaccagtgctgccatttccttctgggtgaccctatctaggattcagtttcctgaagtgtcaaatcaatgaggtggaccagagcttctgcagctctagcttcctaccctgcatgattctagaacctgcgtaactccagcatggctggaaatggagcccgtgaatggtgggttgtcaaataataaggcagggagcagagcc

SEQ ID NO: 63980 - DNA, 1453 bp, Homo sapiens
ctctcagcatttttctcttggtaacctgcttttaaacactgaaatttgtggccaatcatctgaaagattaaaagcctgaaaataatagcaaataaatcagcgagaagagcgttgagcgatgactacagtttaacagtctctccctatgtccaaaaaaatgcttagagcccttgtcacctttcgtccctgtcactggctgagcagatgtctctggccctcgctgtaggctcttgcacactcattgtattggcctcccatagctgctgtaataaataagcgcagatttatgaataatacaaatttagtctctttcaccgctggaggccagaagtgcaatgtcagtcctagtgggctcagatgaacatgggggctttgttcttcctggaggctctgggggagaatctgtttccttgcttcttccgccttctacaagccaccttcactccttggcttgtgggccctccccctacttccaaagccagcgatgccaggtgagtccctcccacatcccacctctctctcttctgcctcttctccacttataaggacgctgtgatgacagtgggtccacccacataatccaggataaactccctcttttaaggtcagctgattagcaaccttgattccatctgcaaccttaattcccccctgctgtgtaacctaacctgtctataagttccggggttaggacatggaggtcttgaggatgggacaccatcattctgcctgccacactccacaaggcaaatctttcccaagttctaggacctacagagtgtttccttccatcctgtgtcttgtagctacctgtgctttgttccactacagaacgttcagctcagtgttttgtcttgtaatacttggttaattatttaacaattccacggatgtttgctaaccacccacatgccaagcctgggtccacatcaatgagtaaaacatggagtttctgtccagccgtgctccctgtctcctgggtaacagtgaccgtctttggaacattgcctggttcatctcctttagttgcaaacagtgctgtgaggtcatcattattgtcattcccatgttacagatgaggaagcagaggcacagagaagttaagcggcttgctactcaccagcatagtccaagtccagggctcctgcgcgtaaccatcattcctcgacgctacgctcactgcagaacttattgctcttacaggacaacactgaccttgacgttggtcaagattcggcagccgtccaccaaagggcagctgtggattagcctgacacactgctctgtttcgggaggacagctctcagcaaccagtcctggcctctgtctatggagatttggacactggagtccagaaggtcgctaagctaaaggacacatagcttgagctagaatccaggtgtccagaatctggtagctttctccttctggagccgtggaatcttgtggttga

SEQ ID NO: 63981 - DNA, 1786 bp, Homo sapiens
ccctgagttttctctgatgccagactttctgagcctcagtcagtcgtcctggggtcctgaggtggcgtcatttagggacggtgctgtggggggctctgccgggcacgcaggctgacttcaccttaagcctgagcccagcctgatggaagtggtggttctgtgtcctctaagctcaggcttgctgagccttccacgacctcagtgaccccttgtttctgtggatgccattttgacctttggttgtgtactcaagctaactgacaactcctcggtcataaaaattctctgccttgagttgatgttcaatgacagtgtaggtttattgaaagcaagtgtgttcattatctagcacaagggttgaaacatgattcctctgaatgtccaatatttggacaacattttacaggtaaaatattcctttaaagggatatctctgcgtcagtaatagcacaggcactggcgccagaaggtccttggttggaggcccagatctgccgtctcctgactgtgtgagctcagctgtctcctcctctctctaagtctctgtttctccatccatgaaacaggggtaaaagtagtcaccacctccttcctgggactcaggtgaggactacatgagatgatgctgctggaactcagtgagggtctcacgtcctgtttcctaccttgactcagtgactgccacagagcagaggctgatactgtttatggaataagtgaattaagacatacagagccacattccagggtggtgctggcagaaaagccaggtgggtgaggctttgcttcctctccctcctcttacactgtgttcccacagccccctctccccactccttaaggtagaactgccctggcggttccctctgtctcagtcacaccctgttcctaggataaggtatcagccggtgacatctagatgccactgaaaccagcaaagcccctcctttagtgcaatggtgggtggacccttcctttctattaggactaaccatttattggtgaaaagacttcaggcgagcaggtggagggggtggttaagccttaaaacatgccagttggagggcaccagcctggcacacacaagatcatcctcccctgccttggtgctgtacaaatatacgactgcagcgtgactttaaagggaatctcagattggaggtgcccgtaccctggtcaatgtttaacaaagggctcccggccaaccccagggtgaggggtgaggggcttgtccaaattccactctcattgcaaattgaacttaaggaaatgcctcctttctacagccacaccgtgagcttcccttcctccttctaacctctatatgaaggcaccctgcagggggccagcctctcttctctctctccataactctcccagacatgagttgctacccgctaagatggcactttcatttgaatgggaaaaaggcttccttcctgggtgaatgcagacctgcaggcctaggggttggtgagctaactgccagggcttttgtgcgaagaaaaaggtgttcctacaaggcagctcacagcttggactttagccccacttgagacagaagcactttgtgcagtgcacaaaccacaccactgtatgcagcagatcttttcaaatgcctgatccgttggccttgaaaactcagtggtgggatctcccagcagccacgcagttatgtttcctcagaatagctgggttgctaaacgagttggaaaacaaagtcacaaaaaaaaaaacaatgatctggaattaaatatcctcaaaccaaagttctagacagcagctg

SEQ ID NO: 63982 - DNA, 758 bp, Homo sapiens
ttagtgcatggcgtttctgtgaggcaggaagcactggccaaccctggctttctgctgtgactcctcggcagggtcgccagcctgactgagcagagaggactgcgccgcctctgtccaggtgcgggaggtgggccagcaaagtgggcagggcaaggggaggcagccaggggaggctgggcgaggccacagcaaatgtaggtcatgaggacaggagggacaggagggcagctgtcccggctcacttcccaggggccttcgctgcgatgcccgccccagggagagagctcagggtcaggaaacctcttgggaaacaagaggacccaggacaccagggtccttcctgcggggcagcctctgacccaccctggggatttcccgctcggctgtttctctacacggcggcagcgccacctgctgtccacttcgtgcagatgctattgggcccttaaaatccgtcccatcaggaaaattgatcttccccaggatgggcagccgcggatgcgaggaatgaacctgattgctctatttcagaccctttgacctttgtcaaggcgtagctggctttttattttattttatttggtcgggggtcagttaatgcagtgtttttctaattacacaaatgacgtggcttattccaaataaaaaaaaaaaaactttagaaaagtgaaacgaagaaagtaaaaatgacttccaaccccattcctgagtgaggcagctgtgctccgttggccacaggagacatctccctgcaccct

SEQ ID NO: 63983 - DNA, 1763 bp, Homo sapiens
caaccaaaccaccctgcacagagacgcaagaggccccaggtgaagagtaaatgacgtctctaaatgctaaggacgccctggccaaatggctttgatttcacaccactgctcactgctcgccacattctcatccaccatgacgcagtaagagaattttattactagtgttattcatttaagaatattttgttttccttttctggactccagaaatatgtcagtaccttaaagttgggtatcctgtgatgaacaggtcggggaaagtcagctaaattttgtgattccatgtagccccaaatttgttcacgtatgtcctgtttggagacacctactgcaacaaaagattcccacttaataacatacaaaggaattccagagcccatgctgaaaccgcttaacagtagttaagcgacccccgcgtgtaggtcaaaccggcttccgatcctgttcctgagcctcagtttccccgacctcaaggggcccacgggctcccccacgtgcacggcaggtgtccctcccgcctcgtcttctcgttatctttatttttcctgacatctttctcgggattccgggcgagagagccgctggttcgacccgaacccagcacagaccccctctgacctcctcggccgcttccggtgattctgccccatcctctgccagccccggtggccccgcctcgaccctcaccggtcccggctgtccctccccattcccagccgccccggagccccgccaggccccccacctgccctcggctccatggtgatgcagtcgctgtgcgacgcttcccggcgcaggttctggcgcgtagtgacgtcacccgctccgcgcctgcgcgatggtaggaggggcggaggctgagcgggcgaggcccaggcgcgcatgctcgggcgggtaaaatccgcgccggggacagtcagggatgctcccaggcccttcgctcttgctttcagctagtcattgtcgagcgccgcccgtgacaggcgttttgccaagccctggagttactgaagtgaacaagtccctggtctctcgggacccattgccggttgaaacacatcccgcctcctcttccagtcctagaggccgcctcctccggaaagccggccttgattgctcctcatgtaggacgcggttccctcctctgagatcctgcagactctcaggtgctcacacgtgggtgtgcagcggattcagccggcagctctttaaagcggcaggcagatggaaattcgaggccagcccagccccggcgactgcgctgcggacggccagaggccatcctttgagaaacacccgtggattcttaccctgacctctgcataccctgagaaagaacgaacgtggcagcctgcgtctgcttgtctatgtctttcatgtttgctaacctaagggtcgagaagcggctcgaggagaccaggctgcacagaccgtcacgtccattccctctctggccccagccccgcgggaagaaaacgagggcgttcagcctggcagttcattcacttattaggaagaagacatcccacacccccacccagcacacacacagatgtcagggaccagccactaggaaccactccctgagcgaatgaaggcatccccgtagccacgtgcctggtacatcacaagcactcaaaacgtggctgccacctttcgaaattgcatgcccaaaactttatgagatcctcacaacacacttgggaaacagacaaaagagtttgaatgcccgcctacttaacagatacagaaaatggtgt

SEQ ID NO: 63984 - DNA, 1664 bp, Homo sapiens
tgttattcctttgttggcttagttctgttttcactggattttgaaagtggctgttgtttggcagcttttcaccttctgctcattgtgaaagccaacttcagacgctgaggtgccctctaagaagacttccctgtcaggttcacggagaaattgatcacagggtgagccccatcaactcgtcattttctccctgtggtctggattttgacagaaacctttgactttctcctgatgcatttctaccttattgactcaggggaaaagtacagaacatatgagtattccgaatgtttccagagcgattatgctcgctggcgagtgatcccttcatgttgccaccacatggaacgccacctgttcccccgccacggcctctttggggaaaaccaggaaggggatgcagacacgatggacatttcaacacagcgaactcaatttcaagagaaaagggccaaggaccttccgcccctccacgtttgcctctttatgtttttgatccgtattggagaccatctggccacgtttctgttctctgctgcttgtgggttggttggcgttgactctggtcagaaggagaacagaaaaatcctcagggaaagtacaggatgtgacagaaaactgagctggtgaatcaggggtgggctggtccccattgtgtcaaagtgcaagagttctagaaggttgtgggcaggaaatggcattgctgagtcagtggggaggactttgctccatgactcatccccccacgacagacacaccttggggcacagacacagaggaaaccaagaaaagcttatagcggggttaatgggaaagcttactgagtattattgagtgggaaactctcccaaaccccagggcatttaagggaaaaagatatctagagatgcagccttacgtgggttccctagaagtagaccctgagacaaggttgcgtgtgaaaggaagttaccaggaaagttatctgcaaagacaggtggaagaggaactgagaggaaaaaaggcaggaagccaagccaaggtgaggcttcaagcaaagtcagctgaagatgcctttggctcagcctctagggaggaagtcacatcccagagccagccaatcagagccaacagttgcagtatttgtacccacaagatccccctgggggctgtaaactcccaggcactgctggctttgcgtactctcaggcagagtgccttctgagggcagcaccggacaaaacgccccagcactggccgccaggcagctggtgtccaaaccgggtcaggcaagagggcacaggggggtgttcggggccagctccctctggggtgtgagcattgcttcccagctacatgtgtggagacaaccattaatttagtttgatgtcagccatgtgggagtatttacaccatggaaattggcaagtgccataattcggggttttctttttgagagctcattgttaaacatttaccagcatggctggaacactgacaatgtttggtacagactcatgcaactgacatttcctgagcatttcctaggtgccaggcactgttctaagcatttttatacatgttagctcattcgatcctcaccatgacccaaaagaaagagtactgtttatcatctccatttacagatgaggagaccaaggcacagagaggctaatgatttaaag

SEQ ID NO: 63985 - DNA, 727 bp, Homo sapiens
caatatgcctgtgcctttggtacatttgtaagttaattagcaccatggattcctagaggtaaaactgccagatgaagaggtgcatgaattttaaattttgaaacatgatcgacttgttcccctcagagcctacccagttcacactttactcaaacacatctggaggaagtttacgctgcatcaacatgagagatggcatcatgggcaattgttgattcgggattgctggcttctacagcccgggcacgggatccctgccatttgcccacgaaatgccaagattgcagcatttgaccttttagacaatagccaaaaggcattttctctcaatcaataaaacacatgaacccaagtaaacaaggtcccccctcccatcgggaaagggagggtttggtgcatcccccaccagctcctcatggcggagagttctcagctgaacacacaggagcttcagagcgctttgctggtttggattactagaaaaatgacgtgagactgtaaataggccgtgcggctacaagagctggccacgtgatgcttttactggcttcacaagcaatgaatgtcgacatcaatttaattatttgctgcttccctgcctgccatcttcccgcagaggaagggctatcacagagtgtcctcacctgggctgcagccctccgagggccctaagtgttgcaagagatgctatcctcagacagagggtctgaatgctgaacttccagcc

SEQ ID NO: 63986 - DNA, 2295 bp, Homo sapiens
ggaaagctgggaaaaaaaagaatctcctttttgttgaggttgataatctgataacatgtaaacctcaggaggtcctggtgatcatcttgcctccacaagggaagccagcaaaaaggaaggaagctgagagatggagagaaaccttccaggaccatggtcaatgtgtacctggatacatccatgcctgaaggcctacttctgacattttcagttatgtggaaccatcagttgcgtttttgttaagccaatgtaagtgaggttcctgtgggtggcggtcaagagttctgcctgtgcataggtcatggagcaatgccgggccgggaactcacaggcgaggtgtcgggtagccgcgggcaggattcaggactcacttgcctgccatcctgcgcgctgggtgtgagtgccaacctgcagagcccgacgcaccccgcgcccggccccccggcagcagcgcctgaggctgctccagtggcctcatgatgatggtgacaacgccgcggggacggtggggaccggctcgcacgcatatggcttcttatggctgacgcgccctttcacacacacatcgtccgcaggccctgacgccctggctcccgcctttccctcctgccccaggaggaacccaacccgagctcaaccccagccccaacctcaaccgctcagaggagcccaacaacgcccgcgcgcccgcccgtcccgctgactagcccgcgcccagccaatcaaaattggccttctaggtatgtgaccttagctggcagctgattggtccctcacgagagacgcggggtcagcggctcagagcgcggctgtgtggggctgcggggctcccgccatgcccgctggggtaggtcctgcggaccccggccactggagccactcatcatttccgacggatgggccggaggggccgccggccgccccagccagggtctcggtagcctgcaaggagagaaagaggtgggagcagcccgcgcggggccctgcgtcttgcataggcgcttctggtaaaatcactcctttatctcagataatgagttggcgctggatcgctgcgtcctcaggtggggctcgaatcgtgacttttagagaaataggttttctttctttttttttttttttaacaacatggggtttaaagggcgcggaattggaagcagtcgtcacccggaggcctgggcgtgcaagcaccgaagctctggctggccctgagcctccccaccccacccgctcttttcgctggaacgcgtgtactttgggcagttgctgacgtggagacaggacgtatgtcttcatattttagtaaaacccaatgccctctgcctctctgattatgttctttaagttatcgccagttccaatttgtatttcttggaaacggttgggtcttccctcacttttcagtattttcatgtagactcaaatactctggattaatatttgtatttgcccaaaccatcacgagcacctcttaccctgatgggcaatacttcagtgtgctgcgttctggccacagagcaaacagggtgctcccaggcactgccctctcggatttcttgccttgttatttaatcattaagatcgtgacctatgagcaggactgtttccagccagcacatacacatgtcctctcctggccagcatccatgctgattagacggtgcccctgccatactagctgcctaatatttcagataccccaccccgtgtgtgtgtgtaaatcatgtcactgccctctttgtagctaatgacaaaattccaagagtcaccattagcctagcacattatgcctgtctcatttctgcccactttggagcactcggcttctctgctgttttcctccagagcacactgaaacactgccatagcacagcagggcatagaagacaggctcatgctcccctggacgctcaggccttcacctcgggcacactaggtcttgtcattccatgtcaagaatagctcttcactgccctcacccacccaagaatggctaaaattaaaaggactgacaatacctagtttgtcgaggatgtcacagctggaaccctcatacatggctcatgaaattgataaaaccacattggcaaactggtagtatttacaaaacctaaacatatgaatacctgatgaccaactaattcctcaactcacccaagagaaatgagagcttatgtgtaccagaagacatgaacaaaactacccacagcagctttcttcctgatggccccaaactggaaatgatccagatgtccatccataggaaaaaaagattttaaaaagaaagtatggcat

SEQ ID NO: 63987 - DNA, 561 bp, Homo sapiens
gatttgaggcctccccagccacatggaactgtgagtccatgcaacctctttcccttataaattacccagtcttgggtatgtctttatcagcagcgtgaaaatggactaatacagtgctgatccagaagttctcagccagcagagctcagggcagtaccgaattcctgtccctgatctttcacctcagttgtgaaaattatcaggatgtgtcaccatgtccagacctcctgggatgtcctcttcctggaatgcagctctcctggtgacctacctgctctctggcctttagtggagaggagctcccagctgatgcatgaatccacagacagccccaccctctgaacccctacacgtcgtgagagaaaagcagcgaggacactgcaggcctcaagatgaacgaagtgactgtgggagcaggtgacaagccccacaggagggcgcagccagtgcagcccctgcagaagaggagaggctgctctcactcgaggataggtggtacagcaccgtcagcagccccagcctctgccctacctgggacagtggcaccctcaccctgtcaac

SEQ ID NO: 63988 - DNA, 877 bp, Homo sapiens
caaaacaaaaattagctgggcatggtggtgcatgtttgtgatcccagctacctgggaggctgaggcagagaaatgcttgaacccgggaggtagaggatgaagtgagccgagatcacgccactgccctccagcctgggcaacagagcaagactctgtctcaaaaaataaataaataaataaataaatgaacagtgccaaaatgggctggcatttcacaacacatcaactaaaagggcaacgactaaccaaaacaagcccaggcagggccacggcaagagaggcagccagctcctgccccagcaccccagaaagtgaaggcttctttatattcctcaggcaaggaactgccagaggccgagggcgacacatcaaagaagggtcccacacccaccctgccaggccctgcaggctggagtgagtttggttttgtttcctatccggagaaggagcccttatttgtgatctgcctgccccaacatcagaagtacagacatggctttcagtgggaactcccttcacctgcccaaagaaacactattagaaaagatttaacccaccagctccaagctgcccctgccgccaccctcagcctgagtcactccacttccccacatgcaggggccagagaggccacagtagtataaaaataaccaacttactattgccaacaggacaatggaaatcttcagcttctcactgaccaaacatattataaataaccacctcatttccagttgccagtgtattccccctgccctccactgccacagcatcctatccctttagaaagagccttaaacacgcaagcctcacccacatcctaaagtcagtcatggcccaaaattatctgaagcattaaaagacaggcagaggttcc

SEQ ID NO: 63989 - DNA, 535 bp, Homo sapiens
ggctggagtgcaatggcatgcatgatcttggctcactgcaacctccacatcccaggttcaagcaattctctgtaggacagatcagtcagagtggtgggaaaatctacagggaaaggacgcaaaccttctgaaaggtgggaaggttctgcagagctggggggagaatagctgaaggcagctgttctataaccctgaggcagagggcatggggtaggtacaaggagtgtggaggaattcatcttaaacaggcttgtttacttatgttgaccaggaactgacctttgaacctcagcacatgatgttccctgaaaggggaacaataaatgttaattacctgcaggttgtgtttgccccaggttttccgcattgtgcctgcactgaataaaagcaagcagctccagcttctcagggctgctctctggccactaaagccaggaagtcacctagctgctcttaacactgcatacctgtgtctgagtactcatttcatccatcagccagggtctgtgggacagacccggcaattctcttgcct

SEQ ID NO: 63990 - DNA, 2906 bp, Homo sapiens
cagtgagggacgagtctgtgctacatgcagggagtgaaatactatgtagcattgtttacactacactgtctctaagagaatatatattgcattatatcctttagggaagaaggtacacacgactcagaggttttttaaaatgttaagagtggtttatttttgactgctggggtctctgatggtatttactttgttccttttgctgttctgcatcgcttggatgttttctaacctgtcctttttacctaaatatgagctgcttgaacatcaaagagctgtcaacctttaaacagagagagccttgaactccagattaaataaacatctcctcctgtgatctgttacatccaatattgctgaaggcaaaagtccagcccgcaccgctgtgatccatccgtctctctacgcccccaccatcaggagcccccgacactgggcttcccctactcccgtaattttttttgttgctgttgtttgagaccaagtcgcactctgtcgcctagggtggagtgcaatggcccagatgttggctcagtgcaacctccgcctcccgggttcaagccattcttctgcctcaccctcccgagtagctgggattacaggcgcccgctaccacgcccggctaatttttgtatttttgtaagtagagacggggttttaccatcttcaccaggctggtctcgaactcctgacctcaggtgacccgcccgcctcggcctccctaagtgctgagattacaggcgtgaaaccgcgcccggcctgctcccatttcttcaagttcacctcgtctctggtcagggccagcggggcaccctcggctcgccttcaagacaggggcagaggaggcggcccccaggcgtcagcttaggccccgcgcagacctcgagggatcccagccccagctcccggcacggcctcggccccgtggtgtcccgtgccccgcgtcagggcctcttcgatgcctccctgacgccctcaacccctccctaccccgtctgcctctcttggacccctcggaccctccctaaccgcctcaaatacctccctggccccctcaacgtggtgtcaccgcggccgctccccacccacacccaaaacaccacatcgccgggccccgcgcccaactggtggcccccggccggggccaccgcccccgccactcccagctccgaggcctccacctggcagggaccccccgcccctcccggccccgccacccccgcgcgctcaccctcacggcaacgcctcctccagatggtgtcggtgtggaggatgcgccggaacttcgtgcagacctgggccaagctgggtaggtccgtgcccggcagcgacgcgaagatctccaccagcagctcgggcggcagctccagcagcgagcagcgcgggggcggcggcgaggggcccgcgcacaagccgcccccgaccccggcgctagcctcgatgcgctcctcctcggggtctgtgtccggctcgctgtcggccgccgccgtctcggccgggccccggcgctgctggcggcgccgacatccgcgcgacgggcccacgccgcaaaggcgagcacacaccgccatgccgcccagtgacggccactgctgccgcctgtgcgcacgctccagcgcggccccgccccgccagcgccgagccacgcccccgccgcagagctcgccacgccccctggagagcctagccccgcccctacgtagagctccgccccggccgcgccaccccctccccgcggggcggcgacctcagagaccccgcactgctgccctcccctccagcgtgagggcgccgcccgtgacgggcatgagaaaagaaagtggtgatgccgagtgcaaaacgttagactgccccgtgtgaggctcgaactcacgaccttcagattatgagactgacgcgctgcctactgcgctaacgaggctgctcggcgaccacttcgcgccgcggcttttgtggagataggggtcgcccctcgcgcccgtgcgtcccgcttccggcgcccgaaactgtgccgcgccggccggtgagtagaaagatgcgccttacagcctccaaatacagaggcagcagccagaaccccaaagggcgcctagaagcccttttgtccattgaaacaacgcgcgttccatcgtctccgccttatggtaaccaaaaggcccgagctgcggagctctgcagggaccttcggggatcccgagctccctgcggaagccccggggagggcttggaggggcggcggccggcgcggcccaagagatccggggatgcgcgcccggtctggaaagggaggccctgccatgcggcgccgcccaaagggcgcctgttcctgcagctgctgggagccgcgcacgcctgctccagctgggctccgccgaggccgctgagcggggtcgtctcccaggtccgcgggtggtgaccgcgaaggcgtcctctcacctgagcagccgcgcacgtcgccgtgggctcgcctcggaccccatctcttggaggcccaggcgggagtatcaatcgaggccaggagctcgagaccggcctgggcaatacagcgagaccctgtctacaaaacaaaattttagaaagagaagctgagacgggaggatcgcttgatcccaggaggccgaggctgtagtgacccgtgatggtgccactgcacttcagcctgggcaacacagcgtgaccctgtctccaaaacaaacaaaaaacaaaaatagccacaaatggctgggcgcggtggctcacgtctgtaatcccagcactttgggaggcggagaagggtgcatcacctgaggtcaggagtttgagacccgcctgaccaacatggtgaaaccctgtctcttcaaacaaacaaacaaacaaaccacacaggccaggcgcagtggctcacgcctgtaattctagcactttgg

SEQ ID NO: 63991 - DNA, 2473 bp, Homo sapiens
tgaggtcagatcgagaccatcctggctaacacagtgaaaccccgtctctactaaaagtacaaaaaattagctgggcgtgttggcgggcgcctatagtcccagctactcaggaggctgaagcaggagaatggtgtgaacccgggaggcggagcttgcagtgagccgagatggcgccacatgcactgggcaatggtgcattccagcctgggcgacagagagaaaaaaaagaaagaaagaaagccacgttaactgtatcccaatgagttctcaacatccggatgtgaaaaaatgggatcttacccactgctcaaaagaactagtcacactaactggaaagaagggaaaatattcaaactttgaacaagaggattgcagtttaaaataagcgggctgatggagcctccacagttgcacacgttaacagtcccagaatggagcaaaagctataaacacagcagtcctacagaatttgtttagaattaaacaaacaggcaaacaaaaacatggtggaacctcagcccgttccacctggtgttacacactcatttaggaaacagctgcgggtcgcgtgactgatttgtcagtgctttaccacgcgttctactttgcagattcttgaagctgaacaggccagacttccctggggaggaagacactgaacatacagcctgctctagctacttattccctggattctccagggaagacattctgaagactgcagtctattcagtgtcaacccctaaatcctcctgaccaaatcctttctgagaatagctccctgcactcctcttgagcaatacttgtttgtttacttgctctcaagagcaaagcgatgacaccacgatggataggacactgggcctatagtggtgcagacgacaaagccggtggcctctctcttccaatcagaaagaggagaggagggagaggccgaggaggcctgaggcctggagcaaattctccgcgtgacttgccgtccatattgagtgtggcaaaaaataaccccgatgctttctgtaggtcaggttaatgttttgtgattcatttgacaggttcttacacacagctagacagcatgatttacagccacttacatcactcaagctgggccatcacattcaattcttagcagttacatcatttccccacggttatggtcatttcctggtttgaaaaaaggaatagggtgccactgctggactttgaagaatgaatgattatttggtagtttaaaggcaccatgaaattcctagagaaaacactgagtaaattaaaatgaaagatgtgttcttgcttttctactttacatggattattacagggaacattaacgtttatattacactatgcttatattaactagcttaaaataattcatgagtaatattaatttaccactctgaatattgttcactactatattaaatttctactaaactgcagtcttttgggtcacatgaaatgtttcataaatactcaagcacacttatgcttccaaaagttacatgaagttgtttcttatatttatttgtatatgaatgtacattattataatatatatacaatagatatatattatttaactaaatgtgttattcttacatgggaatgaaacctatgagccatctttaaaccccaatcattttggattcttttctgagagccatggaaggatatgtggctttagattcaagttggaattagaagttaggcgtagaagtgtcagctttgcaaatgtggacttcagtcctatatttcaaaaacacgcagagtaaccctggcccattactacacaactgtcgatgctacttcctctggcaatgaacccaaggcctggagtaatttggtaaagctttatggatgcccaagggtgggaaaatatgagactctgcttcccctcccccatctccatatgccagatatcgattttttcccttcttcttgcatttggaacagttgtccagcaagagaaagaaaaagcccatttcttacaaagcagcaactcagccaagaacgcactcaccagtcaatacttaatatcataaaaatccagaaaagaaagcaacacagactccactctttaagacttcaaaactgatactttgttgtttggcagaaggtaggtacataatatgcgcttaccggatttttttttctattttcacagaatacaaaccaacagactgtagccatcttctgaacgctgtcctagatcatgtgaaggcacagcttcagaggttaaaaatttcggaatctggaaaccagagagaatgtttaagtactcttctttattaattgtatgactatcagagatgtctgaggtaaagaactatgacaaaaaaatcagggacagaaagtgccacctgcacaaatgcaccgttatttcacaaaaagtggtacaattggctgggcgcggtggctcgtgcctgtaatcccagcactttgggaggccaaggcgtgtggatcacct

SEQ ID NO: 63992 - DNA, 3086 bp, Homo sapiens
gtctcaaactcctgggctcaagcgatcctcccagcctctgcctccctgagagctgggtttacaggcttggagccaccgccccccgctattttcatgttttgtatgattcaagcttacagtgtagagtgtattagcctaatccaattactttatccaattgggatagaagaaaggcttttacaaagtcaaaaggagaaatcctggaactatggggctctttcaaagtattagatgttaaagaacaaaaacagccaaatagccgggagcagtggctcacgcctgtaatcccaactcttaaggaggccgaggcgggagggttgcttgaggccaggagttcaagaccagcccgggcaacacagcgagatcccggctctactcccagcttctcgggaggctgaggcaggaggatcccttgagcccaggcgaccgaggccgccgcgagctatgatcgtgccactgcattccaggctgggcaacagagcaagaccctgtctcaaaaaaaccccaaagaatctagtgctgttcctacagagacacattggccacaggctgaggtgggcaatagcaaccaaatatcgcatggtggtttacgcactgcagcccatttggagtcctcaaatatgactgccctttcacagatgagtctgagactcaaaaactgtcactagcgtaaggttgtccagcgagtttagtggctgggaggctgaggggtagacagggcggctagcgatgtggggcaggcctggcagtcgccacagacgacctaacggtaggaaaatcttacagccaccaggagagttccaggcgccgcggcagggggactgggagaggggactgcgcccagaatgaaggctcgggacaaaagcagttgcgcaaacgcgccaaggctgggcgtcgagtgaccgcgggcggaggtcaccagcggccactccccggaagccacccacggaccacgcgcgcccctgcacgcagagggggccagggctccacgggcgagcggcgaccctgcctcccggagacggcgcggcctgccctgcgcgcctcagccccgggtgccggcgtctcgggcagcaccaccaagtctctctggaggggaaaggatggtcggatttgccccatgtcccttcctctgacccctccctcaagagtgccccgggacaccccgcctgtggctcagcctcccccgccccgcgctgccatctcctcagggccgggcagcaggctcccgagcgcccacagacccggggtgcggcccagcccacaaccgtcacctcaggggcctcaggcgcccagcggtgctgggcggggctggggcacgaccgggagcatgcgcagagcgcgcgtttcgcccatcgcgcacgcgcacacacctgctccgcccccacgctgcgtgccgctgctgggttccgccacgcccgtcatggcggcggccccggccggctctggccccgcccctcggtgacgcgtcgcgagtcacctgaccaggctgcgggctgaggagatacaagggaagtggctatcgccagagtcggattcgccgccgcagcagccgccgcccccgggagccgccgggaccctcgcgtcgtcgccgccgccgccgcccagatccctgcaccatgccgtcggagaagaccttcaagcagcgccgcaccttcggtgagtgtcgccgcgagggcggcgggtgcggcggggccggggtccgagctgtggagggcggcagggcctgggacgccgtgaggggtcggggccgagccgggaggccgagcggggccggtggctgccggccggcggggccgagggatgcggggcccggggccccgtgagggacccaggccgggaccgagccgggagggccaggggctggtctgggccggggcggcctgcggacctctcggaggcctgggaggaggcagccggcggagggcgggcgggggccggtgcgctcggggccccgggcctgctgaatcaccccgcgccctccgcggcggggtgcctgccgtaccccggccaccgccgcccccgcaagcgcgctgcgggcgagggtcgcgcttctggggcccaacagcccccggggccgcgctgggccgttcggctctgaagcggggctgcgccgggacccagcgcgtcaccttcagggctggttttcccgtcgagggagcccgcccgggtgcgagtgcctcttacagacctcagtgcctcggtcgagaggaggggaatgtgctgggccccggcctcgccgcgcccgggacggcccacagcggtgttgccagttcctgtctgtagcccaggagctggggtgggagacttctcttgggtttgcgattacgttctcaccttggcaccaggaataccgaatacatcccttttctgccggttcagactggaaacccagcttaggtgtgctggcatttggttaaacgtgcaggtgtcaccatcacaatatttactccacgcagatgatgcgaagtgattatttcccgcttgagcaagagaacgccgcagatccaggtatctgttgttgcctaagttccagacaccggtttggaagggaagcaccgtgttcatcgcggtggactgcgaatgcctgccgccatcctcgtcaggagcccacacagtggtgctgtttgtctgcttttgcctagtttcccggagtctagaaagagtttagcattcatttgagtttggatatagttttgcaggtctcattgaccattattttttttcttatgcctgagaaacttaagcaaattaaaatggaccttagcttgccaagcatatcttttcagacagcctcttgaggcagtccgttggttagcaagacttacacgtgccttttttgttagtagttttcttgttagtcaccttaatgaactctttactgtagtgtctaggcttattgagccctgagagcagcattaaagacagattttcttttcttttttattttgagacagggtctcactctgtcacctgggctggagtgcagtggtgcaatcacagcccactgcagcctcgacctcccgggctaaagcgatccagcggcccccctcagacctggcttctgttttcaccaatgaaaagttaac

SEQ ID NO: 63993 - DNA, 1714 bp, Homo sapiens
gggcgtggtggccggcacctgtagccccagcagctactccggaggctgaggcaagagaatggcgtgaacccgggaggcggaggttgcagtgagctgtgattgcgccactgcactccagcctgggcgacagagcaagactctgtctccaaaaaaaaaaaaaaaaaaaaaaaaaaaaaatttagattttaggtgaattcttgtcttcttagaattcatgttctaattggttgggatagattttgttttggagtttggtctttagctctcttcagctgtaacaacgctgcatggcaaacacaaaccccaggggcacacaatggaaaacattcatttaaaataatttttaaaaactcagttttaatcgataatatggtaaatacctatagatgtgacccacataaacatggattctttggaatctctaatttttaagagtgcaaaggggtcctaagaccaaaaagattgaaaactactggtatataaacaagtttaatgaaagtatacctccttcactgtctcacaaaaagaaaactttaaaaaattataattcctcaaagtccaaagttacagaacttactttgttgagagtattagtaaaagcagtttccatctcagcttgtacactacaacagcttccctaagtttcagtaaatcatcaacacagggactggagcgctggagagtgcaccgcagttctcagccacacccacgaggggcagggggctcagaagccacacacagtgacctggagctgcagccaggcactgggtacggggtttactaggctacaatctctactcctgaactggaaaatgttcacaataaataggtcaggaaaaaaaggaatgatttcactggttaatgtgtactcataggcactgcccacacaacggtgtgttttccactttcagtacagtcccacctttcttttcctctgctattttcttcagccagccacagggttaagagcattagctctggctttgaatcccagctgacctcaggaaaatttcttatctgtgactcagttctcccatctgtaaaatggggtaaaaatcaccacatgggatcagttagaattaaataggtataatcagccctcaaagggctgttatgaagatgatgtaagtcagtatctgtcatgtaagttagtcatgtgcttggactgttgttcaagtatataaaagcttccctaaccttttacatactaagaaattttttaaatgtctgaccactctataaattaaactgtatcactgtaagacttctgaagaagcagagaaaaaccaaaacagaagtaggatacagaaaagacagagagaaaactttatagtaataaaactatacaacttactgtgactttagactttctgaagggcaataacctgcacccaacagaatattaaaaggattcacatgaaaagtgactaagaaaaccaagttaactcacttgccaatttccggacaacagaaaccgcgaccctctatgactaatgaatggagaatgctgcaggtaattaagagcgtctgctcgctgcggtattttaagcactgtggggtttgagaatgaccactcgtggcctcagagccgacccgccagcctacgcaggctttgccacagctcacatgagagtcagctcaccctctgtctctctgggcaccaaagcatgcagacgagacaatgacagatactcgctactttgaaattatacag

SEQ ID NO: 63994 - DNA, 1039 bp, Homo sapiens
tttcacagccaaaacacatttataacttataggatttagaagaataaaaatggccaatgctgtaacttctttacagtctcaatgtatttcaaaatttcggaggatatgagaggcgtaagattttaaagttcatcaaaagagctgataagcaatgctgcattcacagtatgggaaagtacatggcacaagcagcctggaaaatggcctgacctctccagcctccacttgttctttcatctcatacctggacggtaggtggcagttgaccaaaacatcccctaagttcactcacaagcacagatcccagcactcgctctgcagagggctggccaggtaggcgtggcctcgacctcagacaggatgaaagtggaggcggaagctggagttgggaggaaagggtggagactgctgccactccggcaggaccagcacctgctgtattccacagacagcaagccacaggggccacacccaagtccatagcgagatcctctgatcccagctctgtcaatgcccctgccccccagcaagaagccctcctgggctgttcatgcagggagagggactaacagatcccacgcggctcaacagatgccttccaagaaaagcaacttgtcacagggctacataattgggaagtttatgtaactcgagaaaataaggccgggcgcagcagctcatggctataatcccagcactttgggaggctgaggcaggaggactgcttgaaactatgagtttgttactggcctgggtaacagcgagaccctgtctctatttaaatttctaaaaaagtaaaaaaaaaaaaaaaagtcctagccatgcagcaactcctccagaaagtcaattctttggataacttaataacatgttatcaagaaaataaaattttttgaatttcttatatttgtaatttaaattgggtgatttccttccgatttaacaaagtctctttcattattctatggttagagaacccagaaatgaactcctttcccactaaacaagataatagaaccgatacaagtacgatacaaat

SEQ ID NO: 63995 - DNA, 2593 bp, Homo sapiens
ccagctactcgggaggctgaggcagggggatcgcttcaacgcgggaggtggaggttgcagtgagctgagattacaccatattgcactccatcccgggtgacagagcaagactccgtctcaggagaaaaaaaaacaaacagagtctcttctgtcactcaggctggaatgcagtggcacaatcataactcaccgcagcctcgacctcctgggctcaagtgatccttccacctgagcctcctgagtaactgggaccacaggtgcacaccagcacgcacagctgagagtgagctgccttgacaaccagcatcagcagttccaactttgctggtagtggcaaaccttcctgccccaaaaagaaacacgtgtgatcagtgcgttctcgcacacacacaccgcctgcccaccctaaaacactccaaagagacacaaaggaaagccagcctcccaactctcagcctgctaggggaggaaggggagaggagggctgagcaggggaaaacacagccttggagagaaggagagcagtactgattagtgcttctcggcctcgacagcacactggaacaccaaggccctgagaaaaccacatcccacactccccaccaaaatcagagtttctggaaacggggcttcttttgttttgtgcctgaagcttctctggtgattctaatttgcagctaggctaagaaccaaccacgaccccaagtccaggttttatactgcacccatcatccggtccaatcccggcaaggacaaagaggagacccagagaaaacaggaagtcttttccccacgcagacaggaagagctaaaggctgtaggtccgtctgccacaaccacaactggaaggggaaagcccgtgagccaccctagcaaaacacacactgcatctgacatcaagacaggaaggaaaactctttagaatggcaactgctggaaaagaaagacctgttttcctccgtatattttcccaaggaatttcttcttagttttccacatgttcactttttccaaccaagcctttatcgtaactttgttcctttgtttacattgaaagctgtcttcacttgtgtttcccagaaatgctgttttggggttatttttggtgaagttagtttgctccacgtgacctatgttccactcaagtgctctctgactcaggctcacccgcaggactcgtcatctggcctgatgtgcacgagagggaagactgaccggctccaaaggctgccttctgctactgctaggaaggcaacgataagctgctctcttcctctccacagccagcctcttcccacaacccacaaaaaccctctgcctggcccctgcaacctggcatccagtcctcccccagctcttcactccatgcactgctgccctgggcacagcagtcacatctgcctggggccttcgccctggctgtcccctctgcctggaagcgcccctgtgccttcccatctatactcaaacgtccttcttagcaagacttctcgatgctcagcaaggcagctgtgtttctggtttgctttgttcactgctgttcctttgcacttcgaactgggcctggcatgaagcaggccgttaataaggatctgtaaaatacatcatgatatcaccaaattttaatgaaattcagaatcaaacggaaagcacttctatttcaaacaaaaacttctgcaatctacattatgtaacagacaatcagattgttccaccacatctacaaagcgctaacccaggaatgaaatatgactctgaagcaagctactggtagtcacggggcacacccgcccctggggctcttccaggaaagctgactgaggttccacagtggccacacatctaggggcacctggacttgggcagcccgcctctggctcttatgcaatcacccttcttactgttacagtttaaagagaggaggcctctgcttccaaactttaatgtgcaaaatgcctccggatctggctgaaacgcaggtttgattcatgaggtccggggtgggcctgagaatcttgcatttctaaccagctcccacatgataatgctgctgcatgaatatttcaaggtaaatcttcaccatgatcaaaacagtcaaaggctcaacagcctcctcttatttttttattaaaaaaaaataaacagagccagggtctcaccatgttacccaggctgatctcaaactcctgggctcaagccatcctcccgccttagctgggattacaggcgtgagccaccgagcccggtctccgcaacgtccctttagatgggatggaaaagggaatccccgcactgcgcaattagaccagagggaatcaaaggcccttccaggcaagggtgaggagctacgcctgcagaagagctgacgctggctgcaggttgtgacccccgctaactaccccccgcctcaggtatttacgcttttttttaaaaaaaggtttgtccttagttcatgccgcctgacagaaaaaaacccagcaccacacaggctactttacagctctgtgcttacaacccactttaatgttcacggacctgaccataacttttagaagagaattaatttctaaaaatctatttcctgaaagctctt

SEQ ID NO: 63996 - DNA, 1216 bp, Homo sapiens
gaagagggtaagaaacatgttttttacacgtgaaataaaagttatcaacacccagggaaaggagaaccttgcctgacccttaaaacgtcctgggtgcccttccgtgccatctgtgggagaagggactttccatgcagcagcctctggcacttttccatttcctacctctggttacattaccgatttaaaacctttcttcactgaagagattgctgaatactcttccgaaaaaattgtttttgtcaaagaggttcgaggcaaaaggcaggtcacaggacgctgaggaataactgaaggtgaggaactagagacagcaggagtgacttcacgaagcatggctgtgttacagcatgaagaacagcatgtatgtaagatcctacgtgtatctaagcgtgtatatggtgtcttgaaagaacatgtgaacatatatgtgcacaaacatgtctggaaagacacacaccaacctattcgcgggtaccagcgccagccagcgggatggaaggccttttctgctagctgctcagggaggcctcagtggtgaagcgactaagagaagaggggctggtagagacgagcggtgttaaagccggggttttgttggctggtagaggtgagtggtgttaaaggtggggttttgttgaaaacacaaatcagagaaccattatggttctctgtttatgggtcaggtgggcaaatactagaggtcaaagattggattgaaggagggagatagaaatcacaaagttcaaacgctgacctacaagtgaccctgaggaaacagaggggtgtgaccaaaccggcggtgagggaccagccttacacagaaaggaaacacaagagaaactaaggaggtgtccaggcccagataagacatttcaagggcgaatgatttttctgtgagcctgcaaagcacccgccccactggcaagctgcgtagtgaatggcgggcggggtccacagtgcccctctctaagggtgaacggctgggtccagggctttgtggccggcatgtgaagacctgtcctgcttaatcatgccctgatcagacatgacacacggctgctagaagagcaattatttgaaagatactctgtcttgcttctgtcttctcactttaagtagcttcaggtcttttaacccagaacaaaacagaaactgctaagaattaacctattttgttagttctggatgatctctttttacctttgacaggaaa

SEQ ID NO: 63997 - DNA, 824 bp, Homo sapiens
catctccccccgcgccgcagggtctgtcactgcgggccgccccccgacggagccgccccggccatgccgtcgccgccgcccgcgcctccgcccaggccggccgttaccccgggccgcgggcgcggcgtcgccgcctggggagcgctgggggccgcggccgcgaaacggacgctggagggggagggacgcgcggcgggaggcgcggagggatccggccgggacttgccggccttgctgctcccgcgcggcggacggatccgggcccgagcgcggcggcggcggcgacggcgacggcgacggcgacggcgacggcggaggaggcgccggccgaggagcggagggatcgtcgcgctcgcggctgacgggcggccgggatcagcagaagtgggcggggtggccgcctctcgcgacagcccgggcctgccgggcccgtcccccccccactgattggctcaggcggcccgttctcggcccgtgattgtgccgggtccccaatcccattcgcccgttccgcggccacgcctccctgggggctgtcgatcatgttggggccaccgcctcccgtccctcggcggccgtcaagacgcgattggtccgcggaatcggagaggcggaaaacccgggctggatttctggttgcttttgttcccgcaaatttgcgtggagcattgtttttcggcgaaaacggggcgttcggccttcctgctttatttttgagcggtgtaagagggaggtagtgggtatcttcgagaaacggccgccgcggggtccggagccccgggttccaatcccgggtcggccactgcaaagctgtgtgaccttgg

SEQ ID NO: 63998 - DNA, 660 bp, Homo sapiens
accactcaaagaaatcatctagaacaacgtccgcaagactggcggtgcaactgtcccccttggaacctctcgggaacacagcctctgtctcctcaccgcagagcagctgcgtcagactcccagacggcggggcctagggatctgtgttttggttttgggatctgtgcaaatccacatgactcaataatccaaacatacagagagcctgggaacccttaccccgctctggcgccctatgtgtccgctttcattggcttcttgtatttccggcttgttttctttagggaggcagcaaatacaagatacggtccacttttatctttccccgctcagaaaataaagataccacagcccaggcttccgcaccttgcttttctcactaaatactattttccaaagctgtcaccaaattcgccgcttctttatttttttttcttttacggcggcacagcatgggttccctcctgtgggtcggtgtgccaaggaatctgcttgcgtaaccagaccttttccctaggagcagttgcccagacgcagcccctaggatgaggatgtgtttgcagcgactattcagggagtactccctggggacacaggttgggggtgggaagctggactggaaaaggaaggaagctgggcagggtgctatgtgggcacagt

SEQ ID NO: 63999 - DNA, 1466 bp, Homo sapiens
cacgtaaagatgctcatcatagtgttattcacaatagaaaatattggaagcaacttacacgtccaacaagaggagatggtagaataaatgattccgttttctctagatggaatattgtgggatcatcaaaagagatggtttaaaaaaggagacagcgatggttagaaatgttaaaatgtgcctatcctggaaccccacaatttcacttcccagaatttatcccaaagacaggcacaagggcaagcatgaagaaacaagagtaacggggtttcacaattattgcgaaaagtcggaaaccactcacggtcactccgtagaggctgggtgacatgaaccgatgaacttgcacagaacggaatgcagtgacagggctagattagaaacagacgggcaagttcaaggacctagtgaaggggcgggttatcaaggtgtgttgaggagggggtgaaaggaggttgtcgaaggataggaagcagcacaggactggaaagagggaagctgggaccacccgtaggcccaaacagaaatgaggctttcagaagagaaggaggctcccgcccatcgccagcgtccaggaggagacagtgggtaggcacaccccgctctcctcccacgctctgctctgtcccagtctcctgttgggcaaatccaactgaaaggcagagagtccgtggggtggggtaggtcagcgcccaaagcatggggcaggtggaaaagagaggagattggatgaggcggggctagcaggagaggcctcacataggggcaagccagaaagacagcgccacatctgaaaagatgcccgtgtgtgtccacaaattctaaaggtgacatattttagtatcctcgctgtcctaatctcagtggaagtgtacgagtataaaatgaaataaaaacattatatgcgtagatgtatagtgtgaatatatatcagtgtatgcttatacttgtgcatacccatgcatatgatgtaaaaatatatatagcggcaagcagatctgtaggtatgatcttaaatttggaaatcaatcaatcaatacatttatgtggagagttttgaaaatcacgatctggcaatccacgcaccacggggctcgcggtgatgattcctgggtcatgagacgatggcggcttcctgccctccctcctctcgttacactttcgatcttctgaatattttgcaatgagtatgtacggctctcacaatgagagaaacagctatttagcaataaataaataaataaaataaataaataatgttgcaaggacaagcagcgtttacgagaatgacagcgtaacgtgcactggtgcctaatggaacaacatgaggtgggaaacgcagtccggtgcccgctgtgagtgtctgtttggtgtgatgatgagtgaggatgtgtgtgaggggaagcagccccacctgggatggatcagaggagttggacttcgatggggtggaggccacgtggggg

SEQ ID NO: 64000 - DNA, 1455 bp, Homo sapiens
aagggtgtgagatgtgcaggccctggtgagagacaggcagcagcaagagcctgccagccatacttacccacaaggccggctgaggggctgtgctggcccagggctctggctttcggacccagacaatgctgctgaccaagcaggccaggcgctgagtgactgtcccagcggatctccgagcagggtcccttgagcattaggaatgcagcttctcaggccatgccagcctggcagaacaggaagggaggggtacagccctgtggggacgcagctgtggctcgagtgacacctgctggcggcctcatctcatccgctctctgcgagtctgtggtggttctagtcggcgtttcacgggcaaggtttagggggtttgttcctcagctggggtccacccacgtcttccgacttcctctctcagtgtttgggccatcggtgggtgaggtggctgcagcagagccgggggctcctgtgtgcggaggcagcaccgacatccactgcagccacaccctcctgagagggtctggaaggaagcagggcaccctgcgaacccaccttcctctggggtgtcttccggggccccagggccagggcaactggagcagacaggacattatctagctctgggggccgtgctgaccgagccagaccctcgcggcggcccacagagatgggcagcttgcggggcagctttgtccccccgacactgggtcctgtcttcatgcacacaagccgcctgttctgcaggtgaccagttaggttcgatgggacaggctttgggaatcagcggcttgggtttgccccccacagccttggatcttgaccttgggagaggcctccaccacgtgccctggggtggggtgggggcgggggcgtcctgcatctgcgccgttcagctcagttgccctcagccgcggttggccgccaagcactagggtgttgctggcacagccaaggaactgagcccagactttttgtttacttaatcaagcataaatgcaaagggctgggggtggccgagctgatggtgcaggcgtgtgcgctcaatagctccgtcacagtggctgtcgctttattgagcaaccgagggagcgagggagaggagcaactgcggcgagcgtggaggcccagcccgcagagctcccgtctgggggaagccctgtccctcactgcctgttcccggcgctttggtgccctctgctgtggggtgatgaggtcaggctacgcaggcagtcacggcagaactgaaggccgtgtgctttcgtgtagccaaaccccttttcttactgatatcagttataaaatcagagctatgttcccaccaggggcaaaaatccaacaccgtgcagttgcaaacacggggcaggaaagactccggcgaccctcattacactgtgccgggaggcatggccagagctccgtcagttcatgcgtcgcttaaacctagaggtgggtgcg

SEQ ID NO: 64001 - DNA, 1957 bp, Homo sapiens
cctgtcaaatgggaataccagtgctacggaactgacctgctcgtgaggagtaaagcccagggagctgtgcctggcgcacggcaggccataaaactggccccggttagggaatccatgagcagcagccgcagaacactcaaccccaaggtcaggacggatcctcctgcagaccccgggctgaggaccagagggaaggagacaaccgtgatggccgccatcagctgctacgggataccccgtggctccagtgccttcttcacttaaccatctgctgctcactgctcagggctgctgtgatgattatttgccctcttttgaaagaaaagtaaggttcagaaaagttaagagtcttactcccagaccacacatcatgcagaggcagcccccggctcaacctcaggtcttcctgtgccaaacccctccctcttctcaccacccagcctcccttcagagggagggtggagggagaagggaggagggggaggaaacgcagaaaaacgcccgtgacaccacactaagaaaagcaagcacgttaaagggggcagctccgagaagcggacagacacacgtggagactcaggagggggcgggccccgtctgggctgcccggacgcggcgccggggcagttcctacggcctccagctctcccgcagggccggcgcggctcccacggccgacccgtaaccccggggggcgcagggagtcggccgaggctgcacggccgcgacgtcgggccgctaagcccggtctgacccgctcacctcctccttccgcgagcgcttagacaccttcttctccatcttggcggccgtcttctccgcgccgcggcccttcttctccttcttgcccttcttgcccatcttgccgggtcccaagccgcgacgggacaccaggaaagaaaacggcccgcgctctccgctcggaaacaggtgctcgtggggcggagctcggcgcacagaaatggagtcacttccggccccgagttcgagccgcttccgggtagaggtgcggctgggccctttacgaggttcggtcttggagctccgtcttcggcagcgggctcgggggcctcggactctgcataaggccccggaaaagatgaccggccccgggctgggcgcggtggctcatgcctgtaaccctggagctttgggaggccttggcgggcggatcgcttgagtccaggagttcgagatcagcctgggcaacaaagcgagacaccaccccccacccccagtcgctacagaagaaaaaaaaaaaaattaaccgggcgtggtgtctcgcgcccagtggtcctagctcctcgggaaggtgaggcgggaagatcgcttgagtcaaggagttccaggcagcaatgcgcccctgcaccccaacctgggcgacagagcgagatcctgtttcaaaaaacaaaaaagatggcagccccggcctgacataccccggccatgctcgccaattctcacgccctgtgcccccacctagcctgtccccgtgtcctaggagacgtgccctctgagttttattttttatttctatttttttgaggcagggtcttgctctgtcgcccaggctggagtgcggtagcgcgatctcggctcgctgtaacctccgcctctggagtagctgggaccacaggagcccaccacgcccggctcattttctcttgagttttccggggtgcacgtgccccccgttaaggcacattgcttcgccctgggtagaactaagtgggcgactcttgggctagccccattttttcccctcagaccaaacaaatgagtgcttttttcccagaaaaaaaatttcacacagttataagattttgcagatcctgagtaagacagtccctgccgggcgcggtggctcacgcctgtaatcccagcactttgggaggccgaggtgagtggatcacgaggtcaggagttcgagaccagcctagccaacatggtgaaaccc

SEQ ID NO: 64002 - DNA, 2240 bp, Homo sapiens
gagatcgcgccactgcactccagcctgggcgacagagcggactccgtctcaaaaaaaaaaaaaaaaaaaaagtcatggacatttatccgcaaacgtctgctatcagggatatgtaaactctaacagccatgagaagccattggacgggtgttgctgtggccaaaatccagagcatggacagcaccacacgccggccaggaggtggcgcatcttttcatgtcagtcatgatttatccaaaaacagcacctcccgtgatgccagtgctgcgcagaggttgggatacagcgggtgggtgcctagaagccaactcccgccttccaggaagtatggttaggggacatactcacccggacaccgacgtgaacctgcagcctcccccggggagcacgcatgggtcccagttgccttacagtctgatcacggatgctgttgcctaggcaacgtgagggtggccctggctccttgatcttcctggtggctctgggggaccatgacggagatgcggataattcaggtcagggcagcagccggccggcagggggcgacaagcacactgctcatgaacggttggctctgcccacgtgcacacggcgtttccacattaacattcatttaataataataaaagaataagcaacgagagagaaagccagagatctacatgactagacttgctgcatttctaaattaccaggtacgacgtgagccgagcatctgcccccttgccctgaccaggtccccatttctgactctccactcccagccctggacaggaggagtcaagggtcagaaatggtccgggtctgccaatacattccttggtaatagtatgttaaaagtagcaagtggcaatctgttctctctctttctttctttctctttctttctttctttctttctttctttctctttctttctttctttctttctttctttctttctttctttctttctttctttctctctctctctctctctctttctttctttcttcttcctctgtctctctctttctctctccctctcgctctccctctcgctctctctctctttcggaacagggtctcgctctgtctccccggctggagtgctgtggtgccatctcggctcagtgcagcctctgtctcctgggctcaagcaatcctcccgcctcagcgtcccaagtacctgggaccacaggcgtgtaccactacgcccggctaattttgtaatattttgtacagagatggggtctcattatgctgctcaggctggtgacaaactcctgggctcaagcgacccacccacctcggccccccaaagtggtgggatcacagacgtgagccagcgctccctgtcagcgtttcattccctcttcatatcacatcacttgggtctgtggtccaggtgcgctgggggcagcgcaggccgggttcaggagagctcggctcagcagcagccgatggagctttcctgggggctcctacctggccgccagctccagaagccaagccaggggctcttcgagacatggtcccaccagaggagagaccgagcctcggagaaatgaacgtcctaggccatgggactcggacccctcaccccacccgccacacctgccaacttcccggcctgcagggtggcaggaagcctgaggcattattcagcttccttagggcccgttggctgatgcaacacagctcagaagttgagtccaagcaccaagcccgcaatgtctgcgtcggccgccaggggtcactcctcccgcgcagaaggcggccttggagcctcgcaaccgcagtatgcgaaggttgcatcaccctcgcggggtctaagaggaaggatggggaccagcccgcaggcgggcctgagcctcctggcaaagccctttgtcaacgtcaacagaagcatctggcgtcctttctggtcgcggacgtcagagctggctgctccggcactcagccgggtggttggtccccaggcagccgctggggccctgccaccaggtctcacctggccgagagggagtcaggatgccctctgaagcaatgtcccgaaatcccaaattcacccctacccccaggtcaataatgtacaagaagctacattcctttttttttttttttttttgagagggagtctcactcttgttgcccaggctggaatgcaatgccacgacctcggctcaccgcaacctctgcttcccaagttcaagcaattctcctgcctcagcctcccaagtagctgggattacaggcat

SEQ ID NO: 64003 - DNA, 608 bp, Homo sapiens
atcacaaagagataaatgcaggggcttcgggtgccatccaccgagcgcgtcccgaggagctgctggtgcagcttgcctctgtatcttatcagtaggtgcatttctggacgtgctttgagtcagtttacactagttatgccttaagggagggagatgaaaggggactgcaggtgaagaaactaaaatggagtctgtccggctctctctctgctaggagagagtaggctatcaccgctgagccacaggggacggcaagttgtccatttttcctgctcaggggccgctgacctcacagcagccggaatgtgggtggtggcattccaagggcaatccacatttcaccgtgattagaaaacgaggccaacacggctcaggctctgagcatggcttctctgcactggtgactgcaagaatatccctcatgcctttgaagggccatggagaagttggcatagctctcctggagttcccgaatctctcgcccaaagtaacttggcccttcgaggcagaattggagaaacagaacatcctcacacccaagtcccattttctctgtggtgacctgcaaaccacactgcaccttctggctgcgacaccctcagatttca

SEQ ID NO: 64004 - DNA, 3313 bp, Homo sapiens
cacttgaggttaggagtttgagaccagcctgcccaacatggtgaatccctgtcttgactaaaaatacaaaaattagccgggcatgttagcatgcacctgtaatcccagatactcgggaggctgaggcaccagaatcgctagagcctgggaggtggaggtgtcagtgagccaagatcacgccactgcactccagcatgggtgacagaatgagacttcaattcaaacaaaaccaaaaccaaaacaaacaaacgaagaataaatcaaacaaagaatttgcaagacctctacactgaaaactacaaaatattgttgagagaaatgtaaggagaccaaaaaataatggcagggctcttttagtaactgagacaagactaaatattagaaagatgtcagttctcctcaaactgacctacagattcaacaccaatttttttttcttttccttttttttttttttttttttttttttgagacagggtctcactctgttgcccaggctggagtccagtggcttgatctcacctcactgcaacctccgcctctcgggttcaagcgattctcctgcctcagcttcctgagtagctgggattacaggcgtgagccaccacacctggctaattttgtatttttagtagagacagggtttcgccatgttggtcaggctggtcttgaattcctgacctcaggtaatccacctgccttggcctcccaaagcactgggattacagaaatgagccctggagcctggctgctttgggtgttctcgagactctacactctcctcccgtacaccacagcaaacagctcggaccccctgacagctcctggccttccccagctgagtggaaggcttctccagggcttacttcagttcttcgtggattttgcccagtcgcccggaggctgcagttccaccaggcaaagccaaacatgcttgtttgttctattaagaaatggctggttaatctttggacctaagtgcaatgttggacgtggctgacgttcattgcttgaggaggtatgtgttattgaaatgacccagaaggctgcatttggcagtttcccttacttctgacccaagcctcatgcagggctgtgtgggtgctgcctgcagccttttgcaaaagatggaaaaatggcaggaggcacgaaagaccaccaggaaagccgagcgagctcctcaggcttgttccatcaggtctgggaagtcagtaagccatgggaatgagatcccagcaattcttgggtccttccagctgtttcattccttgggaattaacacataggaccctgagggttctaacgcacaagggcagggaagggggccaggccatgcccgcgagcttgccaggtcattgtcctgggtcacggggtggaggaacctgctctgtgcacgcaaggcacgagctgacttgcagggccgctgagtcacgggagagtcaggagtcagtccagtgtagactgcgtgctagagtggtttaacaaggatgccaagtgcattgttcaaaacatggctcccctgtctgccgtgagtcgtcttgaggcggggctcctgtaataaccttcccccaaggcctctcctctgcagcaccccgctggacacctgaggtcctctccctgtacaaagaaaacccaaacccactgcttctctttggccattagcttttggcctcttcaagctgctctttggggtcttcacggtctctggtgggattctctctgcgaattaggtttgcattaagttttctatctttattacgcagagaagactggcttcacgggctttccccctacttggctagcagacacatcttttcagccctaggcaaaagaatcccgtgctcgaattatccagagataatgtacgtttgctgtaattaacaacccaccagagccctggggcgctccctacagacatgggtctggtgtggcaaatgtgcaagggaactggctctgcccggccctcccaggcagctctcccatttgtctcagtatcatcgccttcccagctccctggggctccccctcccagagaggagcagcccaggcctgactgccaagacacagggcatcatttacccactatggttagaaagcttgcccaagcaatggcaccaagccaataaatattattctctgctatcaacagccaaggccacactctgatttgttagtggtgggttaaataaacaagacttctggctgggcgcggtggctcatgcctgtgatcccagcactttgggagtggatcacaaggccaggagatcgagaccatcctggctaacacagtgaaaccccatctctactaaaaaaaaatacaaaaaattagccgctcgtggtggcatgccactctgtagacccagctactcgggaggctgaagcaggagaatagtttgaacccaagaggcggaggctacggtgagccaagatcgccccactgcactccagcctcggcgacagagtgagacaccaactcaataaataaaaaataaaataaacaagacttccagaccacgggtggagaagatccagccagggagctgggcacaactccccgtttcactgtgcggtttcatttcagttggaaagaacttcatctgttgaagtgcacagacagcattcagaggctagagacgccggcatcggcacagcacacagtgccctctgttcccctggcccaggccaagagctctttgtgtgtctgagtgactggtcagcactgggcaacaaacccacgccgggagacggacagcgagccgcctcaacccaccagcctctggggagcctctcatctcgcaagcacctgcggaggcccgcccggcgccagaccagtccaggcacccagaggcctctgctctcctggagctcatgacaagtaaacaaatacacaagatggtttgggatcccgatgaataagttaagcagggcaacccaacagggaggacagggctcccgcatgtgacggacccaggagggagcgaccccccgtgttgacatggggggaaaggcgggaagtcagagaggccgggaggtcagagaggccaggaggtcagagaggccaggccccttcacacggggtgggcgggggggggggggatttgctccctctggaggccaaagaggagggtcctttccacctcttccagcttctgggggcggctggcttcctgggcttgtggcgtgtctgtcactccagtctctgcctctgccttcacgtggcctcagtgcatgtcctcacatggccttcttataaagatacctgtcatcgcatttaggacccaccctaatccagcacgacctcatcttaactaat

SEQ ID NO: 64005 - DNA, 6908 bp, Homo sapiens
gaagagagaggcggctggctgagccctggggcccacgagcagggctgtggacggccgtggtggccaccggggactgtccagcctggctgggcccagctgagcaccagggaattttgttttaaaggagaaacctcatctgagcaacatgcaaggtcttgaaggaggaaaggagggaaggagggaggagaggaggagggaagaggcggggaggagggaaggagggaggagaggagggaaggagggaggagaggaggaaatggagaccacatttgggttaaggacaggtgaagaacacagtgtacatacacagctgggctctgctggactgtggctctgtgtgcgagggccacaacctgacctaacccagtggtcaccaagaaaacagtttctgtaacccccggcacagccgtgctcccgaggaccgtgcagctgccaaagagtccaggacttgctgcccttcctgactggcttctaactcagggaaggagtagtaagcaagggccaggacctctgaggccagcccacagctgccagaccccagcttcctctgctgtatctcactggctttgggggaagcagcctgttgggggagcccagtgtgctcaggggtggggcctgcagcccacagccctggaggaagccactgtggagtggcctctccagccctggtcacaccctacgatgagaacacagcttcaggcaccagctccctgaattcctgacttacggaaactgtgagataataagtgcttttccttttagaacactacattttggagtgatgtgtgacacagccagagggaacaaaggcagtcacgcgggctggcacggaaagatgcaggagaagcggaaggaaactgtgtgtgatgcaccccgctgagaaacgaacagagtgggcgcccacggaggtgcagtgagccaggcggctggcagagcagcaccccgggtcagcttctgcctcccgcatttccgatggtctgaatcgtttgtggcagccaccatatattatttttggaataaaatctaaagcccctccagcgctctctggcattcagcggagctcggcaggaggccacatttgagctgtcacccagtccacaccccagacagagctgcaagctgtggcagcctccctctgggagcccccggacaacccccagggatgtagggcacagggccgtgcagcaggcttaccgtgaacacgagggacggcacgggggtgaggagctgtgggtggatcatggagaggatggagggcaggtggccttcccgggaccccacgaagaagagcctgtggacagacaagagtggcagagtcagccaccgccccacaactcagcacgtggacaggggacacgcaggctggggagtggcagggcctgtgcctggcttgtctgggcctctctggccacagtgggaaccaggcccctccagccgctggctgtgggcctctcagttcccccaaccaactcggcaaggacagcaacttgggagccactgctcactccagcccggggggtcaagcggcggccacagggcatctaggacaccacagctgtgtcacctccaggcaggagtggggaggcgagggccaaagttcatgcttcctttatttctgtattatttgggcttgctgctgccttttttttttttttttttttgagatggtctcactttgtcacccaggctggagtgcagtggcaccatctcggctcactgcagtctcaatcttctggtctcaagcaatccttcgacctcagccccccaagtagctgggactacgggcacgtgccaccacgcctggctaatttttgtatatttttgtagaaacggggttttgccatattgctcaggctggtctcgaactcctgagctcaagcgatctgctcacctcggcctcctaaagtgctgggattacaggtatgagccaccatgcctggcctatttgagcaattatgcatccccagtatcacagagacaaaccttttacagacatggaacatgttgaacctggccatgaggcctgggcctccctcacctgtggtgggtcgggctgtgctcacctggaggatgtgaacagggacccattgacggagccgaagcaggacaggcccacgaagacggggatgatccaggacatgacgcccaggtgatagttcccgaagtcctaggcaggcacaaccagtgagctgggccccaccgggccggccctcgccctccctgtgctcactgggagccctctgcaccgggccagccctcgccctctgtgctcacaagagccctctgcagaggacctctcaggctggattctggcctctggggggacttcccaggacagggctttccagtgacccctgcccagcctgcttgttggggagcccttgctggtcctgatttgccccctcctctgggactccctggagcaagctacggcctgcaggtggggatcttgccttcccccgtggggtcctccacaggctcagcacggtgccctgccggcagcgggctgggagtcagagcttgttcagtaggaagctggccagagcacccactccctgttcccccagccctgggagggcagtgggagaagcctcgggaactgcgaggccagcctggctgagctgcccggtgacaccgcccgggcctggcctcccgcctgccaagccagcagcagccgtgccttctaacgaaccccactctgtggcagactccaatctttctgtactcagatttaaaatgacctctgccctggactccccaggcattctggcttatagctggttctgggtgtggcttggtatcagattttaaacccttctcccctttgactcccccagcagctgagcttgaggatgatccccagacacttcctctgcggtcgctgtgaggggagaccaccactccacccctccgggtaggggaggcttagagacgcggggccccctctgcgtaggggaggcttagagatgtggggcaccactccggtctggaagggacgggctggccacagcctctcaggcccctggtggaagctggcgggtagcggctcaccacggccacggcctcggacgacagcatctgctcggtggacagggtggtgaagtaggccaggttggtcagcacgtacaccagcgtcacgatgggcagggagatgatgatggccaggggcaggtttctggaaagaacagggacgacatgtcacccaacgcagcccgggctgaaggccaaaccctgtgcccaggagccaggtgggctcctcgcaagcagtagctccagcctctgtgctgggcttctcggggaaggtgggaagcagcaagagaacacaggctggcggcaggaggctgtgcctggagcgggacactgcacagccctggctggtgccttggccgcggcctcagcttccccacctgagaaatggggattcttcggggtgacctcaagggctcaggagagttaagtcaggccacctggtctgaattctaaggctctgcccacgagctgcacagccggggaccagagccgagagcccaggcagctcctctgtaccgtcccgccctgagtggggccctcacttgccacccgttctctggagaaaccgtgctcaaggacacacggccagaagccacccgccccacatcctgctggccccagaggccccaatcacggcccgactgtgaactggcctgagccgaccaacaggcttcgagtggaatgtggctgcttcctgcctcacattaaaataatgaaaaaagacggctccatccattcttgcacgtacctgtaggggttgatcatttcctctgtgacgaaattcaagtaattcctaaaatttagagaacagcgttcaaattatatgatcctcatcagggaaaataaatcaccggggagagagcatcccagggcagctggtgagcctgccccccggtggtctgctcgctgggctggaaagcggacctggagtgggagggagctcagcctcctgcgtgttccggggggtccctgctaccccttccaggccctcccgcacattccctgcctgttcgccctactggggtgattctcaggtccctgtgaggcccgcctgagcgcaggagtcaggctggggacctggaggaaaggggccgcagggctcagccgcctccacctgccaccttcgccaagactgcgacgtggagctagagccagagtagggctgcagcgggcggcctccccacgcttcgtcgggatgtgggtgactctggagggtcacctgccactctttaactgccaaggggcagttaaagggaggggcagtccactccctttaactgccccttgatggctgggagatttgggattcctggacacgtcagggactgtatgtccccagaccaagggacccagacattccagaacctaccatcctccataggcaaagaggccgctgtataatgccagcacaatgttccccacatccagtttggtgccttcaaatgagaagttgggatctagattggacacatcacctggcagggccaaagaaaggaatgctgggttagagagcgctgaacagaggtcatgctaccagttctagaatgttcctggagcaaaatacatagcaaacaaaaatgctggagtgaaggcttttcactgtgacaaatggtatgtacctgctgagccacatggagggtgcagggttccaaccacaaccagggggatgtggccctgccagaggccctgtgcccacctgagagggcacaggcagttctgaccactgcccaggagggctcctcagacgcttgtctacaggaggtcaggatggaggggtcaaccagccccagttgccttcaagaaggttccctgagacctcacgacatgagtgtcaaggcagtataaagccaggagacctcggtttgcatcctggctacggcaacaaggaaggcccagagccactagggccctgcttcttggggtgcgaggagctcggaacagactgccctccctccagggctggcaggacaggcctgggcaagaacataggtttgtcctggaccgtgctgagtgtgtggccagctgcagccggggcaggggcaggagcagggctgccagggccgagaacgatccccgtgctgtgtgcagagctctctcctttgccctctgaggacacgcgtcactggacttcgtgactgctccaccctattccagaaggacctcatttcaaaacttgaacttcagtcacatctgcgaagaccctttttccaaataaggccaccagcattcacaggttccccaggaggacatgtcttttgggggaaggggtgtctccggaaggtcacgtggctgctgggacagcactggccctttctgtggctgttgcctcctctgtgaaatgggcctggtgtgttcgagcccggaatatattgcccagacatcagtctcacagaccactgcgcttcaggaaggagaacttggaaagaagaccaaagacaccaccggaacaaaggagccgggtcccctcctgcctacctgccaggtgcatatacagctggaggcacaagtggaaatcttggtcaggctgtggactgttagttcattagagaaccgtgtgtgacagtatccttcctgctggaaagtcaccagcccgtctcacagggccaggcagggacgggccctggggctgctgtgtcccaacatgtggccttggaccacaggtcaccatgggggcccaagaaggggaaccaccttggtggtccagggaacaccgcagagtgacgaggtgagcaaatttcaaaggggacccgtgaagggaggttcccataagaccttggcaattaccccaaacaaagtgcgcacttcaaaggtggcaccagatttcctacggcagagcccacggtggggtcccttcctgatgggtggacccagttcctgttttgcacctgcttccccgtggcgtgctggatgcctgcggctctgcctccagctctgtctgtcccagatgccaggtgtgctggggcctttgatcttcagcctacactgggggtgctggtgggttccctgagggctgcccgccaccctgccctgctgaggccttgatctcctgagaaggagctccagggcccactgcctgcgtgtgatgtattctggtcaccaggtggtcagcaggcggagcttgactctgcaggcctggagcgggggcagctcagagcagctcaggacagggcactttgcacagcacctcggcacagcccctctggcctctctcccatctgctctctgatggaatgttctggaatgtgcagacccttcacatctgcatagccctactgtgtctcgcccacttacttctgctggggggagcatctgtcctacaagtgggggaatgcagacctgccaggctgcttgagaatcaaggtcctgcctcccccatctggcactcatggtgggagggggtgaaggtgagccctggaggccagaaacacgtgccccattcactgtgaccacccccggactcagcctgagctgatggacaggaggcctcagtccaaggtccccgccagacacatcaatcctcatagctgacctccagcctcatgacagaaaggcggctgatcctacacagagggtggctgcttttgctaaggacaatataccgaggcttgacatggtatgaggtcttcagtcaggagccagatattggcagccctaaggcctgagtaactttttttttttttttttttttttttttttttttttttttgagacagagttccaccacgcttggctaatttttgtatttttagtagagatggggtttcaccatgttggccaggctggtccagctctgcttaagggtggcctggagggctgcaggagggacctgcttgcagcccagggcagctggacacagggaggtcaccacactcatccag

SEQ ID NO: 64006 - DNA, 1784 bp, Homo sapiens
accgtgccacccaggggagacctcccggcttctcagtgcatcaggcatggtcaggggcaggacagctgcagctcacaccccacttctcagtcaccagccgagtgcacagccaatggcacctcatctaagagggggctgtgagtcccatgtggtcagcaccctggagctagctgccctgtgggctcagggaagtcgtgcagtgaccgccacatgggttcagtccagagcccaggccagagtccatgcccaccccacagagtccacgcccaccccagagtccatgcccactccaggcagagtccacgcccaccccacagagtccacgcccaccccagagtccatgcccactccaggcagagtccacgcccaccccacggagtccacgcccaccctaggccacggcgccgcttttcagatgcctgtttcgctctggccatctaatgcctgggaaccgtgatggggcaggaatttgggtttgggggttctggcggcaaccagatggcacttttggaccaccagcagtgtctgtcggtcttggaaactcatgaaggagtgggccctttgcttagagctgccaacctcacaccagaagtaaaagctttttccaactccacaggcggggaaagaccctgagaactgtccccagcacagggctgtggctgccctggcctctgtccatgcgtctgacgaagggcaccgggaggtgaaggccgcgggaaaacaagccccgctcccgtcctttgattctgtcccagcacacggcaccggcagagccccagcttccccagcctgtcatcctcccgaggccgacggcacagaagaatggcaggcccaggacacactgagctcccagagcaagcggcgggtcaagcatcctttatcaactgcgaggtcttcgaggcccaaaagaggtgccctgagtcgcgaagtacccacccttggggcagccaacgccgcagccctggctccaggcccaggttgtccggagtggagccacactcgagcctggcaccaatctgggagctcctgagcgcaatgtcctgtctgtccctgcatgaccctgagactgtctgagatgcctcacagagagatgccctggagtcccccacaggcaggccagcctggaagcttctctggaaagtgagctttggcagctcgaggccgagctgtggccgactcctcccttggttaacacagcctgtacccagctgggattcactttgaggccctggggcttgccctatttcctgccaggagagcggggcccgaagctccatcctgtcccccaaaactcagacgtggaagccctaaccccggtgtggctgtacgtggacatggggcctctacagattaagggtaagtggggtcctcagggtggggcctgatctgacaggatccttgtccacacaagaggaggccccagacagctcactctcccacaaggaaacacagcgagggggtgtctaggagccaggaggccgagcaccccgcccagggcatcagggtccctggcctggcggggcctctcaccgactctcccgccggcatccaggtagcagggccctggcaccagaccctctgaagctgagacccacccacccaggcctgctccgctcttgctgtcacccccggagaaagcggcagtcagggcgtgaggtgaggaaaaggggctgttggaccctgcatggcagtggctcccgtgccggggacgcggtgagcctggcctcctccctgcaagggaggacagcccatttcccaggggaagacaccgaggctcagacacc

SEQ ID NO: 64007 - DNA, 932 bp, Homo sapiens
aggaagaggagaccaagacagggccgcacacccccagccagatgagggccagatgagggaggcggcacctcttcctccaggaagctcctcaggagggacatcgggaggggctcagggggctgccttcaaggaagctcagtgaagctcagagaccagtctgaaaaggaatgtcctccagacctccaccctctcaggatggacgtgttactcaggaactgtcccgtcagcttttcccgtaacacatgacaccccacgtgaacctcccaagagcagatgggcccagtgctgtccacccgaacgcaccttgggaacagaggtgtgggcctccccccagcagcgcatgaccctgcacactgcacccagggtcacagtgggggtggggagggacctgcccactgctcacggctgtgggacctggggcagggcaccccacttctctgagtctaaggggccctactagctgaagaaccaaaggaaaaccatcatttcaaaactgtcacgtgacacacaaatgcaggcccctgccccacagcccagtggcacacacgtatttaccgcctgggacacgggaccgtccagaagtgccctactcataggtgtaggtcacatccaggggtctcggccaccgggacccagggcccagcagctcagcaaagccattcagccggggtctgagccctgcccaggggaagcattttcccctcctggggtgaaggacagcaagaggcacgccgccctggcaggctgcggctttctttcctttttgtggacagagtgaaagggcaaatttgctccaggggaatactgacctccaacagtacaatgtgggaggagaaggaaaagaaagtttttatgcaaccttttttttaaatctgcccaactatccaatctgtaactgttcaaggagagattagtttgttctgccgctgacg

SEQ ID NO: 64008 - DNA, 2171 bp, Homo sapiens
gcagcctctctgcagccatcggtgactgcgagtcaccagagcgtgcatccgccgggtgcctgcactcagcgaaagctccacagctccaggactgggatcatctctacctgaggctctgggagagaagagaaggaggccagctcctaactgctctgctcctaggctggctccaacatggatggagacaaactcagaaggaactgcagacagaggcatccctgctggactcaagcaacagggccccccacttcaactgtacccaaccacgggtgggatccagtgccaaggacagtgtgtcccagggtctgtgaccacacaaatgggaactgcttatgaaaccccagcccgacctcaccgcggaatggcagtgtggaaagggtggaggctctgcaggcagacacagaacacagatctatggagtgtgtgttaaagggtccagagacacccagcaaaataccaactgtgtcagtccacgtcaacagagaacacaggtgcaaaggggcgggggctgtttcacactcactctctttattccttctaccagccccaagagaaaaagcagctgggaaaaaggctcagaatcagtgatttccccaagatcacacagcacaagaccaaagtctgggccagccagccttaaaacctgtgcgccagactgctctcacctgttcccgaatgctaacagtggacacgtctgagtgatggggttaccacgtttgttttgttttccatgcttacctcatcttctttaaaaagcagacagaaacacagagacaatcccacacctgcccatggaatgatgaatgaatcacagcatgaccaggagcatggccccgtcgggggtgggtgaggggcgacagcacgtgggactctgacagacccagggtgagatggctcgggtgaggtctgcatggcaggcatagcccctgccaggcctggaatgttccacatcgcccccaggtgaggttacaacgcatcagctgggctctcaagattcacagacatcgcagcgtaaaaaacaagaaaaactgccagagcccctcccagtggtggccacgctgtcccacgggagcactcctgtgtccccctctgggtcggatttcacttgctgggtgattttcccagagggaaatctccacgttgtacagcactgcagagctgcggactgggaggcacccggggacgggacctcatgccctgtgaaggacacacaggcaaagcctcgaggggccgccggtggggcctgggggacgtactcacccttcccgatctggacgaagcccagcaggatgatcagggccagggccaggagcttggcggcggcaaaggcatcctggacccgggtggcggccttcacgctgtagcagttcacggccgtgagcagcactgtggagacagagggcagcggtgagttccacgggcagacagacgccagctcaggggtaggctgggaggtgacgaccccacccccaccccagggccaggtccaccagaaaaacaagctccttaaacagctccagtcccctgccagcccttagggcacgttctgactttctgagacctgttttgataaacttcgcagtcctttcaggtctaagggctggatcccaggtgccccttaagatctgcaagggacctttcctcaccccccaccacaccaggccatggagtcccacctgtagtcaggacttcaagtggggtcactgcctccagagacccaggtgagcaaggtgaccctgccacttggaaggcgcccattacacctttttgtacctactcagcaccctgacctgactgtgagacccacgcacagcccgactgccggactccatgagggcggggccctttcctcaaagaggatcttctgtggattccaacagaagtggggtgtcccgctttcccggaactacctggccagtcacctggggacggcagcctgggaggggccacaggggcctgtggtgagcagagcagaccctgctgccctgctgctttgggggcatacgatgaaacccaaaatagcaccgtgtgcttcagaagcctgagtgaccccacacagatggccagaacgcctgccccaggaggcgctgagatgtggggtcaggcacgctcagacaggtctccagacaccagcacgtcctcctgggccctgtaaggcacccagctctgag

SEQ ID NO: 64009 - DNA, 3031 bp, Homo sapiens
ttgggggttctgttgcaatatataggcacgctgagccactgtgtgtgtgtgcgtgtgtgtgtgtgttttggggggttctgttgcaatatgtgcgcacgctgagccactattcagggatctgtgagctggtggggaaacagccacccccacaacttaaaatgaagtaaaatcatattaatcccgaggcactgactccacgacacccctcactgcctgctgcactacccttcactcctctgctcacgaggttatctgtcgctgtcagcagcttgaaatctgccagtgggaacgtctacaccccagaagtgggcaaaggcccagcacgggccacccacacagctcagatctcacagccctcccggcaccgcaccactaagactgcaggaaggtgagagcatcagaaaggccgtgggctcctcttctctctttccccttgggagtaacgctcagaaaggtctggccagccaaggccttgaggactccagtggcttttccccagctgaacaaatcctgtggaatcttacaatgtaagcaacagaccccgaggaaagacatccatgctaattaactaatgacaccggaaacgtcctgaggtgcgggacgggctgccgcctgcctatctctcagaaattaaccaccccgctacaattctgtggatgccagagcggagacggctactacacaccaggaaagtctggttgaaaaatgtctgaaagtcagtgttttcgctgctattcctaaaataaaatacttgaaattccggaacttccactcctcacccaaactgaagaggtgattcttcacctcttcccagggctcccagggacatggagatgttaccagtccagagctctccagtccaaccctcagggctcagcagggtcaggtcagtgggtctaggcagctccttgtccgctgcacagggcaaggggcaggtcctggcttgccagtcccatttccttatggttggggggagcacgaccataaaagaaactgagcctcggggacctagccggcttctggagagctttctggattcgcaagaggccggctgattgcatcactcgctcattcatgcccggagggaggcggggagtgggtgtggccaagccgcactcgaggctgcctctccccaaaagggagagaggcacgctgccaccactgaactccagacaccagacaggcgctgcggagacactgagcactgccctcgcggctgtcacgtctgcggctgtcacgtctgctagggggttggggggtccaggaagggcagcgagttgcccagaattgcccaaccacgggctgtcctgccacactgacgtggtgctgggtaatgacgccatcagggctgtcactgtgggtgggacagaggccaggacccccccgcccccccccccaccgccagcctgaccctgcctgcccagttccaacccagccgctccccaaccaaaaacagtctggaggggctgacgggtgccaccgggagggttcaccagatcatctcctgacgttggaaataaccacaggacagacaggcgggggccgggtcttgaagtcaggtggggagcaaaatggccatagaacaaaggggaccttatatttattccttttataacaagaacataaattttcatgttcactgactttgggtgatgagtaaacaaaggtttcattattctccacagtgtccttttttttacgttttaagatgagataaaatcttaaacaaatacatgaattcatctgggttcagtacctttcgaccttaaggaggcgaggcagtcacaggataagtctggggtttgaacctcagtccctgctggcacttgccctctcccaagcctcagtgtccacaccatggaggggctgctggctgcccccacagcagggagatcgacagggctgtgccctgagtcagagtgagggggctgagcacacagggccagccacccccagataagtgtggccgcgccagcctgcggggacagctgggccaggagataaaacccgtccggggataccccgtggcgtggcttggcttgattggcagatagccgggcaggctgagctgggggcccctcccagtctggggtgctgtcttccccgtcctcacctggctgcctcccacctggctggctggcaggggctccagaggagctggggtgccttgggggcagtgcattggaggaacccctgccctcctcctcccttcacctgtgtctccaccacccttcagggccatcagccacagaaacatcctcatcttcgggtgggcattgacagcaaggcccacagcccggtgaaggaaggacagccctggccatacccagagccagcgccagggccttggccaggacacctgtcacagtgaggcccaagctgtggtcctggtcctgactcaaaagccacttcagataccctgaggctcacgcaggagggattggggacgcggccagcccatttctcctcaggaccctggggtgggcaccaaggcctcccactgctctcgccacgtgccctgctgctcagagctggggcgtcccggggaggttgccaccacccagcatgaggtgggggacacccccacccccttgtgcctccccatctctggggtggggccggcagtgatactgacctcagagaccatgcaagaaggcacctgaacagggagggcccacagacgggacaggtgcatactgctggctgggcccacagacgggacaggtgcataccgctggctgaccccccaactctgctcaatcacacacgtgcacacacacgcacagcacccccacaacttgtaaaccaggaggctgccttctcctggcccctggccttacccctctcccctcggggggatgactctctgaggtgcctccctgcctgatgcccgtgaacgctcacctctgcggcagccggctctgctcacctcccctgatgctggcatcttggtctcctggccccaactctgtccagctcctgataaaatcccgctacaagcaaagggatgatcccccagggtccagtgttg

SEQ ID NO: 64010 - DNA, 4980 bp, Homo sapiens
tcctctcgtctctacccccactgtggctgtgtgaccccaggtgtattgctcaacctctcgtgtcttcctgttcttcacaaagaataggaattacagtgaaatgtgcctggctcatgggcacccagcccatggtaacatgagcacatccggaatcagactctctactaaacgcttcatcacctccatgccatggacccctcccaatatccctgtgagctgtgagatctaaacaccagttcccagagtgggaagcgaggcctgagagcctcagcaacttgcccagggaaggctcagactctagccctggccgggcaaactccaagtcctcgcacttaagaacaaccaggctcagcgttccagcattccactcggcctcctgggcttttcctgggccaccgagtgcatcgtgtttactttctctttctctaccctagtgacattctcagaaagaggaaccgtcggaaggttccagggttttcttgatgtgggcatttcgaggtgttgacaaaaggacctctgtgacctttacttatggcctagtgcacacacttgtaagtggcccccatatctggtgccacacaggccagagtgcacttcccgctcctcttataatgccctcactaatgtgactgtaacttcattaactccaggccagattggatccttgtaccgactggtgagtaagcgaaccttcactacagacagctgtctttgctgatgactagctacttcatttttaaaattacggtgaatcaactatatgccaatattgaacaatgccttccttttttagcttcctgagcagcaaaataaaaactaaatcaaaaccatcaaaaataaaaaagtgtagtagctcatgcctgtaaccctaacactttttgggaggctaaggcggtaggaccgcttgagtccaggagttcaagaccagcttggacaacatattgagacctctgactctacaaaaaataaaaaaaaatcaggcaatggtggtggtgcatgcctgcagtcccagctactctggaggctcaagcgagaagatcacttaagcccgagaggtagaggctgcagtgagctctgattgtaccatcgcactccagcctggatggcagagcaagaccctgatgcaaacaaaacaaaacaaaacaaaacaaaacaaaacaaaacaaaacaaaacaatcactaactgcagcacaatcatagttttgattggcttaatttctgataatgcctagtcagcagtggccttcaacaaacctcactgtagcttgttggatggtcacagatggattcacctttgcccacaagttcctcctcttgtccactcacacctgttcatgacgccgagcccagcattgcacaaggcctggggataggggaagtgcagctccagacacggacttgggaatgttttgaaacaacaggaacgacatcaccctaggtttgtgttttcaagccagatattccggcgtggatgctaagaattcttacatgggcaagtattaatatttgaatgcagccgtgattgaggtggaggtggagacaaaaggcgtgcgtccctagaacatgttttgtccccactgccggagggaatattctgtgtcagctatcgcacgcaccctttccctccatgtgagtggactccacactctaagcaaggcgctctggactgcaaactcagcttgtgcctctctccagccctgtggcctcgctggacaatttttctaatctctttggagctgatcttcatgttgaaaaaggacaagtcccatcttcagatcaacacctgtcccagcgctgccattttgccaaggctcctccttggagtgtttgtaaggcacttttgccacgaagtaacccagccaccagcctcagtggaacctccaagcctaattctggaggagactttaactcggtaaggttgcccaaggtcgcatagcccatgactgcgctgaatcctgtttttattattggcaaaagggagttgggcaggaaattcaaggtaaagcattttgtttttctttctttctttttttttttttttttcttgagacggagtctcgttctgctgcccaggctggagtccagtggcgccatctcggctcactgcaagctccgcctcccgggttcacgccattctcccgcctcagcctcccgagtagctgggactacaggcgcctgccaccgcgccgggctaattttttgtatttttagtagagacggggtttcaccgtgttagccaggatggtctcgatctcctgacctcgtgatccacccgcctcggcctcccaaagtgctgggattacaggcgtgagccgccgcgcccggccagcattttctttttcccagtgaaaatagctgcctcgccctgtgtttgggagctcaaaggcattcttgctcattgcaaataattgaggaaacagaggcgagtataaagaagaaaatgaaaggcaaggtaatcctagattagcagagggagataaccaggaatgacatttctgggaactgcgctatggtttgggaattttttcctgtgattacccacaaacgcacatttgcacatttattctacgtgtgcacattcacgtcatcactttttttttttttgagacagagtctcgctctgtcgccaggctggagtgcagtggcgcgatctcggctcactgcaacctctgactcgcgggctcaagcgattctcctgcctcagcctcccgagtagttgggattacaaggcgcccgccaccacgcccggcataattttgtatttttagtagagacagggtttcgccatgttggccaggctggtcgcgaaccctttacctcaggtgttccgcccgccttggcctcccacagggctgagattacaggcgtgatccaccgtgcccggccgccatcacttatttatattatgtgttacctataggacttatctaagaccataatcactgccgcgtgtgctaagtcccgcgcgcgtgcactcaggcccctctggatagacactggggacccctgaccacttatgtcagggaaaacgccaccaagcgctccggaacctcagggcaggacccgccgcagcagcaggtaggacccgctgggggcgcacagcccacctgagacatcgtaactacaagtcccagcaacccttggtgcggggacaggacgggccaccggagtccggagagactacaagtcccggcaggcatggcccagacgcagggactacgagtccccgaatgcatggctcccagcttgcgcagggcaccctgggaggtgtagtagttgagggagctaatgcgtattcattccgtctcaaagaagatgcaaattcctcagaccgtccactgaggtgattgttctcacgcaggccatgggcgtgggcgaaaaacggggggaaaaaagccctgggaagccggtaccgtcgcggaagaaggccgcctgcgcatgctcaccaggaggccgagcgggaaaagcgcgcgcagctggcctcactgccacaggggtgccccgcccccgggcccgcgcgcccagtgagcctgcgcggagggcgggggccgagcgtcgcggggaggggctcgcggcgcctgcgcagagcggcggcttctctcgcgaggacggacgccattatcgcatctccccgacaaacaccacgagaattccgcagcccacacggtaattgcagctcccgcagccggtcgcgcctccgcctcccccttcccgcggggcgagagcgagagcgagatctccctcctccctcctcctcccgcccgccgggccgcccgcgccgcagccccgccgccgccaaccgcccgggccgggcgatcgccccccgggccccgctccccgtccccggccgcgccccggaagaggggctcccgcttcctcgcttccgcacccccggccccaccgcgcccggcgtccgttgagccgcggctgccgcagcccggcccgggggcctcgcgctcccgacctctgtcccgggcctcgccccgcgggaaggacccggagccacggcggggagactggaaaggcctagaaccgcgcccgggctcctctggggcccgaagtctcccaagggggtcgctcctgccagccaggcgggagcgacaggcatcgtttttgtgcctcctccgtggctgtggaccggagccccatagcccaggacttgcacacgcaaggggcgctctcggggaccgcagacctcggcgacgaccccagcccgtcccccgaggggccccgatgaacgaggacctcggggtgccccctccccagcacgtttgtgcgatttctgtgatctagtccttaaggaaggtggccgttttctttttcccccctaggatgcagaaagtagatgacattccatccacactgtgtgagcaaattggagagattgccttgatagaggactgatgtttttcactgatgagatggtaggggttgtcttgctattggagaaatacatcatccctgaagaactgtgagcaagtggagcgagtgtgggctttgaagggtagcgagcttgcaccctgaccggggagggcccgggtcacacagttgttgatgtggaacaggtaattgccctgtttggagttgcctgttctgcccaggaatgtactccagggcctgatggcgatgctggaactcgcactacagtaaataattgataagaggaggcagttgtagggttcacttttagctggaagttcttaggggacagaaaaataacttggagtagtgagtggttctgagtaagctcaggaaacgtcaaataaaaactggatctggtcatttaacacgcagctcgcagatatccagtgctagaagaaaacaccaaaacgcggtaaaattctgtatgtgggtccacttcccgtgtctggcgattaaaataagaatatattcttgcgatgttggattctgtcatcattggcgttaatatttttatttttttggagatagggtttcactcggtccccgagactggaatgc

SEQ ID NO: 64011 - DNA, 597 bp, Homo sapiens
gggcttgagtccacctgacgccgtggctccttccctctctcacacgcgccttcaacagagagtagtcagtcagggagggtgagtttcagttggtttctttagctcctgtctatatcagcgcccagtggtgaatcttgccaggagaggtggtgacctgagaaaaggcgagttgttgggcaatatgtggattttccctcctgcagggctgtccctgccactgtgtacgccaggtttccatgccagctacatgatgtatgatatcactgcagttttgatattctgcagattcccttgagatcagaaaggagagtgggcataagcagtgttgtaggtcagctgcagttattgggaaagccgttccggctccaatgtgggccggcctcccgctcccctgtcaatgtgggccggcctcccgctcccctgtgctgcgagctccacggcccgctctcagtggctgcctcagtgccacccctgctgtctcgagcctacctcccccttccttctgatgtgcacactttggaccccacgctctttaggtcatgggcaggaaaggagagagaaaagacgaaacacgaattctgtgctgttttcagctgt

SEQ ID NO: 64012 - DNA, 562 bp, Homo sapiens
tgaactcagcagccccggccgagggagctgtgcccagggctgctcctaacactccccaccctcaacccctcctggccggtgggccagagccagaggcaggatgggggacattccgtcccctggctaactgctaacagcgcctgtcctgtctctgggctgttcgcagggccagcatcccagccagcggccaaacagagtccacattcatgagcagccattgaggctttcctaccggccgggcacggcagccgcctgcagaatgtgaccgttgggagcgtccctgagcggggttttccgcattcctccggggctgctgggccaaggtggctgtgtgtaaacagagcctgcgtctccaggcctggatgtggccagccgggcactgcccactgggaggctacagaatggagcttctctgcattccgggcaggggcaggaatgtgacttgctaagatcccagccagagggggcgtgggagccaggatacccgggtctccatactggaggaggctgccccatctgtagaagccggagagcctgatgccagggccagtctccatactgg

SEQ ID NO: 64013 - DNA, 435 bp, Homo sapiens
tcactgcccccaccgcgcacgtggagcgtgcggcagagcccaggggtctagggagggaccaagggctgggggcggagttacagtgcgggggcggagcctcggcgtctcaggacccaaccaggtcgggtcaggtttggaggcggagctggcgccgagaggcggggcgcaggatgcggtgccgcggggcagcagaacagaaccgaataggtctcagactcccagcgcggcctggggacatgacctccgggccaaagaggagtgggggaggctagaggtctccccggggcgcgggcggggccgaaccaggaaggggcggggcatcgagcggggcggggacagtgccttgaaggcccagacggacaggggcggggccgcagcgctggggtcggagccagcgccgtaaagagcgaggcgggcgggggcgcggtcgcggct

SEQ ID NO: 64014 - DNA, 3600 bp, Homo sapiens
gggggcggagccagagcaacgaagagccgggctggcgggggcgtggccgcggcgctgggggcggagccggagaggtgcagggcccggcaggaggcacggggcggggccggagcgccgggggcggggcgggaggtgcggcggccgacgacgctcaggcccggccccgccccgtgcctccagcccgccaggagcgccctcgcagtggccgcctgctccgccgctcgccgcccgcgggttccattgagaaaagccgagcggccgcggcggcggcggcgagtgcgcgggagcggaggagccggcacccgcccgtcgggcagtccgcgcgcccgcaacgcaggaccgtggcctctcgggcctccgcggcagctccagcggctccggggctgggcgcgcgggctgggggcgcgggccggggcggccgcggagaccgggggccgggggcatgagcggccccgcggccccgccgcgcccccgccgcccgccgccgcccgcccggggctagaggcggccgccgggagggcgcgcggcgccggagacatgtccaggcggaaacagagcaacccccggcagatcaagcgtgagtcaaactttgcccgcggtcccctccgcgcgcccgacccccgccggagcccagccgccagcgccgcccccgcccgtccccgctctgccctgggcgccggcgaccttcaccccgcgccgcgccccccgcgctgtgccaagcgcgccgtaatctaatctccgccggcggcctgggcccccgcgtctcggcttgggcaccggggggttcagcccaggagggggccgcccggaggccgggaggagggtgtttgggggcgcggcccgggcagctcggcccctcgcggcctgcccctcccccgcatctgcgagatggtgcggcgatagggcggccccgatctgggctcagataaagtttaaaatattacattctgcaagtcccgtcctgataagatcgttctgtcgggacgggctgaaattgtgatcttatctcgcgcggttgactctcccaggctttgtatctagaagcgaagagagagacctgggaggcagaggggacacccggggccgcggagatgcctggccaagtggcaggcaccggcccgcgcccacccccaccggtgccgtcgcagagccgcaggacaggggagggggtagcgcgcagctgccgcagcctaggcacttggctccagccccccagacacccccaccccgtgccctagcgctgaagtcctgaacccaggccccgccagcctggtgacacctcctggaccctgcaagtgtcccagccaaggcggcatgggcaacaaatggtgccctcggatgcccgcgggcaccccctggcatcccaatgggctgctctgagtcagagaagggcctcccaggacgcagccccgggccggggtcgcccctgcacgccactaagtttctcgctggtccggctccctgcccggtcagaggctgctgccccgccgccacattgccagtgcccccgcgatgagaactaagctgtcggggccactgtctggcctgggcctctgggctgtgccaggagggagcaagagcacaggaagctaccctccccaccctatgccaataataactttgcgcctcacagttagggcccagacgcaggtcttcctccccggggcgcctccccggagcctgacgggcaggtcgtctgagccctgccaggaggccacgacggaaacccgcccgctgcccagccgtaggcgcccgggcactacctcctttgtccacacgaccactgccaccaggaccccttgtgcggggcctgtgggagcttccctactcaggaggtctcccgaggcgggggtcacaggcatgaaccggttcccgtaacccaactccctcagcgcaaacgggacctgttttccgaaagtcgccttctatcgtgtcaactcaagtattaaaagccacccacaggtcccgatccgcgcttgtgctctggtttctttttccttccttccctgagcgcctatgttcggttctggggtgtgtgtgtgtgtgtgtgtgtgtgtgtgtgtgtgtgtgtggtgtttcactgtgatgagaaatgcagatagctcggacagggagatcgcaggttggaaaccgatctccagcgctgataaggccgccagcgccagcgagagcccgtagcccagcccagcggggcgggcagagcgcgcgcactttgggaactgggaccgcggcgggtgcacggtgagccaccgcggcccatcctcgttgcggcccgggaccggggcagagaaagggcccggacgaggaaggcagggccgcggaccctccctgtcgctcgcggcccggggcgcctcctccccatggcagatctcagcacgttaagatgcgaaggctgattgtcaccaagcggcggcgcccgcccgcccgccctcttgccagcgcctgtgcctgcccgctgccctggcctcacctgcggccgggccgcgagtgcagagcggagggggccgagcgcttcgggccgcccaccccccacccgcgcccccatcaaagccctggcgcagctgcccgcgcctctgtgcgccttttgttccgtgcggagatagatgtgccgcgctgataaggcgcgcaaccgatggtggctgagataggcgcttccatttattaacttcaaacgtgggagcgggggcagggcgaggcgggagcgcggccttggccggccagatggcggaggcgataggccgggctgccgacggggagcgcggggccggggcagctcgggacccccggcgcccccagcccgctgggttttcctcccgcccgagtcgatgtgagctccgataagagcctggccggtcggcccgatggcgatcgccaagagcgataagaggccttatctttggccaccaggcccggccgggttggagaacagcgcgggggcgccgcgactggggcgagtgggggcttggaacggcccgggttggggccggggagccggcgtccctgcgctggtctgtctgggggagttttctccccaaacacacttaattgccaagaagttgatcctcccctgtggccggtggtacagtccgtcaaaatgaaagaaaactggctttgccccggccaggagggggaagggggaggacaccccgccccgagtcctcgtagatggtgcgagaccgctagaggtgggtttgtcacctccagagggagagagggtgttttccccttgaatcatgctggtgttgctggtagttcctagcaagaaccaagtgtacactgcttggagttttcttgaaaaaaaaaaaatcaaggtggtttccatggcccagactgctttgggggaggccagtgtaccctggtgtggaggcgctgcagacctgcctgggctgagcactgtttgctgagcactactgcatacaggccctgggtcccagtggcaaacgagaggggcagagggggcagccaaggggagcagggggcacgtcaggtggtcagggacacttcttggaagggggtgacctttggcacagtagggctggcctcagttttccactgctgtcgggggagcaagggctgagaggcgcctggggctggggggcc

SEQ ID NO: 64015 - DNA, 1549 bp, Homo sapiens
tctggacactagggtccccaggtctggggtgaatcctgctcctggcccccgggaatctccgggatggcccacttggaagaggatggcaggaaccacccacccttgggctgtggttggatgctgtgaatgaaagcctggagtctcctgggcttgtgagctcacccaccgaccctcaggcctcagcccagctgtacagccactgatgaggggcccctctcaccatggccttgagggcggggtgaggtgaacccacaggcctgtcctcgagggccgcagggcgggaggagggtcggctgctagggagggccatgacggccccgctgccccggggtctgggtgctgcgccccacttctcccatggccgggcccatcctgggggacccctgctcccttccagggagccagctgcctccacccatctgacgcaggctgcgcggcgatggctccgtgagccgcggcccccgccccatctatcagcccttatcacccatctggggaggggggtcgctccccagcccagattctcggggccgtgctgggacctctcctcctccctgggcctccggcgggcttgcagccgcgtgcgtggcctcagccaccctgccacacatatggcctgaccccatcctcaccttcaccctgtgcggtggtccttgcccgccacggccccacgcggcctcgccacccccacccacatcccatccctgggcaccccctcggctcttccgcaaggggtttagtaatcggttctccggagtgaagcaatctcatgtaatctatcagtggctatcaggcccatcggagggccgggagtggccgggcccagagatggcgccaaccttcagcgtcgataaagtttccgagttcagcggtgatgaatgttgagtaagcgcaggccgcaccgataggatgtggacttggcaggcggcggctccggctgaaaccaatctctcccctatcagccgggctgggctttctcaggccccggctctttcttccctcctcctccgcctccctttctctctgccttgccccgcccgggccactgcccctggggacacgggtgggggaccagcccactggccctggctccagagaaggggcaggctcagggcagggggaggatccaagggagcccgaagaggtggccagagctggggggctgcctggaggtggtggcagatgcagcagctgcccggccagggttcccccagcagcccagggaccctaccacagtctgacagattttggcattctgctcggtgtctgatggtggcttctcacggtgcccagaataaaaccccagctccctccaaagcctccagccccctgcctccccgccacccgcctcctcccatccctgggccgtgcagggctccgtcccacttcggggggcggggggctctgtcttcagcgctctctgcccggagctcttctcagtcacaggtaaaggttagcctctgagaagccctggtgaccaccctgtctgaagccagcccccacgccagcccgctcttctccatcctgaacactgtccgagcctccgcgg

SEQ ID NO: 64016 - DNA, 1452 bp, Homo sapiens
tgacgggcggaagaatgccaggaggcagtgacagcaggtccaaaggctccaaggccaacgggggtgggggagaggtttcagaggggtctgcagccgaggggctggggtggagatcccaggcagaccttggtccctggcttgggagcgggatttctcagtggggacccccaccccagcatttcccagtctgagtgtcagggtccccgctgggtgggccgcggccccaagagcccagcaggcctcacccccatctgcacatgcccagcctgctgcgcctgggcccctttttctggcaggcagcaggccctggggtcaccagagccagtgggacttgaccccagggctggggccgccatctcccctagctcacccagggacatcccagccccaggacggccaggccaggtgcaggcgtccagcccagcctctggtgaggcctgggacccgctggctgccactcctccctgtccttgccgccgtccccgtcggcacacgctgctcgtggtacagccagagctctccctggccagtcccggggccgggctcttaaccctcgcggagcctccgttactgcacatgtgagctgggtgcgagtcccttggtggctggggggagagagcacgtgtagcacatgtggactccgaggcccttggctgtcaccgccgccagccttagtgccgcacgcaggtgccgccggcaagctgcagggcgccctgatggaggggccgcagcaaagggcaggtggaggtggactttgacccgggccggcttcccggggagccaggctccttatctgatctaggagccagggccgcatgggggcgggggtggggcccgggaaggagctggaaaaaacagccagggctgcacctggcaccgcccgtagtgatagcgtggcgatgggcgcgataacacagcagcgcaggagctgtctgccgcttggcgggtccagcgaggctccctcgcggtggctggagctcagatgccagccactttgatttatagccaaaaataataggacttttatactgtgtgattgacttatttgatgttaatcgcagcccttatcgcgggtattaataatctgtagacacgtgacgtcatggggtgggggggctttatgggatcgcatcgatcggggccgaggtggttatcaggccagctgggaaggcaaacatgccctttgggctggaatcggtgcagggcctggtggaggggcccccagctgccagcagaggggaccagggagctggcgacggcgcatgtgcctgctggccgggacaggccagttggccatcctgtaccctgattatcaacagcagctggaataacaattatctttgaagcaattaatgaggggagaggggttttaaaagagcaagaggaaaacttggatgtctgtcccaccccagtgagagcgcaccaggagatgggggtggctctgggcccgag

SEQ ID NO: 64017 - DNA, 828 bp, Homo sapiens
gcccaggccctccgggatctgctccttggtgagggagacaccccaaatcatgacgaggtaggaaccccacatgtccgaggggcaggcagagccggcctcgctgagccgacgtttgagttccaaatgaacgaggggcgtctggaaacggtgtcccaggccgagggcgcagtcccggagccgggggcacccctctaatctggagtgatcgcaggggtgaggcagcagtcagctcagagcctgaggccccatcacattgggcctgcggctgcagagggtggttatcttggaaactgagttcagaggtcgcaggctctggctggcctgaccctgggtcgttggcgtggacaccttggctgcccctggccctgagccttcccatgacacccttccctcccctctcccaagcactggccccaggcctgggtgggggctgcacccgggtcctgcctgcaccaccagaccccaggcctgcctctccacgcaaggccctgtgggcggagcccctggacagggttgagcttggggccagagccatctgcagcccccgaggccggctccccttccttcatccccagctccccaacggcccccgtggctcccccatgaccaggctgccggcaccctggggcctggctgacctcccgcacccaccccagccctggccatacagaagccgcctcctgaacctggccctgacttcagcctccaccccgggaaagtcacctgggcctcgaagtcccgaaatcgcaggcagagccggcactcactcactcccttgtacttccatttattgagcacaagctatgtgccagccctgtgatagacagg

SEQ ID NO: 64018 - DNA, 924 bp, Homo sapiens
agagcccacaggcctgcctcccagggaagggcccaggcccacccatccagcctctccgggtccagcccccaagtcccgtgggctccccggcccctcctcggccccatgccagcagagggtgagcggacagtggatgccccatgaggagcgcagccggagccctgggtctccagccatcctggtggttggggggcgggggccgggcctggctgcctgccgtgctgccctctggcctcaccaccttccgggagaggctatctgtggccagggcagcctatctcggccgcaggcgctaatcaagctggcttcctcctccgccctcccacccggcttcctgccccggccatcccccaccaccagcccccacccaggccccgccgttgccctaccggcccctcccagacatctcgggggcaggcccaccagagtcacctgggcgagcccctggagccccggctactgcccagaagcttccctccttgcccctcctgggcctgccgcatggccggggacacagccagctccccccatgagctggtggcctcgtcaggaagacggccacagggcgctcttgggaggacccttgggacagtgggcaggcgctgggcaagccacaagcgtgtcgctggcagctgctgccccagctgcccttgttcccaccactacacccgtgtcaccaccagcgtgggcaccgtgactgtcactagcacagaaacagcgctattagagagtgctgctgctggcctggccgctgtcaccttgctggtgctgtcgctgtcactctgggtcattctgtcaccttgctaggactgttgctgccagcagtgctgttgccgttactggcaccaaccctcccgctggcacaacggcagactcagcttccaggtgtcacctctctcaccgcagacctggggcctgttgtgc

SEQ ID NO: 64019 - DNA, 1705 bp, Homo sapiens
ccaggacccagggtgtttagccttccagaagcccagagaggccgccaatctcccagcttggaggtgacatgaggctgtggctttcagactcctcagccctggcgaggtgccgcagagtggcagagacaccgcccagggtgcatggagaaagagcacctcgctgggccccgtgcacagaccccttaagggtacatggagggacatggcccccctgtgtaccgtggcgctctgcctgccagtccagctgccccagacggggccaaggtagtggtgtctgagaccacagtccccagagagcaccatggaaggggttcagacaggcaagacctggctccgagctgtcctcaaggcctctgaaagggcagttctgggcctgagcactgccccactgcccctgtggggccagggccttgccctttcccttagagacaccccctccccaggacaggccactgggcctgcaggtgcgagggcccccaggtccctgcaggagagctgggccccaccctgccctccttgctattcccaggcggtcccagctctgccattagctggggccagggttcagcccgataaagatgggctgttgttctgtgtcaaaaaatcaataattgcagcgatgttccaggcgataggaagacaagttcacaggcaccagctggcgggtgggcggggcgaggctgggggctgcagcacctggggccggcccttcctgcctctccctcgcccggtggctgacgcagctgctctacagtggacgccaggcccaggcttggccaagccaagccatggcccctgagcctgctgctccttactgcccgtttgtggaagggcagcccagagccagctagggcctcggcgaggaggccagtccctccccagggtcctctggctgggtcttctcccaggcggtggtgccctcctcctccaaacacaggcactcaggtccacggtgtcccagtgccttggggacacagccgttcaacagccggccctgaggggctgacagtccagcaggaagacagagttaatgaaatcaagacctctgccccctggtgccctcaggaggtggtgagcactctggggacctgggaggcagggaggaggtgggaggggccggcatcgccctccgcacgacggcttcctggggtcctggcacggtgccatgtgggctggccctgaggcatcaccatacctggcatctaccattccctggagccagcaccccctgccgtcagctcccgggaacgcagcccatgccgcctgtctgctgaccccacccaggccccctgcgatgtgggtcctgagcacatcttggcaaggagaccaccgtgctggtgggcgggtgcttggaggatgggcacatagggcacgaggcccacctctagcagagagagagcctcggcaggtgcagccgccggcagggcccccccatggggctttccaaccacgtgctcaccccaaggacaggcaccccccgcacccccagccccccacagccatccacagtgagtgcagggtctgagggtctcaggaaggcaggttctgtggttcgaagccctttgttaacctctggcctggggtgagaagaaaaccctcatccaggaggcctggggctctaggccaaccccaccctgggctctccactggcctccagggtgctctgaggtttgtggcccagcagaggccaggcatcatggccagg

SEQ ID NO: 64020 - DNA, 2250 bp, Homo sapiens
acttctctaaaggccctttctgcaaacacagtcacattggggattaaggcttcacatacaaatgttagggggacagaactcggtccatagcatggagtcgcacaggttttgtccttttgcgattggcttgctttacttagtatgtttccaaggttcacccatgttgtggcatgggtctgaacttcactcttcttgatgactgactcacactccactgcatggacagccagcattttgtctgttcctcagtttgtggacatctcgcccccttgtttccaccttggggatatggaggaagatgggatgagcgaagccctgtgatccccaggaccagccacgtcgttggcaagggtcagcgcaggatgaaaccgccggcccctggtctccggccgggccctccgtctctagagcagctcgcaccgctgcagcccctggacgccccgggctgtggacgcgcccgtgggacaccgcgctgagcaggacacgcgacaggtcccctcactggcgctgctcgcgttgaaccgcgcggggagccaggcagcccacgggaaaggtaagaattgttaggcttttaatctaaagtcgatacctcaaaaaataattccggaggtaagcatttaatatcaacattcaataaagcaggaagtatcagcccgacgaagaccgccttaagttttccactttgatgaactcgatcatccccggggatgaagaacccgccggcccagccggagccccgtcacgtgacccggcggccgcggggagctctgtgcgcaggcgcggatccgcacgcccgccgcctgagaagcgaactccccgtggcgcctgcgctgtagcgggggttcggctggctcgcgcgggtccgggcgcgcgctgcgggggcggaaccgcgcggaggccggaaggaagctggagggggcggggcgagggagggaagcccgccggccgtaggactaccgtcgcggcctgatgacgtcgcacaatggccggcccccgcgggtagtggagcccgtttgttccgcccgtgtcgagcctggagccagaacctgtgaagagcggaagggccaagggacgtcttctccacgccgctccgactccaggggagccgtggcctcctctccgccctagcgctgaggttagctggggccgggagggcggcgggaggccgggccggcggcggcgggaggaggaggccgccgaggcggcggcggcggccgcgggagggaggcccgggagcccggcgcgcctccggccgtgcggacccaccggccgaagcgtggccctcgggcccagggaaggggaccttgagacaggcaccaccccgagttccgtccgtaagccggccccgcggtcctggggcgccctgggcgcccgagctcctcgcgcgctgcctccgcgccccgcggcagagtttattttcctgaagctgtcatttctcttccgggccactcgcgtggcacatgtgtgccgccggctaaggggcggtgagaggcgcccagattcacctccagagtaggtcatcccgggctgctgctgggctcttcggagaactttgagctctttatgaacctcctggaacttgctccgcagcttcaaagtgtgcacaggttgggcgcagtgattgccccaagacgcgcgccggtctcttaggagtatgtaacttccttgccccttggattaggagatcagaggtgctgggtcctttatatagaccaactgcagctataatgctggaagaactgaaacttaacagccttactcctgccaaacatttttcctgaatactttatgacaactgagtttgccgggtagagtggccgttttaaatgagctttgttcgaacaacgctaactcatttgcaagagtaggtcattcttcagacccatttgggaaaatggaagaagagagtgtttggcatctgaagtaccgtttggggtgtagcaaggtgctcatcatgtctcctgttagactcacctccagcctgttgtctgtagagtagtcctttcccgttcagtagttgggattatccgggtgaggtttgacctcggctgaatcccgcttcccagctttgggaggagagtcttttcctgataattttactatctaagggcagtatggagcccagccagccctggaaccagtcaaatgtgtcccaaagccggaaactcctctcccgttgtaggtgggacatgctgaaatattgtaagaaagctttgtggagtcactccagaaagcaaacaggtaagttaa

SEQ ID NO: 64021 - DNA, 960 bp, Homo sapiens
caggtcgtccattggactccacttttttttttttttgcaaagtgtaaagacatggggcgggcactccaggtctgctttgggctttttctgttacgttttaagggaggtggggagagcatgtggcccgtagctaaatgctccacaggcactcacagaacaagccaggagagaagctttgctgtggaggtgctcccagagctgcctctgagcaggctcagcccggggaggcccataggctcccatctcccttttcccttgttgatgtagatgcttagctcttttgattgaagaaagaaccttcatgcgtttttatcctttttcacctttgaccccaaacttgacagctgctggggttggagtttctggacacgtggcctgtagcagcctggcatctgtggcgcctcgtgtggctgctggcatcggtgaggcatgagctatgagtgtgccagcctcgggcccttggttttgtctgcctctggcatgtttgcattggtggtggagctgacctttgccccttagagagtctcctgtggccttcaacggggaatgggggccagatgatagcgcgggccttgtgctgcgggaaaggctacttcctcagtcagaggtcatctggagggttctcccctgcggttggaagtgttcatgcaaattccagatctgtcctggcccagcttggaggtgggccttcctgactgggccatcccttgcgagcgttctcagcccacactggctccctctgcgcaggcccctacttgtgaaggagctgagccgcactcggtgggctgtcctggggcacccatgttgtgtgttttggttttgtttattttgtatctgcctggtttttccaagtctaatcaggatgtcccctggggtgacattctttgctgagagaagggcacatgcctcggttccctgggctgtagaaagccagtgctcagccttgctttctgccgcaga

SEQ ID NO: 64022 - DNA, 1730 bp, Homo sapiens
tggctagagagagggtggtccatggattccacggactggctcagcaacagaggggcaaagcactgatacaatcccggggcacgtccacattctatgctgaatgaaataagccaaactcaaaagatactgggtgggccacataactgcgattccagtttcagaacattttgaaatgacgttacagaaatgagtggtcagtggcggccaggtaaccccggcgcgaggggaggggcggggctgtgaacgcacaggtgcggaccggcctccccggcacggatgtgggcctgcgggccccccattaccgctccttggaggttaccgctgggagaaacggggcgagggagggacacagggtctcgggctgggggagcagtggcgcgatttccgctcactgcagcctcgacctcccgggctctggccatcctcccgcctcagcctcccgagtagctggagccacaaacgcgcaccaccacggcggattcttacgattcatgggaatcgatgattgatgatttcgatagttcggtaatcgctaatgggcaggcgccgggcgaccctgcaggggcggcagccgtcgcgggggaacgggtggcgccgagcttgtcacgcgaaggagcgcgcggccccgcccgaccaccgccgcgcccctccctgagcctcagtttccccgtctgtcgaggccctgggagggcaggacggagcgcgccgccgaatcagcgcgcgacccccgcgtacccggcctcgctcccggccatccccgtcccaggccggcccgcggcactcacagtacttgatgaccgcgatgttgaccggcgctgtacaagtgactgccgccagcggcttctccgaggccatggtcccaccgcgcagtgaccccagctccacagccacttacggcccgcgatcccaccccagaggcctctgcctcctcacgcgctaccacaggattggcccgtgcgagcccggctgctcgcgcgccgaccaatcagcggcgagtcgggcgcacgcattacctctcagccaatggacgggatcggacgatgggttgctgacgtaggtccgccccacccgcagggtgcgctcgccaggcctggggcgtggtgttgtctgcgcaggcgccgtgtgcccaggcgcctggcgtccgcgtcggcgatccggggtctgggcgcggcgaggtgggcgctgttgcctgtgggggctacctgtctgctggtgctgtgcgggcttgtgcggggctgtgcggcagctgtgtggggcccgtgaggagctgtgcggggggctgtgcgaagggctgtgtgaggcgctgtgctgggggctgtgcggagaccttgaggcgctgtgcggggtccgtgaggctctgtgtggggcgccgtgtgggagactctgcgggggccgtaaagggtccgtgaggcgctgtgtgcgggttgtgaggcgctgtgcggggaccatgaaggggccgtggggcgctgtgcgggtgccgtggggcgctgtgtgggagggaggctgtgcggggccgtgggacggtgtgcggggctgaggggagggcgggtcgcgctgtgccctccttgaagctcttggacggccccgctgggtatgggggtgcacacaggcccgagggcaggcgctggaggatgtatcccgggatccactcttaacccggcagccgaaggcaccctgtcccgccgcccacagccttctccgcgccatgtcctgggccaggatcccccgcc

SEQ ID NO: 64023 - DNA, 531 bp, Homo sapiens
tgagccactccacctggcctgtcaattctttgtgtattttttcattgacgtgcatagtacaagcacatagcgtgttctcccaccttgctttttctacgtaccttcttcttagagatcatcccaatttagtaaaaagcttccttgtttgttgtctaaatatacctggtctgtcctagttgggttgttactataaacagtgctttcctacgttgtttgtgcacatgtatttctgcaggagaaattcctggaagtggaattgctgggccaagtgggatgtgcctgagtacttttgatagctgttggcaagtcgccctttgtggaagtcaattgattactcaggtctctctgcggaagtctgagagtgcctgcatgccttcaccagcacagtgggtcacctgccagagtgacatgtgttgtctcactgttttcaatttgcatttcagatggtggttatttttaatttctcttgcaatcacagctgcttttccattttatgcaaagccactaaatcctattgaagagctgatgtgg

SEQ ID NO: 64024 - DNA, 914 bp, Homo sapiens
cctgcagccgcagccgctgcgcagaggcgctggctccttctcctcccacctgggacaggtgtctccccagcccccgctcccaggggcctctctctctctcccgcccctcagggtcgagtcccggcaggggctcggggatcgggtagtcagtacctctctgcgtctccagccgccggtagttggggaccctgtggctggagtgcgttttcaccaggaaggagcgcggcatgttcccctcccgggcggcaggccggggtgggctggggcgggaggggcgcgcctgggtccggactgctgcgtccgccggcgcttgaaggggtcaggctcattagcatagcgcgccgcctccgccaaccagcgcccggcgcgagtggggcggggccacgggggcggaactgagggcgaggcggggtctcgggcaacacgcccaggacaggtgcgcgggcgggacggggcggggagcgcgtggccgccggtgtcctccccacgggaattctctggcgtgcgcgccgccgagtcacacaccgacccgtcgggcctggccacccactcgccgtgagtgaagggcagagttcaaagctgtgtggaaaccgagcgagaatctcttccacagaatgtggaagcgtcggccgagcgcggtccttggagaacccttgctgcggagaatgacgctcactctgcggcctggcctcgcctccccatcccttctgcaaactcacaggacaggattgatggggagagcccaggcgaaacgaagctgaccctagtgaccagccctactggcggctctggaacaggcccgggaccggtggcctggagacagtggtcctttctggatgggctgcagtctccgaaggcttcccccactggagtcagccctttaggagtttgtccagtgcctccagaaagctgtt

SEQ ID NO: 64025 - DNA, 1985 bp, Homo sapiens
gcacttaggagggagcagacactgatctaggcttcctcccaacggggctggcagctccagaatacttgagcacagctccccgccaggagagccacgtcctccagtttctgttcctgaaacaccctggaggagccggctgtgagccctggtgcagctggaaaccccagcaaggtggtcagtgtctgctcctctgtggaccagcctgcctggctactcagtgatcggtgtgactcaagttctccttcaaacaaaactaagaacatcagactccaaacaagcccctctaaactttagggaactcctttcctctgtagtcaaaacaggcagacagcgggtccgaacaagagttgatagcaaaaactacaagttatttatttacaactgcccattccagccgcacaagcccaaatccaccaccactggcggagcggtggcacctgctgccctctgagtaccggagcgcccgccgcagccgccggggaccccgagcttgggcagggccgcaggtcgcccggtgaaccgaagcagcagtcggaccgggcgcctgcggctggcgcgaaggaggctgggcgggggatgaacgcgcccagagggcagaggcggcgcggcacagggaaacccggaccccacgcgccccgaggccccggcgccccgagtccccgcgcgcccagtccggagctgcaccggggcggccgccggcctcgcgacccctcccgcggcggggcacggccccctccccgcggcccctgggcgggcgcgctcacgtgtggccgcagctgccgatggccacgggccggtgatagacctccaggcagatggggcaggtgtactgcgcctccaggccgctgtcgccgcccgccggcccggccggcggctgccgctgctgagccgaggccaccaggctgcggaacatagccatcccggggccaggcccgcgccgcccgccgcccgctgtcctggcccgggccggcccgctagtcacagccgctactgcgccgcgctgacgtcatcgtagggcgccgcccccagccgggcttcgcggccgtcacggcgccactccgacgtcatcggggcgcgccctcgcgctgtcgccgccacagtctgcgacgggacccggcgtgcccatgtgtcaggtgggcgaggactacggggagccggcgcctgaggagccgcccccggcgccgcggcccaggtaagagctggcggccggacccgccaggccgcccctcgccttcccgccgcactcctgccccgaagggtcccggccgggcttgctccgggaagccccgcgtggagagcgggacctcgctccctagcactcggggaatgcctgtcaagcggtgacggccacctagaaggggacttactccactggctcgcgcctctcatcctagcagccactggggacggctctgccgctgacagtgctgtccttattcggagagaactggtgccgtgaagctgtctcgcctccccgtgtcagccttgggagactgaaaagcggcctttatgtgccccctgagccggcttttctaggctaaacatccccccagagcctttgtttttcttgaagtttggacagaacacaagcctgggtttgtgtgtgtaccgaggtgcctttctctgacccaactcagggtgagaaacaggagctgtctccccaaagcccactaggcgtggggaagatgtgatctgtgtttctctcttctcccccctcccatctccaaagccgtgagcagaagtgtgtgaagtgcaaggaagcgcagcccgttgtggtgatacgagccggagatgccttctgcaggtgaggcctggaggtggctgagaccctggcaaacatggcctcgctagcagacaggatagccgcaacttgtgatgctttgttaattctttttaaaaacatgtacttactttattcctgctcctgatggggtccctcgtgcccctggtgttgaagtggaggcgaaagcattggtttcctgctt

SEQ ID NO: 64026 - DNA, 804 bp, Homo sapiens
aaaaggactggaggaaacagacagaagcagggcaggtcgcttggtccaaccttcctctcatcaaaggaaacagaagctgggaaggacatcagtcgtctgagtccccagagctcacagcggcagctgcagggctagaacctgggcctcctggccggggcaggcaccttgctaggtcttgacttcttttgctaccagctgagcatgggaagctctgaaaggggccgggtgagggcaggcgaggatcagagttcgcggatgacagctgccaggccagggcagctacagggagccggggtcctggtccaagccccagctgccctccccctggcctgctccaactcctgcaagagcgctctctgccttatttggcttggaagagaaaccgataaacactcccgtgctagtgctttcgacggtgggcggggccgggcagaggaagagaggaagaagagcagacgtggtacaggcagctcctggcggccgctgctctgccctgctctgcaagggagcctgctgggccttccctgccatgaccccaggcagagcacaaaaagcaaacccagacccagaggggccatgagggctcagacggatcccacttttatggaagaagaaggctggcaaggttggcccaggggacggggggaagccagcccgcccccagacgccccgtgcagcgttcacagcaaggtctatggaggttcacacgggctgcatggcctaccaccccagagtgccagcacaggagccttggacagcagacagagggggaagctgtgtggggaggggacctggggggctccc

SEQ ID NO: 64027 - DNA, 1364 bp, Homo sapiens
gcacttacgggggcccagttcctctaggagggccctgctcgaggtctcagcctgtgagcagctcctgtgtgaacagggcggcccaaggcagaagctggaggtgagcagaaccggctccagaccagcagccaaacccctgcttcttctctgggattctgtctcttcatctagaaagtagcagtgggccaggtatggtgactcctgcctgtaatccagcagtttatgaggccaaggcagaaggttcgcttgaccctgagagttcaagaccaacctgggcaacacaggaaggcctcatcccgatttaaaaaacaaaacaaaacagaacagaacaggaaggcactgacatgcctcgtcacctggagctgccagccagggtctggcgtgatacaaatgtgcagagtgaagaaccaggtcagggcagcactgggtaacagccggtaggtgctccctgacactctctggctgacccagggagtggacagcacattccagaggccgcatggaccacaatgattacattgattagcatggaagggccgatgttaaggtctgggtaaacaaggtcgctctgtgacctggagctggccccgcccccagcattccagactaattgagagggtaagattcctgaaatgaaggctttggaagctaggaggcagctctccgggctctgtgaggccgtcacagccatcctgccccaggcacacctgtacacctgcacacagggtcggcacgcagggggtcaggtgtggttggaagcccgtggttcagaggggtttcaggagcccacagcctcctgggggccaaagtgcacgatgagccacagttagcaccagatgctgagctgggtcctcagggaaggcttccccggggggcaccagagcaggacccagtggcaggaaggatctgggaacatcagatgcgaaggtcctgggggaaacccagaggtcatgaagctgcggagggtggggcggggtacgaaaggggatgtgccttgagacacggggtctcggccacaggagatggggtcctcttgaagccccagcagcaagcacgtggcaatgccctcccggcgcccaggttccatataacccattctccagagctgaagtccacaccaccagcgtcgctggatcctgagcaggtagattcttaggctgaggttcatccaaacccaggcgccatgttctaaagtgtcctctgggaaacatgaacgtgctctccaggcagagatcacgcgtcgacattcccctgccaggccgggcgcggtggctcacacctgtaatgccaacactttgggaagctaaggcgggtggatcatgaggtcaggagttcgagaccagcctggccaacatgacgaaacc

SEQ ID NO: 64028 - DNA, 908 bp, Homo sapiens
cccagtgagctgggatcgcaccactgcactccagcctgggcgacaagagtgaaactccgtctcaaaaaaaaaaaaaaaagaaagaaaaaaggaatgcccctgccacggcctgcctttgactcccagcatcatgccgtgacctcccaaaacgaggactccgccctcggcaccaggggcagacactggcgaccactccaaccatggccccagcaactcaccccagagaggcaacaagggcttcctaagaagcctggccattgaaaacctcccggtagccgcctctcaggagcactgccttctcaacacagctacctggccctggcagacccggctgcccactgtgtcctcagcggtgctggacccaggacagaagatggggtgctgactcagagccctcaccctgtgatttacccagcggcacccagccccctggcctgtccagtctggcctgtctagactgccccagggcccagtcacaggctggcctgctctctagggacttccccggcactcagagaggaatgcaacctggccacctccctcgcaggcaggaggggagtcaccagccactcggaggcagcctggagagggggtgtcacgggcaggtgtctggtcacactcccttcagaaccttgcttccccttccccccaggccactgggacagggcaggagagggaggggaatctcagggcaggtgtccaggatggtcgtacatcatgtctgtgtacttctgcaggagactggggtctggtcctagctcagccctcccctctctgtgccttgagttcccagtaagtgaaatggggacagaattgggcacctgtaccagaaccatcttgccctcccagtggatgccaccccagaagcactgcccggacacgtggccaggtgagcacctcgtatagct

SEQ ID NO: 64029 - DNA, 3376 bp, Homo sapiens
ggtggggcagctccctgccagatttttgggtaatgatcctgcactggagagggagggcgtgggggccaggggcaccccaggatgactcaaaccctcaccaggcactgtctgagccagcgcaggcacacactgactaatgccttctgaaggcctcattcatttccaaaacacggtagaactgcttccagccaaagctcgccagagagggagggggcactccaaagacagcaaagccagtgtcccacctccggccaggccagctgaacctgcacatcgcgggtccatctggagctgcccacaccccagggccagagagcctgactcaggagtcccggccagcaggcaggcaggcagggttcttggccggctccacttccatctcccccaggtgactgagagaaaacactgagtgaggcccaggccccacgccccatccccagacacagaatcagtgtggggtatggcccgggcttcagcatctttcaaattaagagactttatttgggaccagttttaggtttaaggaaagtaccatacagacagacagtcagtcatcactattctttaaaagtttcatagaagactgacacggggcctgggtgagcacccctgggctacctccccatcctccccaaggaggccaaaagcaagaagaacagtgatccctcccccagatcccccacgcggatagcaatcgagaaggcagaacccaggccccctgaccaatgcccagggggcagcaaaccacatgtgccacagaatcgggctcaacacctgtttaggtacagcccatgaactcaggagggcttttacatttaatggctggaaaaataccagaagaagaagattttgtgacatgaaaatatttaccatctggtcatttaaagaaaaacattgccaactctgcccaaggagcagctgccatctgagagggggggcattccctgcagggaggacacccgctcccactcagacacaagaggaaatggaacgatcagtgtgaacgggacgtttcagaagctttcctgtttccctctctaaggcctgtcagctctagactctgcctctgtgccaggctgtcctgcttgttttcaaggcacaggaaggaacacagccgggccctgtttacggcccatctgaccctgcactgggagcaggtcccaggctgcccagtccacacagggctgaccgcactgaagagagttgctcaaaacctctcctctccagcctcaatggttttcattgattcctgtctagaaaatcttccccaagtttcaccacctttctgtgcgaccgatcaaaacgcagtctgtctgggagcctcaggcaggcggctctagatccccaaagctagcgctgggcgagctcccacctggagcgaggcaagggctccgaaagggcttttacaatcaaaaggccccacctgccgtgtccatggcggactcccaatgcaaaccgtcccacttgtccgtgggttaattccatccgactgcttcccagatcaatcacacgtggggagcccccgggcggagggcgcggaccctgggtcccggctaggccagggtcggggaagggtaggggtgccaggccgtgcagcaccaagccacccgggtgtgcttcgcgaaaggggcaccactgcccggcaagcagggaacacagatgccaggactggggacccctgccccgccctgacaccaggccacagcctccgggggtgtcccctcccccagaccagggcagaggccggcccccgcccctgcgaaactgagcccagtagggcaagggaggaccagggaggaacccacactatttttttccaaagtgtgggaccgcctcagtccggcagaggggggtgcagcggtgagcggggctgggccctgggcacggacgttcgttgggctcgggaagctccaaattaaacagctccaggcaggaagcccgccttctcccagattgtcaggaagtcctgatgcaactttgcgcttttttttttaaacccgaaagagaaaaagagattcgtgctccccccaccaccgccgcggcccttcccaccggggcaaacaccgcctcgcccggcggcctcctctccgcagcgccccggcggagacgccagccgcgctatgcccggcgctcgctcgaccgcccccgtgggcacgcggtgccgtctcccccagccgccgccgcccttccagcccggccctgggacaggagccccgccgccgcctggcgcgctcatgcttcaggaatgcgggcgcccgggtcgcgcgtccctgggaatttccgcgcccgctcgcccgcagccctcgccccggccggcgtcgtccggtgtccaggccgtggggagccgagacgcagccccctcccgtcgcccccaggcgcccgccccccactcaccagccagcagcgcgcagggcagcagcagccagtacaggaccgcgccgagcacgtgcggctccatggctggagggcccagggcccggcccagaccgagcggacgccgcggcgctatggggcggtgcgggggccccggggccggcgcgccatggctgacccgcggggacccgcgcgccgccttctcctcttcctccttctccttcggccgccccgccggtgccgacgtcccgggcccgcgctcgctcaggcgaccgccctgcccctcggcggagcgcagcgctcggctcactggggccgagctgggccggacggcggctcccgccctcctccgcccgcgggcctttataagctcggccccctcccgccctccccggcgtgcccgcctccgcgcttccccgacggcccggcgcgcccaggcaccccctccgctgtcccgcgcggcccgtcccgcctccggcccgccctggtgcgttggggcctggagacccccgactggcgctggcccggagcggacccctcccctcccgcagtcttggccccgcggctccgagcgtgcgcggcggtgggcaggggcgcttctcgctgggtgggctgcggctggggcccgggcgctacataaggggtcccggggcctctggctcccccaggcagcgccccacgcgcaactgcaccccgcgtgcccgagcgactttcgctttgctccccgaggcgcgagcacgcagcgccccctggggaccgtggggaggctcggagttcccgcggcggccgggcctagtggtcccggagggagcacgcgggatgctcgggtcgcagcagtgccgcgatccgcgttggtctgacgggggctcgggggctgctcccagccacgccggccaccgcgcgcggctttgcccgggtcgctctggcgtgagacggtgagagtgagagccacggcctgtgcacctgctgccgcggcgccctgccacggagaggtagggtctga

SEQ ID NO: 64030 - DNA, 887 bp, Homo sapiens
agcttgtcaaataaatgatagcgtgtctcacagtggagtgctacacagcaggtaaaaaacagaatccggctaggtgttttgtatcaacatgaagctaagatacaatggcactctgtagcagcggttagagagaatcccgcaattgctctgttatcaaggaggaacaattgctaagttacagtgctaacaattgggaaaagcaagcagctacactcagggccacgctcacccacttggggtgggagggagacctggtcttcacctataccctttggtgctgttttaatattttgcttcatacataattcacttattcacaaaataaaattagcaaaatggagacaaatactctgaaaaagatctctgcttgccagccagggagaggtggggcgggcaagggcaggggagcccacctgtgcccagttcactgcccgttcaggaatttggaccgtgttctaactcaacccctgttgcagaagaggacgctaagggccagagcgggataaccatttgccaaaggaatagaccggcctttgcacccagctttccagattccaagtccaaagtcactcctgtcccactgacccacagctgggagccctttctcaacttgctgttgctttttatttttgtcactgtttaaaacagtgatttattttttattttattgtattttcttgagacaaagtctgccactgttgtccaggctggagtgcagtggagcaatctcggctcactgcaccctccgcctcctgagttctagtgattctcctgcctcaacctcccaagtagctgggatcacaggcgtgtgccaccacacctggccaacttttgtatttttagtagagatgggatttcaaaatgttggccaggtcttgaactcctga

SEQ ID NO: 64031 - DNA, 956 bp, Homo sapiens
ggccacgcctgtgatcgcagcgctttgggagggggcagttccaagagagcggatcactgaaccggggagttcgagaccacccggcaacgtaatctccgcctcgatagaaatagttttttttttttttttgagacggagtctcgctgtcgcccaggctggagtgcagtggcgcgatctcggctcactgcaggctccgccccacggggttcacgccattctcaggcctcagccttttgagtagctgggaccacaggtgcccaccaccacgcccggctaattttttgtatttttagtagagacggggtttcaccgtgttagccaggatggtctcgatctcctgacctcatgatccgcccgcctcggcctcccaaagtactgggattacaggcgtgagccaccgcgcccagccagaaatagttttaaaaaaagaaataaggagcgtgcggcccgcgggggaagcgcctttaccagctcgagcctgcagccccccaggccgcgccgtcctcggctcccccgggcagcgccggggttttgtcaggcgcgcgctgctgtttgcctggattgcgctcattctgaccctgaagccagcggccccactgacacgccctgaaaagtgggagccacacgcgggatccggagaccgcgctaaagtcccacgcacgacggcgcccgccggcgagtccacgcccgcacgtcggcgcatgcgcgcggccaagccggtgcccgcgcccaccagcgcgcatgcgcgccccgtcccttccctccccccgtgctctgccccgatggttcggtccgcgccgggggcggggccagggcgcccgcgggaaatttggcgggaaccgcgcccgcctcttcctcccttccttctttccttgctttcgccgcgcactccgccgccatggagcagcgccgcgtcaccgacttcttcgcgcgccgccgccccgggcccccccgca

SEQ ID NO: 64032 - DNA, 2233 bp, Homo sapiens
ggtggcctggccctgcccttcctctggccaccccagccctcttaccttcccgtactccagggaataggaggcccacagagtggggcctggcagcttcccccgctttcggatgagcacgcagcccagtccaagctcctgggccagggaggggccaaagaggaagcctcgggagtctaggcctgtcagggtaagtgacaggagtgactcggcagcatgggaatccccaggggccagggttggccggtggcaaggggtacctggttggctcccagctgaaaggccagtgacatgcaccatttaaggaatgttacccatcacctacccggagctgcttccaggtcagagtgcagacctgggtctgtcttttaagggaccacttcttagctgtgtgttcctaggggagtcaccacccctctctctgagctgagcagcccatctgtaactgggctggtagaaacctgacaggcctcagcttactctcaaaggcagctctgcaccagggcttctgtctaaaaagggagtctctcgaggtggcctgagctgtgatggttgggggacgctcagggaaaccctgccccggcctggcaggaggtcagggagggcttcctgcaggaggtgagaagggagctctggcagtgttgtggctccagcaagagctggcgctttcctcagggcagtgtccagggagtgggctgtcacaccctaggagaggcaagacggccaggaacactctgttctccctgggccacctcttgggctctcccggaggcctccaggcctcccttccctgggtgggcattccgtgatcttcaccagggaaggcctggctcgtggcaggcgctcaataccagctcgcagaaggaacaagaagcaaggcagctgggccctgtggattcagcttgggcactccagggagaccaactgacccggcaactcggtcacgcctgtcctgggctggggacccggaacctgcgggaaggacgcctgcacagcgcggcggcctcgggggctcaatctcacaacccttcccgggcgacccaagcacggcgcccgtcccggcgccccctgaagcaccccaaaggccctcccccaagcagacgcgcagagcccacgtgctgccctcggcgcgcgcagaggcggaagcgccctagatgcggccactgggcactcgcctgcgatgtagtcgatgcggcccccgtgggtcgccttcaggtgtcgcgccaggaggccgatggcggcgcggaaggaggcggggtccttcaggacgggcgagatgtccctggacccaaggacaggcctggtgacgccggggccgaaggagggcagggccccgggggcgaaagacgagggttcccgccccgcccgcccggaggtcgcgggccacgcgctcccatccgtaggcccgcaggtcggggcgccacgagggcggcctgtgcgtgcacctgaataccacgcctggggtggggaagtcggggaagctgcggatccgctgctcaaccagctgcagctcggagtcggccatggccgcgtgcgaagagccagcggcagcccgagcgcgcctgcgcggggacgggcgggaccgccacgaggggtggggcatccccggagggcggagcgtgggtgaggggcggggcatccgtcgccggaagcctgtaccgtatttcatggactcctaggcgccatcgattttaagacgcgctcgcattccacgcaccactgagcagaacgttcgaaccggacaaaagtgcgagtcaaggcgcccttccttgtctcgggctacgcttctgactgcagccaggcagctgtgggccggggccttggcggctggaggaggggcgtgagctggtctcgcccacgcacctggcgcgcgtacgggccgcgccctttctcctttattggccgagatccccacgctgcgcgcgggaggctggcgcgcggggtggagaagggcgtgaggaagcggtccaagtagcaggagggcggtgcagggcccggagggagcagcccagggcggaggcggcgggcctgggctggaccggccgggggcgctggcctctcgcggatgggccctgccgttgaggcggctcttccccgcccggacccgggggagggaggccggaaggtgtggccaggccagggcgcgcatccgcgagggcagaagcccttctgtccgcctgcagaggccaggtgaccccttagccttggggtggggagctgtgaaccccctggccgc

SEQ ID NO: 64033 - DNA, 1809 bp, Homo sapiens
gcagctctcaggcagggcggcaggagcagcctcttcctccctttggggaggccacgctgcgcgcccacctttcccaagagtagagggcgggaaaggtcagacgggggaggcagggcccggtagcacgccggccacccacctgccagggaggacgctgtcccggtcatgcagcacagtggcagcgcgtgtggtgatcggtgaccgccgagaccccacgcctggaccccgcggccactccccgaggggcctccccctccccgcacggggataccccccgtcccctccccctcctcctccccgcgcggggcctccccccttccccaaggggcctcccctcacctctccccccaccccgcccgcccttcccccacctcgctcctccctccatccgcccctcccctccccgccccaccccggccctgccccgtcccaccgcccgcactcacgtcgtccatgagcaggagcaggatgttggggggctgcggggcgcccgaggcccccatccccgcggcgctgagcaccagcaacagctgccaccacctcgtcgccgcgacaaccgccgccatggcaaccacgggagccgcggagccccggccagcgagccgacctagcgagcgtccgccggcccttccggctgggctgcggggcggggcctggacggccacgtgactcgcggggcggggccagagtccgcggagggacgggaggcggggcctggactgcctcgtgaccagtggggcggggcctgagccagctgtgtgcggatggggcggggctttggaggccgcgtgaccagcggcgggtcacgtgacgcggtgcctggcgccgagcctcccaagatggcggtgtgcatcgcggtgattgccaaggaggtgcgtacgcgcggcgtggggcgtccgggctcgcaccatcctcggctctccgctttctttctacttcttccctgggcttagaaggcaccttaggaaatgggacctggaggaggccttcgccgagctccagcggtcaggggcttcgcggtggacgagccgccaggcagaccctgactgagaccccagttccgcgctcgcccgtcccgctgctgaacgcacccctcggcgcagcaggtctcctccccgccaggacccaccagaaacctaggtggtcccgggcactacctccgtcctccgtcctcagcaggttctgcccgttctcccgtccagcgctggttccccgcggacggcggccccggccctcctgccagtctccccggagccgagttaaaaacaaatcggatcctgtcacgcctctgcctgagacctctgcagtggcttctcgttgccttaggatgctgtctgaataacctgctctgggatcctttccccccataacccttggcactctccgctccaaccaaacaattctgcagctccctggacatgctctgccctctcacctgtgggcctttgcacgcggaacacctctccccagctcccatcctctttactggcccacatacatttcaactggaaagcattttctgaaggctaagactgagctgggtggctgcccacacgctcctgctgcacggagccttcatttcctagccagggtctcccgagaccagactcgagaccgctccctgctgggcggtggctgctgctaagctgctcatgggcttccctcttggccaagatgatcatttgcttgtttgtgggtttattgactaggtatcactccccacgagggtagcgaggactcttgttcactgtatttgtgcaggacccagtgctgaacacacacagggtaaatggtggtgtgtgaaagacc

SEQ ID NO: 64034 - DNA, 1761 bp, Homo sapiens
acgcagctggggaggccatgtttcaactccaccactgaaagagaccctgaggccagctggagaccccggtaccgctgcccaaccctaaccctaaccctaaccccaaccctaacccctcttgctgcccacatatctggctctgccccagcccctcccccaaggctgattcccacggcatgagcaaatgtccccacagccttgcccagcgctcagctccacgtctgcccctgttctgaccccattctgcccggactctggccccgcgtgcctgacgcgcccaggctccgagtgtgtgcgcttctgcgtgccctcctgggtgtgcaggtccaggacccactttattctgctgggcggccaccggtccgtttcctggtaggcgcaggtagcagctgtcctgccctaagtgtgaacctactctgacctctccgtgagccacacagcggaatgcagaaagccttgtagcctgagcccccagagagagacagaagctcttcaaagctgagccggtgagaggcgcatctggggccctggcctcccacagctctgctggccaggcccctgcacccccactcaccagccttcctccagatgtcctcaggcacgtagccggtgagggtcctcggcaggaactcgcgaggcacgtctgaaacaggggccggcgtcacacaggatgggccacgcggctgcccctcccacgctggggccctccccaccctggctgggccctgagtgcagggcgtgagtgtgtgcgtccctggggggaggcccaggtgccctcggacaaggtctggctcaggcacccagggcagtgcccgggcacggggggcattggagctgtggaccttggactcggctgggagccgtgtgtgtcctgggcctctcctgtgtcagcattcgtcgctgaggcggagaagcagagaccctcagggcctcccagctccgagcctctggcccaccagacgctctgagctccaggcttcctggcagaccagcccgtgttttcctacaaagtgaaaaaggtgcctctttctcaagcgaaactgttctgcctggtgtttcgttgcattgcctgcctgacagctcccaggtgtccgccccaccagagcaccccgtgtctgctccctccccccacaccccacacgcacctagctgaggcccttcgggaccggcggagctgctgcggggccgggccgcggcgggagcggggcccttctttgtgtcctcggcgtcgctgtagcgccgcgcccagtggttgagctcctcgcggtcggcctcctggcacctgcgcagcaccgtgagcgagcgccgcgtcttctccaccatgtccatgatgcagttcaggagctgggggcgggcggcgcagccttcagcacctcagagggaccgggacgcaccagacactcccccagcccactcggccagagccccggacaggatgggtgcccgaccagcccaccgcccgtgagagtaagggggtgagggagggcccacctccatggcttgcaaagatgggtccctagcctgggactgccgagcgcctgggggtaccagactcacatggacacgtgcctagacgcacgcaggagtttgggattctcctttttaacccgctcagcggggctctgcctcagggacctggctttccgcctgggctccccttccaaaaagcatgagggcgaggggcgaggctgacaacagtgctgggaggggtgctggccccatgcctggcgacccctcctgggacgtgctgcaggatggggt

SEQ ID NO: 64035 - DNA, 596 bp, Homo sapiens
ctggttgacttggtgaccgtggaggatgcctgggttactgagccgcctggggctctgggccgactgctcttcccctgcaacacggcacacgcctccaagggagggttcagtctcagtcccattctgcagctgaggaaactgaggctggttaagaggatgtgtttgcctgtggtcaccaggcagggagcggtgggggtggggtgtggaccgaggctggctggagctggagcagtgtcctcagccactggccgggaaggctttgttagactaagcgtggcctgaggatgcctcagtgccaagtcacaccatgacctggacctgccttagtccgtgaatcaatgggtaacctcactgggaggagctggtctcagtcattcgcggcagccctctgcggtcacccgcaggcgcccatgactccgatgaagccacgccaaacaccacccaaccacgtggcctcggcacccgcctcctgtctctgcctgtgaacaccgccagccaagccgaggccagggctctcggaacacgctggctctgaggcccatcctattcggggttgttctctgctcagttaaactctgttcaatacagcgtgtcta

SEQ ID NO: 64036 - DNA, 1425 bp, Homo sapiens
tggcgggcgcctgtagtcccagctaattgggaggttgaggcaggagaatcacttgaacccgggaggcggaggttgcggtgagccgagatcacaccactgcactctagtctgggcgacagagcgagactccatctcaaaataataataataataagaaaaagtaacaacaataataataataataaaatcacccaggagctcagcgtgcagacccccagccgcaaagcccagagagccccttttgggaggacggggcgaggcccagcaatccgcgttgggagtggtcccgcgcgccgttctgatctgggcagccctgggctagcggagaccacggcgccttgcctcggccacggctcacgagacgcccgcggccccgaccccgccacgacgggacgggcgggacaggggaacacgcgcgcccggaacccgccgccacggcgccgcgccggggggacgcgcttgggcgacggacgcgccgcgccggggaagctgttgggcgccggaactggtccggcccgactcacgaccccgcgggacccggccggaacccggcccgaccccggcgcgcgcgcggcggaggacgaggaagagttgtggcgaggcagatcctgccccgtggccgcggccgtctcgtaggtgcgggcggcggggcccacgggaccgcggcggggtcggccgggcgcagagctctcgggggcgcgggctccggcgcccgcccctgggtcgcagctgggcttgagccgtggcccgtggcgcggtcgcttccccgcgagccgcctggggccgggcgtcggccttcccgggacgccgagcctctcgtgtccggtggggagcggggcccccgcgcggggtgcggggagagaagctgtgcggacgccgggcccggtgataccgtcgagccggcggggtccgtgttcaggcatcctcagaacgaatcgtctttggttgtgtttggaataaattcacttccatttctcattgggcttcagaagtcacccttgaagtactccccgttttagttgtttgctgcgtgcaccttgctgggcgcgtggggcacaggttcacagccggcctagcccctgagggcatgtagatctatgagcaagcaatggagacgtgcggccggccgtgaagtatttggaaggtactgcaggcagcccattccctggagagagggaaggtttaaaggggtgaggcccggtgcagtcaggagttgatgttgctgtcctgagtctaaattccaccaggcaggccaggtgcagtggctcatgcctgtaatcccagcgctttgggcagcagaggcaggaggatcacttgtggccaggagttcaaagccagcctgggcaacatggtgagacccctatctctacaaaaaaatgtaaaaattagctgggtgtggtggcgtacacctgcacttccagctac

SEQ ID NO: 64037 - DNA, 410 bp, Homo sapiens
tgcctttaaatcaccagcagtgtgagttctttggtttggaaaaaagtaagtaaagtcacctcagcattaaatccaatatgccccacaaaaactccaaaatgcagcctcctgagccatgtttctagagggcacggtggaggagagctttcctcactctcaggctctaacccccaccctggtggccatggccttgacccttgggtcggctccagccacaggctctgagctcatgcttggcctcgctgctcagtgcactgtccgtgctcggaagagagagaagctgggtggagggtgagctctgtcgtgtgttatggttacaggcctgctccgtgcggttcctgtggagggagatgaataattcatggccgaccactgctgggcctcgtcacactctaattggaggttgagct

SEQ ID NO: 64038 - DNA, 2054 bp, Homo sapiens
tgcccttcagagctttgtgactcagacacctgtcaggctgctgagaaacgtgatctagtcacgtcagccctccccctgtctgatctccttcttctctgggagttctctgcgcgccccccgcccacgctcatttttttctcttttctgagtagtgacccccaattcgaagcctgtgggtaatctcatggtgcgtgagactccctcaccctccaacctgtcaaagcttgtgcgccaccgccacctcctgggcacatcttgtttcttaatcagccacgaaatcacgtgaacacttcacatgtggttttgttttgtttttcacatttagactcctgatccgtttggagtttatccctgtgagatccagaattaatttcatcatttctcagacggctaaccatttgtcttagcacctttcattataaactgcatgtttgttccaccgctctgaaattatgtttatgaaccaaatttccatgttactgggttgatgtctggatattccatttgtttcctgttcatgtgtcactagcacacagttttaatgacagaggctgttttcgcatctgtcgggcattgcgcttttgtttgtccgcgtcgtctgcgttatgagacatttgttcctccatgtgaactccaggatcaatatgcctggttccaaaaaaaaaaccttttcgtattgttactggaatcatgtgacatttctgaatgaaccttgggagaacccctggtatcagtgctattttgcaacgtagtataggtggtcttggctcctacggtacattagaaaagtaacagaaacgcatatttgaagcgaaaaatagatgaacatttacagaaaaaaaaaataccacattgaaaatgcagtggaatcaactgttaaaagttcggcgtgatgttcagacagataaaaaggaacggggccagtgactccctgcagagatcgagagaagaccgagcactcccagcacccgcgggcttctcgctgtgaccgaaccgcgggccgcgctcgcgacgagcacttcctggctgtacccgcccaaccgcgccctcctggtctgttccggctccgcagttgcgtccagaggcctgatccttacgtccgcctggtcctccgggcctgtctctgcctccagcccggttcccaagggcgccccggggccctcccgcaccctcgcggaagaaactactacctccccgcaccataggccaaagcttcggcccggaggctggaggcggaagtgacgccaaagacgcgccggcccctcttccggcgccggccccgcctccgcctgtcttacagctgatccggttcttgcggcggtgcgtgctggcgccggagagttccgcgcgtgtcctcgggctgtccgcggggaagctggtccgggagtgggcgcccgcccgcctgcctcgcgccttgcgcccccggcaccgcttccagaagggaaagtcgccgccgctcgcggtagacccgggcagcgcttccattccgcggagctggtgagagaggggccctttgcttccttcactttgaacagggcgtgtttctgtgagaatctggcttcggctttgacgttttttatttgtttctggcacattgtgttgggaccgaagcgtaaggtagacccctgagcgccccgggcgtgcagctccctgtgaaagttagcccgtgggggccagcgggagcgcgcgtccctcgccgccgggacttccaggcccggccctcggggcgggagggatgcggccgttgtcccgctggtcttggagtaatcgaatccacggtgaacagtgtgtttcgactaactgtattttttctcacgttttgctttagaaaatctgaatctaataaaaatgtgaacatctgctacaaggaatatccactgcaatcgttttactcctttttagctttgggccatgttttctctctcccccaataaataaaccttacggtgaattattatttgagtgtaagtaagttgaaattaaactgcacacatgatacttaacctttaaatacttggtaaagcgtctgttaagggtaaggacattatcctact

SEQ ID NO: 64039 - DNA, 558 bp, Homo sapiens
taccatatgctgtgatgtggatgtgattggtttgccctcatcaagtctcatgttgagctttgaccctcagtgtggcagtgctgggagggggcctggtgggggtttgggtcatgggggcaccctcctgaatggttggataccattcattcttgctgtgtcaagcctggattggtttgtaggggaatgcactagttactgggagcatggttgtgataaagccaagccgtccctcgggtttggctcactgcccttgaccttctctgccctgtttgacacagcaaatagtcctcaccagaagcaggtcagatgccagtgctatgcttgcacagcctgctgaaccatgagccaaataagcctctttctaagttacccacagcctcagatatgtagcaacacagacagactaagacaccaagcatgatggaaaactgggttatgggcaggactgcaagtactggttaggcagatacctgtatttctcttcctaactctcagaacgtgttctgtgtcacttagggcaacttatgccctcctgtgtgaaaatctccactcccaatg

SEQ ID NO: 64040 - DNA, 1529 bp, Homo sapiens
agaaaagaaaagaaaaaccccatctgtactaaaaatacgaaagttagccaggcatggtggtgcgggcctgtaatcccagctactcagggggctgaggcaggagaattggttgagcccgggaggtggagcttgcagtgagccgagatggcgccactgcactccagcctgggtgacagagcgagaccccgccttccccccgccccccaaaaaattacaccgttcacaggaataagctgcaaatggatcagggatctaaatgtggacaaaacgtgcacacgtgggtgatgtgaatggtttcggggcgattgggaagagggcctggccagcagggggcggtagcgcaggcagaccgggttccgcggtgcctcgccggcttcggggtgggggtcaccgctcagaaggggaggagagcgagggacttccggggggaagggaggagagcgagggacttccggggggaagggaggagagcgagggacttccggggggaagggaggagagcgagggacttccggggggaagggaggagagcgagggacttccggggggaagggaggagagcgagggacttccggggggaagggaggagagcgagggacttccggggggaagggaggagagcgagggacttccgggggtaagggactcggtgaggaactcgggggatcggagaggggctcgtgtgctgggcgacagtgacacactcagcagcccggcgggagccgcggtcggtaccgtctgaagggcagccggggctgggggaccgacagctctcaggtgtcggtttttctgtggctagcggatgtttggcaccatttcacagggcacacagggcagacgggacctagatgacgacagatctgcgtgtttgggctctgtttgaaacagacctcagccagagtcttgaagagcagaacccggagtgttgaagtcacaagagatcaacatccctacggtgtgaaatcctgaaaacggcaaatcccaaaggacgaaacgcccgaaaatgatgtcatcctttaagtgttttcttcttttttcttttctttttcttttcttttctttttttttttttttttgagtcaggatctcgctctgtcgcccaggctgcagtgcagtgccgctatcgtggctcactgcagcctcagcctcctgggctcgagtggtcctcccaccagagcctcccacactgctgggattacaggcaccaaccaccttgcgcagctagagagtaatttttaaacttctttaaaagacagttagactggacatggtggctcacgacgggaatcccagcaatttgggagctcaagctggggggatcgctagagtccaggagtttgagaccagcctgggaaacagggagaccgtgtctctacgaaaaaaagtttaaaaaattagccggatgtggtggctcacgcctgtgcttccaggtattctggaggctgaggcaggagaatggcgtgaacccgggaggcggagcttgcagtgagctgagatcgccccactgcactccagcctgggtgacagag

SEQ ID NO: 64041 - DNA, 810 bp, Homo sapiens
aataaatacatccgacgtttcgtgaaagctgactgggcattagtggatccaagcaccaaacaggacggcaggtggagacgtgggacagaggcgggtggagagagaagccggcgggatccaaggccccagggcaggccctggcagcgatgtggcagcccctctgcagtttccacgctggtagtcgtgaagtaaattctaggccctgctccccaaccggcgcgggccgccctcgccttcagctccaatgctgctgcgccccaggccgccccgctcctggcaggccccagcctctgactcagccccccgcctagcccctgagagcagcctctccgcgggactggcctgtgcgcgcgcgtctgcggcaccgtcggaccaggggccgcccccgagcggggagcccaggaggacggccaggtggcctgaggcagaggcgccagggaggatggagaagggacacccagggcctaggcggggtgggggcagggagggcggcgggacagcaaggaagtgggtgcacctgggtgacccagctgcgcatgagcgggcaggggctcggggcgcgcggactccaggcgctggactgcggcgtggagcagcgctggggaaaccgcgccgggttcagcgaggattgctgggcggggcgcgcgaggagcgaagctggccgggggcggggcctgagtcgtgtcggggcggggcctagacccgggctggccgtggtgggcggggcctgagtcgtgaaggggcgggccttgcaggggcggggcctcgaggggcggagcttgcggtgaccagcgagggggcggggcttag

SEQ ID NO: 64042 - DNA, 1726 bp, Homo sapiens
aggctgaggcaggcggatcacaaggtcaggagatcgagaccatcctggctaacatggtgaaaccccgtctctactaaaaatacaaaaatgagccaggcgtggtggtgggcacctgtagtcccagacactcgggaggctgaggcaggagcatggtgtgaacccgggagacggggcttgcagtgagccgagatggcgccactccagcccgggcgacagagcgagactccgtctcaaaacaaaacaaaacgaactaattaaacaaaacaacaaaagaaaacctggcatcagtcctggtcactgtgctcacgccagcctctccatcccggctcctcttccaactctgcttcctgcttcagtgactcggatgtcgcccttcgccccatgcccaggaaaccggaggtggcagtgggggaagggagggaggcgtggagaagataccctgtcaccatctccatgcccctccccgggaccacacaggtcgcctgggccctgaccaaatggttcgttgtccgccaagccagacagcagggcaggcgcgctctgtgcaaaaccgagtcgtgtgcgggcccagggtggcgctcggggcgcttccagcgcacgtcacctcatctgcgtcgtcaccactgtcgcctccgaaagcgcattccgtcgtcaaaatacaccacgaggtcccgggtgccctcaccgccctccccttcctcgccctctcgtcgttgctgttgggacgggctctcgtcgcccgcgctggggcgcagtgactcagtgtgactcaggcctcgcccgcgctcgggctcacggagcagctgggacgacgggcgtgagcgcagaagccgcagagcccctcgcgcgcctcgcgggggtgtggtggggggtggccgcctccggggacgggcgggctgcggggctccgaccccgcggcagcgtctcgcggcgcctgaggccccggtgggcgtgggttccaggctgcacggctggtttgccgtctgggggtggtttgtgctgggacccccgcctcgccgcaaggaccgacgctttccgtatcccgggttcctgcttcggtgtaccggcagaatctgatcacgcgtggcctggagaatgcgcccagggtcgtattgcctggaaggagctctcagccgctgggggagccggaagggagacggttctgccctggacgcgggctgctcggcggccccggctctcctccaaccggccaaaccccgcctggtcccgccgccggtggctgctgctccctcgccgtcttcctgccgagcagccgctggcgtcttcttccactgatctgctcctctccacgtccggctgccttgtcggcctgctagggtcttgggtttttatagtaccaggatgggggcatggcgggccagggtggtcttggaaaatgcaacatttgggcaggagagcaggagagcctgtcctcaccgaggccggggaccctcctttctctacccagcacttccctgcccccctctcgtatcaccaccacgccccggctattttttgtattttctgtagagactgggtcttgctgtgttgcccaggctggtctcgaactcctggactcaagtgatcctcctgcctcggccccccagactgctgggatcacaggcgtgagccaacgtgcccgcctccctcgtgatctctttcttgactgattggttatttaagagtgtggtacttaattttcatgtttttgatttttccaaattct

SEQ ID NO: 64043 - DNA, 2653 bp, Homo sapiens
ggtgagcaggtgtttccatccaccatccctgatgcctgaggccagacatattttctctctctacctgaaccaatgaattttacattctcttccaattttccaccacaaaaccggaatgtctcagcctggagaaagggcatctcagcacctgactcggaaggctgttcaagctcatggctgtctagaaactcagtggtaatgtttacaagtttaaggattatctggaattaacattttaaaaaatccagactgtctgctctcaggacggaaaaacggggccttcaccatgtagagtccaccgtcctgatcccagatgtgagtctgtggcccacggacacactcaacagctctggcgtggtcagggcgcagaccccacggcctccggacggtgtctgggccccgacagtgcggggcttatcacttcactcctgagacacctgattctcttcatgtccctagcttggtgctttgcccaggcaccttccccaatggaccagggatctgggagtccactcaggaggtggaggaagtgggtcgcacccaccaggcaaaatacttttcacggcctgcatcacagcgaacactccggggactcgggagtgttgtcccaggtgtacgctgtgttttctggagacgtttctccagccacctgcacgatgacagctaagaccatccaggccgtggcccttccaggaccctcgtgtccgcctggccttggctacaacatgttaccgatggcagcgatgtgctcgaggccctgcaaccccagcccccgcctctccatgaaccaccaccctcatcacagtcatggagatggtgacagctgagatgtcctgctgaagcatctgctggatgtggatgaagctggtttggatgtagctgccatctagcccaggctacacctcccaggacccgcctgcaggcaccaggcgtgcagcacgcggcccactctagagtctttttcaatgagagaccagatgaggacagaggctccagttgcttttgttctgttccaagacttgccatcccagtcctcccagaagctgccctggtgatgcctctggcacctttggcccccacactgccctgtgttccctccaccaggctcagggctggtcagcctcaccccttgccgtgaaatggcagagccagccgagggccgaggaaccgttactcagccgtgtcagtgacttctaccaggggctgcacggcactcaggagtcaggccaacaggctctgctgactcatgggtgttgtctgagggtgggggctgtgatgatgtccccaggcctccctggcagggctgtcacataaaacagtccttgaagctgggagtcccctctttagacagttccgcagcccctgtgccttctcatcacgatgctgcacagccgaccacacaacagaaggcaccgggtctcactcccgggggagactcttccctggaaggtgacttggctgtccctgcctagactcattttaagtgcagcctaaatctccctcatttccaagttatcaggcaaagtctattttaaactcacgacccttgaatcagcaggaaactgaaacacgcctcaggccactggggctgactcacgccctgtgctgagcggcaaggcacagccgcgggaaggtaaacgcagagccgaggggccggccagcacctggccctgaccgcccccaggccacgcattccttgttacttcacctcctggcggatggcaaccgtcccagcttcgtggactgtcagggtcaccgagagtccagggtggtgggagtcccccacacgagccactggcacactccctgaagcagaagccacggcgccaaagctgtgggctcagggaacttgcccattacctggcagccccgcatctgtgccaaaataagacacaactcagcccagcggagtggacagtgtctgcggccagctctgggatccagggccagctgatgctgggaacagccgtccttgccctgtgcctctccacactgcgagagcccctgcagcccagaggggctccacctcccctgcaatggggctcaaaagacaatccttctacggggctggcaggacagacgtgacaggaacaacgatggcctgctcctcccggaaggtggcttcaagagcactcaggaggtgacagatgctgtcaagaccggcccagggaaggcacagggcaggtttcccagcacccaccacgcgccagcgagcacagagccttcgcctgaaccatccaggcaccgcgccctccccctccgcacacacaggagcccagctgcgattccctctgctccacaggagatgcagcgagcaccaaagagccttcctccaggattaagcctgatgcagaagtggttacactgactacggcaaggtcagtttggcaaaacccccaggaatttcagcctatctggtctcttcagctgacaagagcaggcactggtggggaatccggcgctgcctctccccggcttctaggatctgagctgggccaggacaaccctgagacacctgtcgggcggggcaggactggggctgcagggcgggactgtggggaggggactgtggggcggggcctgcagggcagggtgtggggcgggagctgcggggcggggactgtggggccgggtggggagccgcagctgcggg

SEQ ID NO: 64044 - DNA, 1018 bp, Homo sapiens
cgggcaatcacctgaggtcaggagttcaagaccagcctggccaacatgatgactgtctctactaaaaatacaaaaattagctgggcgtggtggcatgcaactgtaatcccagctacttgggaggctgagacaggagaattgcttgaacctgggaagctgaggttgcagtgagccaagatcacgccactgccctccagcctgggcagcaaagagcaacactcagtctcaaaaaaaaaaaaaaaaaaaaaaaagagcgagcttttgtagaaacaggtttaaaagaaaaaataatctctgctcttttcagcatttagaaaatcagccaggcaaaacaatcatttccctttcttagctaaaaggtttgccaaatgaatacttggagcaaaataagcctaattagtaacaaaaaaatcacccagatataaatgcgtaatttaaacccataatgaaagcacatgaggaactcctttccctcaaagtcaccaccgagggcctcactggacttaggacccaggaaggaatgatgagtccatctgctcgtgacctgagtctctaaaccaggaggacagacgtcctgggtaaccgctgatgggtgagcgttgcacccccaggatccctgtaattataggttctcaaggacaccaacaccagaatccatatcccatctagaaacttcttcctgtgatgcctgccaaaaggtccatttttcagtccattatcacaatgaaggtgaagttttgctgtttaggtcaaaatcatgcattaggcaatagaacgacctagagatgtctgaattccccctcagtacaaccaaaggagtaagagaggcccaggtttgcttgaaggcttacactagcaaacaaacaaacaaacaaacaaacaaagagaaaccaagaactgggaaagctggtcggtagcatcacacaggtcagatctgaaagccccatggtccgaggagcccatcctgccctgagtgcacgcagcgcatgtgaagagtcagatataaaggtggctcttt

SEQ ID NO: 64045 - DNA, 1038 bp, Homo sapiens
cccggcaaaaggagagagagaagacccatcacgacaaacggatggaaagcactcgaccccacagagctcagtgccgacaccccccggcacctggtgccccatctggggaggctctgccctcgtgggtggacgaacgctggctgctattaagggctagcactgggaggcagtcccgtccattcctctgtccctgcagccacggaaggacgaagccccaagcacggaggcagagaccaggccctccagtggccccaggctctccaacttccagcttccagaactgtgagaaataaatttctgttctttataaatgaaccagtctcaggcattttgttacagcggcataaacaggctaagggaaaaaagtaaatggactaagaaatacaagaccaagtttgtcagattggaatggaaaaagtaatccagctggctcagcacgagctgagtgatgtttaatccatgaacaaacatttcagaaaatacacaccaggtgcatgctgtgcacaccaggtacatgctgtgcacaccaggctgggcttcctctatcaatgctaggtacagacttgaggccagaatgcattccaggaggtaaggtgagccactataatatggcaaaaagttcctttcacaagagagctaagacggtccgacatttatgcaaataaaagcctctgagtaaagaacaagaatcaacagaacaggccagacacaggctcatgcctgtaatcccagcactttgggaggccaaagcaggcggatcacttgaggtcaagagtttgagaccaggctggccaacatggaatgaccctgtctccactaacaacacaaaaaaaaaaaattagccgggcgtggtgccgggcgcttgtaatcccagctactcgggaggctgaggcaggagaatcccttgaacccaggaggtgaggttgtaatgagccaagatcacgccacggcactccagcctgggcgacagagggagaccccgtctcaggaaaaaaaaaaaaaaaaaaaagaatcaacacaacagagaaaatgcgcctc

SEQ ID NO: 64046 - DNA, 1627 bp, Homo sapiens
gactgaggcaaaaagttcgagaccagcctggccatcgtggcaaaaccctgtctctacaaaaaagaaaaaaaaaattacccaggtatgatggcatacatgcctgcagtcccagcaactcaggagcctgagcaggaggacagcttgagcccgggagttggagggtgtggtgagctatcattgtgccatgccactgcattcctgcccagccgaccaagtgacacgctgatttaaaacacacacacacacacactcaatggaaggcaaaagaaaaggaagaaaaaaaagacatggagcctttctttccagccctggagcctgggtgtaccccagacttgctgggcccacgaggaccctgccacttccacctgtgccctcaggcaacatgtgggggcccacacagactgaagtatgaaatggattcagcccccatcagcctaatgcagcttcatgagtgatcccaggtatgaccagcagaaaaccaccaggcaacacaagaattaagagaactcataaatcattattttcttaagacaccatgtattgtcttacaccgcaataggtaactgaaacacatcctactcacggtaagaacaagctgaaatatggaaagttgtttgagatgctacttaaacacagatttaactccagagcagagcctttccatgtatttttcttaacctattcgccctcaaaacagcgctgagcacagcagtcagaccctaaagcagaggtgtccaatcttttgacctccctgggccacactggaagaagaactggcttgggccacacataaaatacaccaatgctaacaacagctgataagcttagaaaaaaatctcataacgtttacaaatttgtgttgggccacattcaaagctgccatgggccgcgggctggacaagcttgccctatctcacactgttccctgtcagactgtaaacactactcagaatcacacaatctcatctcggctccaagtggaagcttgctcagcaccacggccaacctgatcccactgcagatgttccaacagcctggcacgcagatggcccagggaaaagcctcatcgaatgctgaatacctgtgagatcatttcttacaaagccaaatgaacaacactatgttaattttcaaattttggcatggaaatcacattctaagacgcttcccaagctttctggaggatgctatgaattctgttttataggtaacaagtctggaagccaaaataatcaagatttaataaaatggcctcaaaagtgacaagactctccttcccttatgacagaccatgtttgctttcctttttactagatgattaactcaattctttcaacaatcctgtccagtgatgactatcttgttggctggtcagaaggggaagttccagagctggtttttgtagaaaacctcagattctttcaatcccaggccatcttatcacgtagtctaaacccttgtgtcatcacctcctgacgtttccatcagcagaggcagagctctcaccttaaagagcatgaggccaaatcactggctgcaaagcacagaacacagacatccttggccacacaagagtgagagccactgagcccaaccagggtgcaggggagcctcccagatgagaggc

SEQ ID NO: 64047 - DNA, 702 bp, Homo sapiens
cggtatgattttaagtcactgcaatccagatcatcttaaaagttctgcaggatttggaaaaacaaagacaaattattaaaccaagtgaccaggctgaagcacaggacaagatgaaagagggccaagaacaggcaacaccaccactcaaacgatccaagagactcctggtctaaaaagttagaggcttggtcaattttaaggcagcgtcttaacagaaagaattatgcaagccaagtaaactggctgagccccagggaagggctgcgtactgccagaggaatgggctggactctttccagctccgtaatcctgggagcagcgtcggtgtggaaggaaccctgacggcaagctgttacataagagcccagtcctgcactgcggggacatggtccgcttgctactggcatgcaaagatcaaagagaggagacagcgctgggatgccagcccacggctgggacacgtgctgcttctgtgagcatgcgcccaggaacagacgcacagacccacccgaacggggaaccgaatcttacttgtccatgagaatcccaggaggggaccaatgggccatcacattggaaccctctgaaactgcacacacatttgcaagcataggtatcaggggaggtaagtgatacagactcttctaagggtgtgaaatgtttgaaaagttgtcaataagcacacagactgacctgattcat

SEQ ID NO: 64048 - DNA, 599 bp, Homo sapiens
gaacaagaatcccagttttatttttcctaataaataaatcatccatttagcaaaacgtcaacgataccaaaagctatgaaagcatccttggatttacaaagaaccctcgcttctcatttcccttattttcccatgcccaggcagagagccctctaagcccatgggaagcttaacagaagggggtggggagtggccaactgtggccagggcaagacagaaaccacatgtgcgtgaacacgtgttctacacagagccttatgtactgggccacagaataagcagagctgggcagctcctgctgccaaagtcaacatgttcaggctgcccggcctccacaggcgctttcctgaaagctgcctgcagagagaagggtggccagggcaggaggcaggatcctgaagctgcctgcagagggaggggcggccagtgcaggaggcaggttcctgaagctgcctgcagagagaagggtggccagggcagaaggcagcagcacaggggctcgggcccacgctggctgtccacacccagggccacgcctccatgacggtgccctccaccacatcccctctcgtgtgtgctggtgccaccacgggggccca

SEQ ID NO: 64049 - DNA, 901 bp, Homo sapiens
aacctggacactcacgcattattttgatacttatttttacaaatcaatgacaaaaacataaattgatagagaatgcagtgagtatttaccgattccatagctgaaagtcagtgctgacgaggactgtcttttaaatccaatggaggtgtgtcccagagcagggctgtatatattctgaaacaagagagtgagattagctcatgtcaataataatttcagcctcagttctttcatcgctctcgtctccctccatttggtccacacggtttattccatcgcccttcctctcccatgacccactgctcagctcctggtcactgtgccaaggccaaaacttaacttcattcatcaaatacctttacgtcacaatgcagcaattgcaacaacttaaaggtaaatccaaagtccagcacaaaaaagagtagatgacactgatacaatcttgtgaaatcaccataaaaccagattttagaggctctggggctttttatacgtaagaaaccaaataacccaagtgggcaatctcgccacagaaacaaaacattaccagtaagctaagtttttaaaaggccttttttttttttttggagacagagtttcactcttgtcccccaggctggagtgcagtggcgtgatctcagctcactgcaacctccacctcccctcctgggttcaagcgattctcctacctcagcctcccgagtagatgggattacaggcgctcgccacccacccccggctgatctggacctcctgacctcaggtgttccaatcacctcggccttccaaagtgttaggattacaggcgtcagccaccatgcccagccttaaaaggctaattttaactttaagaagcatattaagttttaaactacataaaaggtgcaaaaaaagataaggt

SEQ ID NO: 64050 - DNA, 2098 bp, Homo sapiens
acaaaaaaaaaaaaaaaaaaaaaaaaaacgcaaacctgactcttaaaaaattaaacataccctgcataactgaacagtgtccacaagcaggaatctctctggatggcaaggtggcagccgactatggcactcaccaaaaaggcaccttcccccatcatccatgcaaagacctttcccaaagccaccagacctccgttcaaacaactcaaatccggtctagaaattaaaaatccttgtactgaaagcaaaatcagggttagctgtgactaagatccaagaaataaactttttaaaaagtaataaacatgaattcatcagtatgaaaaaggtctgtgcacagtgagcagttggcacaccgatgcagtgcaccgagggccaaggcgaaggccgcagggggaggaggctcagcagagggaggacaccccagctgacaacgcacgcccactggtgccagtgctttggagaacatgccaggtcatgtctacgctttcctcactaaggatttaatttcagtattctacaatctaactctacactctcaaaacataattagaaacaatgttttgaatgtgatggagggatgcagtagagcttctctagaaaatgcttttgaatctgtctcagaaaaccacctgttttgtagagaccaagactcttcctccattttggctcaagctggatcctgagtaaaagacaatcccacaaacgcccctttatgcacagcttcccccacacgctgtttgtctctgtttctctctctctcaatacccctagattttaggtcaaaacaaacctgtttccaccagctggacagtatcattcaggaacggttttacgcatcaaagactcatttccagataaagctgaagctccagggaggaggcctgtgtcccacaaaggccaggtgctgacacggttagtcctttcctccccaccacccaccaggaatgttgctggaacccagacacgcacagcaaggttctgctgtttaccctgctccccggtggcaggaaggtgtgtgccctattctcactccaaccccatcacggcctggtgagcctccggcgctcctgccccttacagcacaagccggccaccacctcccacgggccctgacactgtcactcaacacctcaccacagcacccagcctctgcctctttcattagacataagcaaggatttttcctctagccaggaagtttttcaaatgtgaagtatttcatttttttcttcttatttttttgaaacagaatctcgctctgtcatccagactggagtgcaatggtgcaatcttggctcactgcgacctctgcctcccaggcccaagcaattctcctgcctcagcccccgtgtagctcggattacaggcatgcatcaccacgcccagctaatttttatattttcagtagagacagggtttcaccctgacctcaagtgatctgcccgccctggcctccaaagtgctgggattacaggtgtgagccacctcacccggcctcaaatgtgaagtatttcaaatcgaacttgttcacagtcaaggcaagcatggcatgcttgctttggccagcacatgtactaaaaattcgaacaacagagacgattaccatagcccctgtgcaatgatgacatgcaaatttgtgaagcattccatactttaaaaaaaacacacacagattgggacctgctctgcaaggcatcagatgccttccagtcagtaagagacaagagatacacagggtgctcccattcccacagcaagcaccaccctgcaccactagtattagcaccacccacatggaagggtgccagacacatacctactagctgcctgccacgcatggaaaattctttaggcaataccctccgcacccagaaggctaccagacctgttaagccttttcaaccagtttttgcaagcaagagaaatgcaattcttaagagcgggaacacccctttattacatgtaaagatacacaagctggatgaattgaataggggtgaacagtgatgacccatgaccaagatgcattaagaaacagatctgcacaggaaggtggaacaaggcccgtgagtgcagagcaagcctgctgggaggg

SEQ ID NO: 64051 - DNA, 797 bp, Homo sapiens
ccagtgtccatgcctccttgtagccaccttgcccggagtgcaaggcgggtgggacctgtgacgtgcttctaacccacagaatgtggtgaaaacaatggaatggctttcccttgactgggttgcattaggtggcaaagttgctgcgctgtcactcccatgactacattatgttacgtaagacttagtctactgaagcagaagactctttgctgttttgaagtgagctgccaagctgcaaggggccatgcgccaagcaagtacagggggcctctaagagtcaagaggagacctcaagggacagtcaacaagaaaacaaagacttgcgtcccacaatcagcaagagataacttctgccacaacctgaaagagctcaaaagcacaccatcccccactcgagcctctgataagatcacagtcccacccaacacctagattgcaaccggatgaaaccctgagcagaggatcccactaagctgtgcccagacttccaacccacagaaactgtgagataataaatgtgttgtgtgtcaatttgttacacagcagtagaaaataaatacactggcctggcatggtgactcatgcctgtaatcccagcactatgggaggccaaggtggaaggaatgactgagcccaggaccttgagaccagcctgggcaacatggtgagaccctgtctctaccttatgtaaaaaaaaaaaaaaaaatttaagaccagaaatatacccccacacatcatcccatttgaaagaaaagctttcatccatgctacttccttccatgcacaaataatgactg

SEQ ID NO: 64052 - DNA, 1065 bp, Homo sapiens
ctccaaaaaagcaacctggacatcctgctgacaactgagcatcatacaaatgtgtccctttcgtccccgctgccctccaacagtcaccccccagagcgaagctgcctgtacaggccacgtcctctcctccagcagccggctacgcgcagctctccggcacagccatcacctgcaccactaaagcgggtggcagtttctgcccgtgacatttctcattaggactttccacaattcttgaggcttaatgcaaattccttattcccatgactaacatcaaagaaccacacctccaaagactgacactgggattattcctaaatttctcaaggatgaggtaatctggaggttaaacatgcctgaactgagctgtcctcacttgggccctccagacctttcacttgttgggtgtgtaaataatgacccaacactttttcttttcttttttgagatgttctcactctgtcaccggggctagagaccagtggcatgatctcagctcactgcaacctcaaccttcgggcctcaagacccacacctttggcagctgtgtaactagtgggtcctcctgttcctgtggacagcagtcccatcaacagcaagtcacgccaccacctaccccacaacccaacccagtccctgaagattcaggtgacagttaactgacgtcaagagagtgcaacatcactagaaaaacattaatgacggccagacgcagtggcgagactccactcaaacaaaaacaaaaaaaggaaaaaaaaaacactaattacaaggaaagtttgcctcctagataaaacacatgtgacctgatataaaaaatatctaggcctggcgcagtggctcacacctgcaatcccagcacttaaggaggccgaggcaggcggatcatctgaggtcgggagtttgagaccagcctgaccaacacggagaaaccccatgtctactaaaaatacaaaaaaattagctgggcttggtagcacatgcctgtaatcccagctattctggaggctgaggcaagagaatcatttgaacccaggaggcggaggttgcagtgagctgagatca

SEQ ID NO: 64053 - DNA, 3189 bp, Homo sapiens
attttgaacgttatgccatagactaggtctgcacacaacaaaaacagtaactgtttcgatggcactttttccacaggtaatatcatcttatatgtttggctaagtctcaacatcccaaaaaggatcaaaagattctctaagttttgcagttcaacaactgtgcacacttttatttctcatttcaagtgttaaggatattgctctaatgactgcataaaactctctcctcatgtaagaaagcctgaaatctaatttctctaccataaaaccctgttcttgcaaaaggatacaaaactactcataatctacaaaaacgatgaatcctaagcatgttacatagaaggaaaacagtttcaaagcatagggagctgttagaccagcttcatcttcccaagcctcttccaaaacttcttggaagctgatatataacactaaccttccaaaaacacaacagaagcagaaaatcttaatggggcaccaggaaaagagcaagcctcgagaaaaatcaagactccccccgaccaaccttcccaaataacacaaacacaagagttaacagtacaatccctctttgagaggggactgaatcaatgtggcagggccaaccctacacacacacacacacgcgcgcgcgcgcgcgcgcgcacacacatacaccacacacacagctaccgccctgccaggggatgatgaaatgaggaacggaaattaacatttcaggcaacgtctcacattgttccttgaggccaagggctgctgttgcagccgccaccgccaccgctttcctcccagccaccccccacacccgcccgcctaccctccccctaacaccccccacacggctgcccgcattcctgcccctcctcggcctacgcgcgcctcctgcaaccccgacgcccccaggtccccagttcgccctccccctccggctcggagcccgagagccgcctgctctcatttcaaaacagcgataataatagggacgctgagaataacaactacgaccagcacggcgaaggcgcccctctcgcgggtcagaggtcggcgccccagctccgcagaacccggcgcccggccagcgccccctggcagcccctcccggcagcctcaggtccccaagacctgcaggcccgccccgaagccccccgtccgcccctcacggccgctccgagcccccgaggcccgccccggagccccctgtccgcctctcacggccgccccgggcccccacggcccccaggcccgccccggagcccccaatcggcccctcagagccgccgcgggcccccggccacccaggcccgcccggagcccccgtccgccccttacggccgacccaagctccgccgacctcccaggccccccccggagccccctatgggcccctcacggccaccccgggcccccaaagacccccggctgccccgaacccggacccgtaggcccgctccgggacccattattggtccctcacgatcgccccgggcccccaaagacccccgcccacccggccccgaccccccaggcccgcccggaggcccgcggcgcagctccgtcgccggggaaggcctgcaggccgcaaggccgcgcgaatgccccgtgcccgccccgaccaccgcccccagaccagcggcgcctctcaccgtgctccgagggctgcgcggctccgcgacggctcagcggcggggcgcgggcgctgcccatgcagcccgcggccgcgtttcccgggccgcgcggcccgagcggcaaggcggcggcggcggcggcgcgggctcgggcccggcagagctgcgagggacggcgggaggcgagcccgcccctcgggcgcgcccacggctcgggcgagagccgcggctcccggtgcggacgctactgatggggcgtctggccgcgggctcggcggcggcgcctccccggctggggccctcggtccatcgcgcaccgtctcagggcggcctctggctccaggacccagcggcggctgcggcgggagccggccgcatgagacgctcccgcccattggcccgccgtatccgccaccgccattggcccgccccggccggccgcaggggctgtgcacgtcacagcgccgtgagttagtgcgctaatggagtgaaggagagaggcgggattgacagcctctctggcggtccggaggcgggactaggaggacgtcccggtaacgattgggcagggtcctgcgtaagggcgcatgcgacactggaagtagcgagcaactggattggctgcctccgtcgcaaaggagggtgggtcttgcattctcgggcctgacgattggtctttccaagtgccggaagcaacagggatgtcgtctggaaacaaaatctggtattgaagcgcagggagacaaaacgtccacctctagagccgaggcggcggttgcctgtcgcgtgcccgtggtcttctgcctgcccccggacatctcgggccacgtccggcccggcctccggccgcgctgccctaacgggcgtcacggggcatgaagagctctgggcggctgcgaggggagggtaccggggcagcggggcggtcgctcggggctcccgcgcggtgactcttgctctgccgtcgaagagaacggccctcgggcgcgtcgcggccgcggctccagagcccctgggcctcgcgctctgagagcctgagccgcttgaggaggccaagcgcccacgaaccgcattccctgccttgctagttagttctccaacacgcgaaaaaggtagacgaggactggttttctttgcagctaaaatgaatcaagcctctggtaagtgtggatcctgttctaagtgcacctgtgttctcctccagaactaaaccaaaaagcaaggtgaacaaaatcggtgctccttcagtttcttctttagttctgcatgttactggggactaagacaacgggtaagcaaactatttataggcctcaatttacgaaataacggaattgcaaagtccggagtggataggaccgtgaggacggtcttttttcttgggcaacacgcattatggtcgagagatcagttgttaaaccgcccctgttcaaatcccagccctaccagtgactagcggtcaccctgtaggctttgtctctcagatcttcagtttcttggtgggtaaaatgggaactacaagtagcacctattcttttttttttttttttttgagtcagggtct

SEQ ID NO: 64054 - DNA, 1204 bp, Homo sapiens
gcaagactccatctcaaaaaaaaaaaaaaatgaaatgaccacctgttccttgtcaaaccagccctttaagttacaacaaaaagaaagccctcctcctgctccatgtccacactgagcctggtgtctgcggccctgtcctggcgtttcagaggccggtctggagactcaccctcatcgccctcagcagctgggccaccagcagccacatgctggcctctgctggcttctctcttcctggcgctgcagatcagagaacgcagcccagagtgggcaccaagacaccccaggctttactggatcctctgggagaaccagccccatgcctcggtcctgccaggatccttaccttctggcactgctgcaaaagcctccctcctccctggcctcacattcccacctctggcctctctagagtccattctctcagcagccagtcatgcttttaccacagactttattagtcctcagcagcactccccctcggactctccagcattccctggccgctccccactcccctgctacctgccccctcccaactggccacaccctggccatcagttagtcggactgcaagcttgtccagtccaagagactaaacggtccagtcgagccactcccagattcctgaccctcagaaacagagtgagataagcatttgttgttttaagttgccacgttggcgaactcggaatgcactgcccagggccgtggggattcccgtcacgtggagaggacataggctgtcccttccaggtccttaaacacctgcccaaagtcccacacccaacaatctaaagaaacgctgaggaatacatgattatttagtcatgctcaaattcctgtacaggtttcttgctagtagaaacggactttccgccaggcgtgttggctcacgcctgtaatcccagcaccctgagaggccgagacaggtggatcacctcaggtcgggagtttgaaaccaccctgaccaacatggagaaaccccgtctctactaaaaatacaaaattagccgggcgtggtggcacatgcctataatcccagctacttgggaggctgaggcaggagaatcgcttgaaccccgggaggtgaaggttgtggtgagccgagatcgagccattgcagtccagcctgggcaacaagcaaaactctgtctcaagaaaagaaaaaaaaaaaaggaatgaactttccatcttcttttct

SEQ ID NO: 64055 - DNA, 1871 bp, Homo sapiens
ccgtgttggctaggctggtcttgaactcctgacctcaagtgatccacctgccttgccctcccaaagtgctgggattacaggcgtgggacatagcacccagccagaagcctagatctttttttttttttttcagatggagtctctgcctcccagattcaatcgattctcctgcctcagcctcccaagtagctgggattacaggcacctgccaccgtgcccggctaattttttctatttttagtagagactgggttttaccatgttagccaggatggtctcatctcctgatgatctcgtgatccaccggtctcggcctctcaaagtgctgggattacaggcatgagccaccgccccagccagcctagatcttaaaatcaaaaaaagtcccaaagatcaacttctgtctctggaatgttaaacgttactgtttgatagatgaggcaactgaagtttgtagagcaccttgcctgaagcttcagcccacagcaggaataagggacagagcctagaatgcttctgcatcaacagggaacaaaggcatggggtctcctctctgtccaccttcccttcccacagcccaggctgaaagggctgccctaggcgctcctgaggcctcctctcttatggggctagagctgagggaacctggggttggtagccatccagagacctaaggcgtgccctgacccaaaccaggagtcaccaagagactgcctctagagaataggcggggaagggaagtcacaccaagtccaagcgcagagttcagagggctgaggaggggtgacgcggaagtacaaatgagtaagcagcagttaggaagtgtgccaagtcctgacgtgcagagttcagagggctgaggaggggtgacacggaagcacaaatgagcaagcagcagttaggcagtgcaggaagaacacacaggcggagaagggaaagcgaacgtcctgctctgctgcaggctatgagggcaaaggcagacccgggagcccactgtcctacagatccttcttcttgaatccaaatcatgcagcaaaataaaaacaaaacccccaaaccatggggcacccgaatccttaaacaaaacccctactgcttgaggctacgtgagcctctgctgctgccgccactacagcaggggctgaagctgagagctgagagtcacggttcacctgtagggcctgggatgcagccagccttcaaagcacggttgttagagatgagtttgaataaatgcataaatactctgttcccatatcctcatttcccatgacgtcccagtaataactctggatgccaaggcttcctggctcgtcagttgccctcacacacatttattgcattttatcttcataaccaccctgtgggaaacccaaggctgatattagccttgctttgcagataattatcatccccattttaccgctgagaagattgaggcttgaggaagctaataacttgcttaaggtcataggccagaggagacagaacccagtgttctttccccagaggaggcctcttgccaacaccccacactgcttctgatgaattgccaggaaacaattttaacttatctcaaacaatattaataggactacacttaaactcctcccaaacacatccaaatgtgtgccctcaccctctctccagccttgtcccgtgaccaacccaaccaaacttccgaaagggttttttgtgttctaggaagtgaccgagccccacaaccctttatgcctgtgcgttcagaggatttgtgacctttttttttttttttgagatggagtctcgctctgtcgcccaggctggagtgcagtggcgggatctcggctcactgcaagctccgcctcccgggttcacgccattctcctgcc

SEQ ID NO: 64056 - DNA, 2424 bp, Homo sapiens
gtctttcaatcagggaaagaaaaaatagtggaggaggaaacggcaaggttggattcactgcgaaggctgactgtacaataagaagcaaaaggaaaagcggttcagttgtgaaaatcagtgtcagccctgggtgtaggggaaggtcctctccacaaaccaacagaacacctccccagccccgagcacctctgccgaggcacccggcccactggagggctgagggcggataaccacgataactgaaaacactttcctgagcgtctcggggctgaggaagagggaggattacacgcagcccactggctttgcaacctcgtctgtagtggtggagtgagtgcaggtccagaaacaaaccagaccggccttgaaattctgccctaacttcagagctgtaatcctaggcaggttacttttaatacttctgaatctttctttacatgtaaaatagaggtattgtattcgctgcacagggttgtgaatattacatgggtgttcgacacggagctaggcactcggtgatgttggctgtcgtcactggcattcactgttacgaatttgcggagtacagaaaagcataaaaataaataggtcaccctcatcctacctctgtgacagaccatctagtctttgcttttcctactcaacaagctttccagctcttggcgtcagctctagacctaaggcggacggaggaaggggtcggggtggcggaggaccccgcgcgcctgggagcccacgagggaccctgcccgggcccggagggcggaccctgaagagaacagagcctcttcctaagcttccagacggcgcctccccgcttcctacgatgggctcgcgcagcggccggggcaggaccgaggctcgaagcgcctccgaggtgagccagtccgaaggcacaggacggagcgctccgaagtcagaggtgtgcgggacgagctctgcagacgcctgccaggccgcgccgcactgcgcgctccctccctcacgaccctcctcctccggggctgccctccctgcggcggctgcaacttcagtcctcgtcctcgggcggctcaagacgcaggaaaaccgcccccttcctgcgctcctcacacccgaaggggccctcccgacccgaggcctccggcgccgccctcctgagcgcgggcctctactcgcaggcgggattccggcccgcaccatccgccctcgcctgtgaccgaaccctgcgggtgacgcaggctgcccgggcgtgaggcccctcggcgcgggcggagcacgaccacgcagccacgacccggccggttattcacccgccaggccctgggaatacaaggccggcttcaaaaaaaccagggcacccgcgacctcctcgcagacgcgcgcccccatacccgggcctcaggcagccacgaggtagacgggctcaggctcgggggtgcggcaagcggcacccgggcgcggcggggcgcagctgtggggaccgcgcaggcgccacgtcagaccccgcccaccccgccgcgcaggcgccgtgtagcgccccgcggatcacgcaggcgcggctttcaggccaacatggccgtgctgctgctgctgctccgtgccctccgccggggtccaggcccgggtcctcggccgctgtggggcccaggcccggcctggagtccagggttccccgccaggcccgggagggggcggccgtacatggccagcaggcctccgggggacctcgccgaggctggaggccgagctctgcaggtaaatccccgcggagtccgggccccacctcccgcccggctctgctctgtaaggcccagcccggcggggcgggtcggaggccgcctggcccctgcggcgggggagcctgcgcctgtgggcccgcggatcccccagctgtggacctcggcgcggagcgactgttggggccctggatcgtgggcgctgggcgggccgggaagaggcagggctgggatccgcgcagtcctcggcgtggactttcccaacccgtctgttgtgtgtggatgttctccgcccgtcttcctcgccttttaaagtggaatccagtaacggtttccggcgtagcactaatttacagtccacgcctgtggatcgattccgtcaccaggaattccagcgccttccagttagggtggttattgccgagtagggggcccagaacgtttctgtgtccgcaaaataccctgtagctgcattttgctgttgtcatgtagctcggcacgttattgatacagtcattgagcaccccctgtagtgcggccttgtttcaggttctgctaaggataggatagcatctcctcccgaaaaccagaccttgtgtccttcagcttttgggctgatgtttttttctcctagccctcgcctaggagcttagcccacaccttttaggttgttgttttttcggttatttttgagacagagatctcg

SEQ ID NO: 64057 - DNA, 2705 bp, Homo sapiens
aaactcttgacctcggctgatccgcccacctcagcctcccaaagtgctggaactgtgaaattcttaaaatgtggattacgttggccaggcacggtggctcacgcctgtaatcccagcactttgggaggcccaggcgggcggatcgcgaggtcaggagatcgagaccatcctggctaacacagtgaaaccccgtctgtactaaaaatacaaaaaatcagctgggcgtgatggtgggcgcctgtagtcccagctacttgggaggcagaggcaggagaatggcgtgaacccgggaggcagaacttgcagtgaacagagatcgcaccactgaactccagcctgggcaacagagggagactccgtctcaaaaaaaaaaaataataataagttttaccaggaggaagcgtggtgattgggtgagggtagggaagaaagagggttattgggatttaaaggtttccaggtagcagtaagatggatggtgccttcacagacttatactagagaagagatggctttttgttgatgcttttctttgtgaaggaaggcagtaggcacagcaggtcagagtgtgacattttcagtcgggtacccctgaccttagagaagtcacctaatcctgggccaagggaaagcgacagaggccaacagtaactccgtctactaaaataccaaaaattagcagggtgtggcggcgggcgcctgtaatcccagctactcgggaggctgaggcagaattgcttgaacctgggacgcggaggctgcagtgagccgagatcgcgccattgcactccagcctgggcgacggagcgagactccgtctccaaaaaaaaaaaacaaaaaaaaaaaccacaaatgttctaaatggatgggaggagaataaacgctggaacgacaaggacgaaggccttaggttgcgcaaactcggatgtcactgaagtttttctgcctttgcgctgcaaacgtgtctcacaaatgtgaacaaacagaattcctcgggcgtcgcccgttcgccgtcggcccagataccggactcgcgcgcgttagcccgcaagacaggactcggccgcggcccgcgcagcggctgaagcgccggggcagtaacggcggacgtcaagcaagtccggccgtcggttactcagggcccaggaatcacggccgccccgccgcattctcagcggcaacatgtctgcgacggcggccctagggctgccgggagagccgcggcgacgtcagttcctcctttcggggctctgattggtcagagcgcccggcgcttctggttggccggccctgctatcatcccagagtgcattgcggggccgcttcctttccgctcggctgttttcctgcgcaggaggtgagggagactgggtcctggcctttgggcatcatccagcgccatcggcctggcgcttcagccaacgcgggagtggatgggccccttcttcttcgcagacagcgttcggccgctgcccgggctctaggcgcggccggacggcccagtctggagggttcggggcggaggcccgggggggtgcgcgcgcccggggtccggcctctcactcgctcccctctcgtccgcagccgcagggccgtaggcagccatggcgcccagccggaatggcatggtcttgaagccccacttccacaaggactggcagcggcgcgtggccacgtggttcaaccagccggcccgtaagatccgcaggtgagccctgcgctcggggctgcccctggggctcgtgcccgcggctgcgccttggcttgcgggtggccgatgccagggcggggggcgctgtctgcaaccgtcgcggagcgctggcctggcggccttaggcaagggtgaccgccgctgcgcttctctccaccagacgtaaggcccggcaagccaaggcgcgccgcatcgccccgcgccccgcgtcgggtcccatccggcccatcgtgcgctgccccacggttcggtaccacacgaaggtgcgcgccggccgcggcttcagcctggaggagctcagggtgagtactggcagcgctgcggtgtcaggaaggccccgaagtcccctctgttggcctcagtcgcgtgatgacattctccggaatcgctgtacggccttgatgaaagcacatttgaacccttttccatctgattgctgaggcttttcatccaggcctcggggctggagaaagcccgggcctgtctccatctctctctggttctggggcaggtggccggcattcacaagaaggtggcccggaccatcggcatttctgtggatccgaggaggcggaacaagtccacggagtccctgcaggccaacgtgcagcggctgaaggagtaccgctccaaactcatcctcttccccaggaagccctcggcccccaagaagggagacagttctgtgagtacacggctctctggccgtcctggtgcgcggggacagtgaggcttggctcctttatcagtgacaccggtccctgggtcttgctggggtgagaagaaccaaaacattgtgggtgatgagctaagcgggactgctaaggttcacctgtgcgtttccgcagagataaccttaatggacatggcaaggctgtgtgacttggaggcagctttttccattgacgttgctctccctaaaatgcttcgtattccaaaatatttctagaaagaccttgtaggataaggttgataaagagtccattgtatacgt

SEQ ID NO: 64058 - DNA, 901 bp, Homo sapiens
gcaagatctcctgatccaggtacgggcctgtctgctccaagaaagactctgccaccagatgcaaaggggccctttgttttaacttagtccctggggaccgcctgattcagcacctgtcggcccaggataccccgctggtggggacaagtgcctgagtgtgggccgtgcccgagtgtggccatccctgagtggggccgtcctgactaggaagtggcttttcagttgtgatgtgtgggcctgacctagggggcgctgtggaacccgggctggaaccagccctctgtgccaggccgcagacaggttccgccggccctgaggggcagctgccatggcgtgggtcactgggagctgagaggaagggcccccaccgcacctcaggcaaagcggctctgggaacaccttgatttcgtccatgtgagccgtcccagggagggcagccaagctgtgaagcctgagaaactgacctgtgtgccacgagcttgtggtctgctgcccggtggaggaagtgcaggtgcgcccaggctcctcattccgttttgcaggattccttcggggtgtgagcatttcctattcagcctgtcgcccccggggagcacgggctggctctgtggtgcccgtggccttttgtagaagcgttggttttacggcaggttcatctctggggcagcctcccacagtgggtggggctttgccagcagtgcccacgggggtcatggggccaggcgcgctccggcgcctgcagaactgatcggggatagtctcaggaggcgctagtcacgtgccccggtgatcggggatagtctcagaaggcgctagtctcctgccccggtgatcggggatagtctcaggaggcacgagtcgcctgcctcggtgatgcaccgtttctcacaccggctgctct

SEQ ID NO: 64059 - DNA, 1085 bp, Homo sapiens
ctttctatgtacacacaggtgcacatgtatgtcataatccgtgcaggacatcctatgcctgttcacataagcacacacacagggtccgtgtggacacctgcgtgcagatatgaatgtgtgtgtgagcacgtgtgctgtggatatgtgcaaacttccagcaatgaggaggcccctcgtgggttcctgctctgtggccacccagctgacctgcagggcaccacggtcaagggagaagctactggcatccagtccctgtgctgtggctttgagcctgacctgacctctgacccctgacttctgcctcaactgtttcctcatgtgattcaagtaaacagtaactcagcccagagccagggatccaggaagtgcttattaaacgctgttggcacaaatcagcgatctcgtatttcctggtaggggaatctgttgtgttagcctgagcccgtttctctcctaaggacctgctctcctgccagaaaggggaggccactcctttcctgcgccctccctggaagcaaaccaggccggcaggcgagtcccaggtgtgaggcagaggccctggctcaggagccccagaaggaaacctttgaatcagggaatcttggggggcctggcccgaggctccccctcccagcacccaggacccctttgcacccctaagagagccttcccaccccttaacctgacttgacttccccagccctgacctgggatctgctttctcttctgtgtggaaagtgccgcatgctcagaagctgctggccaggccggccctggttgggggtggagggactgcccctctctgctttgtattcaacctacctcattgtgacctcccagcatccgccaggcagtagcaggtgtgagggcaggtgggaagcacacacctgctacctggtgggccattcgatggttgctgagatcacttacgtgtgaggagatgacggccaccccgcttggccggggtcatcaccatctcctttcggacacggagcctgggagggccgtgtgcccccgtcctgctcctcactgaggagatgacctggctgcaggggcctgggcctgtcatccgccacccaccccag

SEQ ID NO: 64060 - DNA, 2037 bp, Homo sapiens
gtgccctctgacccgacattccaagtcccgaaaggccgaacaggcatcgcacagtcccccctaccgagctggcgggaaagggcgcctgacgctgaggagtgccaggggcgggggaaagggtcctgggtcggtggtcgggggtccaggccctgggcaaggggtcctgggtcgggagtctaggtcccgggtccatggttgggggtcagaggtcgaggccccggggaaggcataccgggttgagatttggggatggaggccccggggaaggggtcccgaatcgggggtcggggatcgaggcctggggggaggggtcccgggtcgagggtcgaggcccggggtaaaggatctcgggttgggggtcgggggcctgggaagggtcccggtcggtggtcgggggtcgaggcccgggagaaggggtcccgggtcggtggtagaggccctggggaaggggttccgggtcggggatcgagggtcgaggcccgggaaaaggggtcccgggttggtggtctaggccctggggaaggggttccgggtcgggtatcgggggacgaggctcgggaaaaggggtcccaggtcggtggtcgaggccctggggatggggtccgggtcggggatcgggggacgacgaccgggaaaaggggtcccaggtcggtggtcgaggccctggggatggggtcccgggggatcgacggtcgaggcccgagctctcctgagtcctgcccgcggccccaggtgggcggagcccacgccagtgggagaagcggccccgccccgcgcgcgagtccccggaggacggccgcgacctcttaccgtccatggccacaatgacaggagcagcactcggagagggagaagggacgccaactccgggcggtgtcaggtcccggcggcgatcgaaccgaccaagctgcacccggcggggacttccggggtcgccgccccacttccggtcgcacgggatgctctcgcgagaggatggtggccggtcccgccagaggggcggggcgcggctgcgcggcgcgcggtcgccatggtgacgcacgccgctggcgcgaggaccttttgtgagtcgctcccggctccgcggccgcggaggtgtggggacccgggcttgcgtcggagggggcggtgggctcacccatgggcctttccaaaagcaaagagaaacccaggaaaggtaaaggaggcgcaggcgctgggctccccgcgtctccgcccctgggcgcgggcccagggcggggctgggctgggcggggcggtgtgagcgcaggcgccaggctcggcccggtgcgaaccgttcctgccgccgagtccgccacggacggcgcgtttcccgcctgaggcggttacggaaacgcggagactcgagacttgaagccagcttattctggatccacgcaggcgactgaagacgatgggacccactgccctgcattcggtaagtcccgggtctaacggatgatccatatatttcaggtgaggagcaaaagaagggatccacctattcagttccaaaatctaaggagaagttgatggagaagcattcccaggaagccaggcaggcagacagggagtcggagaagcctgtggacagcctccacccgggggccgggacagccaagcacccgccgccggcagcttcgctggaaggtaggagacggcgggagggagcgaagcgaggtcagtggcttggaggatctggggctggggtgaggagcctactgtaagaccctaccggatggacactagtagcaggcacgcgccgtaaagatgaaactggtttgttttgggaactttatgtaggaggtaaatatccagaaatcttagttgaaaacataagtttaatgaaaatgtaggtcagttcccgagtgataagtgcgtaccaggtggtcgaggggctggggcagtgtgcgtgtgtctcacctgaggttctcctcgagggctgggtatcttggtgccactgagaatccctgagcctccgcacactggaacagagcattgggaggccgtcccaggctggactgtagctctccgagg

SEQ ID NO: 64061 - DNA, 1941 bp, Homo sapiens
cctggaggacctccccacatgaaggactcccacctggaggaccttcttacctgggggaacccgtctcacctggaagaccttcacctgggtaatcgccgtggcctcccactacggcgcagccgggtcggctgcccgggcttcaccctaaaataaggcccgaactgcagcagtcggagccgatccctggagcccagcgcctagggcggacccgcgggagcgtctcttggtaaccgttgctaaggagaggaagcccgggaaggagctttcgcgcctgcgccgcggggccgtccgcgtctgcgcctgcgcgcaagagaggcggggccagcgctcggcatggcggagccagatctggagtgcgagcagatccgtctgaagtgtattcgtaaggagggcttcttcacggtgcctccggaacacagggtgcgcggggtgccacccgggcagctctgcccgcctcgctagcggcactgcccggctgggtctggggagcctcgtgtcgcgctgccgcgccgaggcttccggcacgggcgggaacgacagtcccagagttccccgcggcgggggcggaagccggggcggggcgggctcaggacccccgacagccggtccctggagatctgaggggccggggcgggctcagggatgcctcgcgcccgcggagagacgggcccgggacttgggaagagcaagctccgggatccagctcgggcgctgctgggttcagcgcccgagctgggctttgcaggctgagccgcgagccacttgtttgtggggagaatttacacccgcgacgagttcgagcttgaaggctcccgctgggcttgggctgcatggagcggggtccagcgctgcctggcggcttcacgcgaaccctgggcgcgtcccttgcggaggtgccggtgcctccctctgcagagaccaggagagagcctctgggcgttgggcggtgttgcccaggtgcacggctggtgggggtggagagccctgaactttggccgctggtttgtgtttttaactgctggctggtgctctgagaggccaagccacgtgttcagtaagaatcattaacagatcgtggctggatgacaacaggagccacactttactcatccagacgtgcagcaggcgctcaccgcgttgagagccgtgtgctggactctggggtgaagtagtgagttggccttttcttttttgttgtttttttgagacagggtctagcgctctcgcccaggctggaatgcagtggcgtgatcacggctcagtgcatcgtcagcctcctgggctcaagtgatcttcctgcctcggcctcccaagtgctggaattacaggcgtgagccaccgcccccagcctggcctggcatttctttgagttcaggaagtgtgacaaggatttggacacccagaaataagcgtgtcgagaagagcacaagcagaggatgtgagaaggggaattaaggcgggaaagggagtttgagactaggccatcagtgagtgacaggccagatgcttctgactcggtccccaggtgtcaggaaggaatcagactgaggacaaatgcggccagtggctcacacctgtaatctcagcaatctgggaggctgaggtgggaggattgcttgagcccaggtttgatactgagggttaagagaagggaagccgggaaatgggggctgtgaggtttcaaaccttgctacgtgtgcttttttttttttttttttttttgagacggagtctcattctgtcacccaggctggagtgcagtggcgcagtctcggctcactgcaagctccacctcctgggttcacgccatcctcctgcctcagcctcccaagcagctgggactacaggcgcccgccaccacgcccagctaattttttcatatttttagtagagacggagtttcaccgtgttagtcagggtgctctagatctcctgacttcg

SEQ ID NO: 64062 - DNA, 1885 bp, Homo sapiens
ttaggtgaagaactaaaggagctcaggacaatcactgcgagcgtctcctgactctcaaattccctaactccgggactcctagcatctaatgcctggacacggcccacgtgtggagcgcccagtgcctgcagcactgagctcggggctttgattcattcctctggccccatgaactggactgttcccgtgtcgctgtctcaggaggaaaggggctgacagagattagctaatttggccaagtcctcgcggccaggaagcagcagaactaagtccaaaccagggctgtccggcactgaagccggttattcccccgccccgccccctgggaggcctcaagggcgggcctgtccgtcctctctcatgaatgaaagtcctggcgcctccgaccagcaggtgtccccggggagccgcggagagactgccgctgccatggcaaccggcggaggcgtagctcgcccacgtgcccagtgacgtcatcggcttcctactcttccgaattagctcagagctcccggcggccctgccccctcctgccgccaggagctcacctggagaggccaggccagccctgggcacagcctcccgccccaggccgtggagttcactaggtctgagcccagccctgagacttcacagggatgcacccatctgcagtcctcccagcctcggcggcctcctctgcaaatgggattggcccataacctggaggaattaggatgaccatgggaactcaagtcccttctgtgcccccgtcctaagatttccatggcaactggggccgcgaggcctcttagggaagacactgacgcaagctctcagggcaggaccccgtaggcagcacccaagcctgccctcgcccaccccatgttctcagccctaggagtgggtgcccccacacgcccacgacccctcagcgctcggagccttgaggagcccaccaggcactgaggacacttgaagcccctctctctcgaaaggcgtggtcccccatggtcggcggccccgcgacccgcaggccaggacgaggggcgcgctcctcctggcctggcgcctaccttgatggtggtgaactccttcctccagggcagcaggtacaggtgcaccgcggcgagctccagaagctcgaaggcgcgagccaggccgcgtagcgcgggcgccaggtcggcgcggccccacagcccgtcggtgagcagagccagcgcgtcgtcctgcagcgccccgtgcaggtcgaagtcctccaccaggatctgccagagcaccgcgcgcagcgaggggtccccgcacacgcccgcgcggccccgtcgcagctcgcgctccaggcactggcggtagtcctcggacagcgagctgctgcccatcctgcggcggacgggggtcgggggggtcagggacctaaggccgcgcccagcccgccgcgctctccccgaaccctcacccagcgtccccaggacccctcgagcctggagaccccgcccccagcggctgggcgcccccggtatcttcggcaccccctacgctggagacctcggccccatcagctgcccgcccacccagcgatccaggcccctccagttgagcgcccccgcacctccagcccctccctccagcctgggtacctcggccttccaggggcgcccccggttatcgaccgcacccttctctagagacgcgcttccgcccgctgagccctctcccgaccagagccccttcgcccggcagatggagctgcggatcccgcgggtgacggcgctacctgtctgtccccagcggtctccggccgccgcggatcagttcgggcctccccgcgcgccgcgcgcttccgccgggagtcggctccgcccggggtccgcggccgtgacgctgggggcggggcggggcttggcgc

SEQ ID NO: 64063 - DNA, 519 bp, Homo sapiens
cccgagtagctgggactacaggtgcgggccaccacgcccggctgattttttgtatttttagtagagacggggtttcaccgtgttagccaggatggtcttgatctcctgacctcgtgatccgcccacctcggcctcccaaagtgctgggattacaggcgtgagccaccgcgcccggccatttgtaggatttctaaaaggaagctgctattattcattcctgtcttatgggggagctgcaggctcagcgagggcaaagctgcacagcaaacagcagcacttgaacatgtctgccgggtctcagcgccagggatacagctgagccaggacgttcccggcccccacagtgtgcaggctgcaggtgtggccccgatgccaagccagcaggggctcccacgccaggatttgttcaagacacagctcatctccaccattctatgaagcggactttaaaatcccatcttctagacaccaacgctgaggccggagcagcccaagctccaaggcaccgtggccagctgg

SEQ ID NO: 64064 - DNA, 3124 bp, Homo sapiens
tttcaccacgttggccaggctggtctcaaactcctcacctcaggtgatccaccgcctgggcctcccaaagtgtcaggattacaggcgtgaaccacagcgcccagcaatatgctatgtttttttgttttatccctagctgttaagtttcctatctttaagtctatgcctcagagagaaagacgaaatataatccaggcaggatttctgacttgcgggggcacctgctgccctaaaaaccaacttggggaaagcagcagattcaggaacgaggcttctcctaggcacaggcaggctccttccctccttgggcagccgggtgtggctgggccagcttctctacctggtcgccaaccttagattcggccccatctcaggaacgggccacacccctccggcctgcttttccttcctaagacgactgcaaacagcatcacaaatgagcaggtatgtggccttctctgcatgccgtcccctgtggcaaccggattaaatctaccatctctgcccagaaaaatgcacgaacgcacggacctgcccgtcactcggattttggaaggtggcctggcggaccctcctgctacatctcctctacaggtggagcccaggctgtgatgcaccggctcagcgagcggagtggaaagccaaggtccgcaggatctgagctgtccaaggtcactgcacgcccggctgcgccccgcccccgtcctcgcccgggaaccgcggcccgggatcccggctggcgcccgctcccaagtctccagcccgagccggccccgtcctcgccctccccgggcgggggtccctccaggggccaccctcagcggccaagccccgcccccgccccgcctcacccggggccggttgccggtgtccagctcgatggccccgttggcaagcttcatggcgctctgcagcggcttcaccgtgccgtccccggccgcagcggccatggcgccgagcgggggaggcggcggcggtagccgaggggctggacgggcgaccggaggcccggaacgcagccggcgctggtgctggagccgcccgagcagcggaccgcaggaagggacgcggccgcacttccggcgacgggccccctccgcgcgtactgcgggccccacgggtgttagtggcgggggcggcagagtccgggtgggttgtcgcgacggagccgggcctcttcgccgtcttgagacggggctggcgagaagggcccctcacggagttgccatgggcgtctaaccgcggcagccaggcccctctctacgtgagaccccggcccccctcccctttctgcagcccgcccgccacctgcgcgccgcgtggcctccgccggcgcctgcccgccccgcgcctccgtctcccacggtaagaggcggtgagggccgcgtcgcctctccctggaggactcgtcgtgaggtgtcggcgagcccctccgcccaccgccccgccccaggccagcgctccattggcgacagaggcgggcacggccgccctcgggcccgagaggggagcggtacgagcgggggcgctggcaccgcgggtggaacctcggccggcggggtcccgcccctggcccctggcccgccccgcccgcctcgctttgcttctcgctccgcccctcccccgccccgcctcgcttccagcgcgccgagcggagcctaacgccgggtcctctaggaacctcgggccgggcagcacccgcgggattctgctggcgtcctccgctgccatgaagcgggaccggctgggccgcttcctgtctcctgggtcgtcccgacagtgcggggcctcggacggcggcggcggcgtcagccggactcggggccgcccttcccttagcggtgggccgagggtggacggggcgacggcgcggcgcgcctggggcccggtggggtcctgcggggacgcgggcgaggacggcgcggacgaggcaggtgggtccgcggcccgggcgtggcgggttggggtcgcggcaggggttgctcgtgggaggagccgcactgacgcccggaagccggcgcggcctctcctccacccggccaagggcgtagcggactcggggctgcgtcgggataggcgctgggcggccggctcggttttcctcgcgctccgtgacgccggcgtcgccggcccggcctccccggccgcgggctcggccagaagggacccggcgtgaggagcgctgtcaccgcgggcaggtcgccctggggtgcccgcgcgtgggaatcgccctcccctgcttcgtgccctcgcggagccggaaaggaggcggcacctgcaattggcagacaggaaaccgcggcgtttcctggagggcgcagcgcctgccccgggtctcgcggtcgctgggaggagggtgcagttccaggtttcactcttgaagttgcttcgctggagaggccttagaggcctttgaaatttgaaagatttcttggaccagcggccacatcccccacagggcggcttgtcccgccgagagccgcgcgcccgagccgcttgctgtgtccgggagccgcgcgaagggcgctgcaggcgctgccctcggacctggagtccgggacgccctgtgctcaggagcctcctttgccagctgctaacacttcctgccgctctgtgcaggagcaggccgggctctcgccatgggtcactgtcgcctctgccacgggaagttttcctcgagaagcctgcgcagcatctccgagagggcgcctggagcgagcatggagaggccatccgcagaggagcgcgtgctcgtacgggacttccagcgcctgcttggtgtggctgtccgccaggaccccaccttgtctccgtttgtctgcaagagctgccacgcccagttctaccagtgccacagccttctcaagtccttcctgcagagggtcaacgcctccccggctggtcgccggaagccttgtgcaaagtacgccctagtctgttcagagcacgttcaggctgtcagtactgcagtgtgacgggtgttgagagagggacagggcgtgcctccgcgggagcctctgggtggggggaatgggccatgcccgggttcagtgccaacagccctgggactgttgtggagagatgaactgggaggagctggggtgagggaagagaaagttgccta

SEQ ID NO: 64065 - DNA, 1625 bp, Homo sapiens
gctgcagtgagccaagactgcaccactgagcacagcgagacgttgtctcaaaaaatatatcagtaaaaataaaaaaagaagttcgtgttgggagaaactgagaaagtatagcagggtttctctgtatttattaatatatttttttgagacagggtcttgctgtgtcatcctggctggaatagagtggcgtgatcttggctcactgcaacctccacctcctgggctcaagtgatttctcttgcctcagcctcccaagtagctggaaccaaaggtgcacacaactgtgcccagctaatttttgcattctttgtagagatggggtttcactatgttgcccgggctggtcttgaactcctgagttcaggtgatcaacccgccttggcctcccacagtgctgggatcacaggtgtgagcaccgtgcccagtatctgtataatttcttaagagctgcacatgaggccacaacgattttagtcaagattccaatcaaaccatctaagtgctgctgttcttgcctctgaggagacagtcggcacacgcaccctagactcgagacgaggagacagtcggcacacacacaccctagactcgggacgtggcatgatgcaggggaaggaacggtcacctacgtgctgctgttcttgcccgaggagcacacacaaaccctagactcaggacgtggcatgatgcaggagaaggaacggtcacctacgtgaacatcttcctctttcaacacctctcggaaggttctgtgtgtccagagagagagggcagctctctgccagtctgcagaaggaaggtgcaagggtctccaggaaaggctggctacgtcctcctcagaaagaggctgtcgggcctctgagaacaatctgaacatgaggaactgaaactgaaacagagagtgacccggccgtttcttcattgcgcaagtttcactgtgagtggctgagcaaatgctcaggtggaaacagaccatcaacagcccacacacacaaccccacattcagaggacctcagtccagcccctgggagggcgcaatacacgaccccacgttcaggggacctcagtccagcccctgggagggcacaacacacaaccccacgtttaggggacctcagtccagcccttgggagggcacaacacacaaccccacgttcaggggacctcagtccagcccctgggagggcacaacacacaaccccacgttcaggggacctcagtccagcccctggaagggtgcagagcccctcagcgatcatggctgtgcacagtgctccagggaagagcctatgtgcagaccttcctgccatctgactgcttccttgagctaaatgtctggaagcagaattgcaggaacaaaactgcctcccaggggtagggctggtttggtcccgggcagtgaaacagcccatctctaggcctctgccaggaatggcgttcccaccaaaaatgcacaccaactggacaagccagacacactattggtgctgcgtgaccgtgtccatctctgcccccgaggagatgagagcctcccatgtttataaccagcctgctccaaggactgtcgtccctgctcagcatgctgggtgggaaccacgctgccctctcctaagctcaaactcca

SEQ ID NO: 64066 - DNA, 303 bp, Homo sapiens
tgcgcgcggtgaggtagtttttgcgtttggctttgccgccgcggtgtagtccgcgggggcgtctcgcgcgggcagactgccgcccctcaagcgtggttcctgccgggaatgactggggttggtcctgaagagaccacctggccaaccaagccgaggcaggctcagagcgccgcggggagcgcaaagccgcgcgcgcctctgagctccgggcagccgctgttcctcccggcggccgaacggtccgcgcgcagggcggtgtttcggcagccggagaccgcgcggtagccgcgcctgtattcccag

SEQ ID NO: 64067 - DNA, 1630 bp, Homo sapiens
aaaaaagaaaaaaaaatcattgtggaacttcttttctgggatgggatctcactgtgttgtccaggcaggtccagaactcctgggagaccagcgaactttaagtgccccaagtttcacctcggacctgcatcagaatctccagccctggagcccaggaatctgcatttcttgcccccgggtggtactggcagcacccaggcttgggaccgtttatgccccaactgcattttcttgcccacttattcagatctggcacaactatgaagaggcctcgggatgagccccagccgagttccccttgcgtccctcaggcaaacacccagtgtccaggagtgacccggcctgaagacacaaacacgccccaaatgcgatgcacgccatcactggccaaccgtgtgtgtttatttttcacggacaccctggagacgtcactgcaggcacattccctgctaggcagaggcatttattaagggcttcatacccgaaggccggatgcggggagtcgccctcaccccagccaccctgcgacaacccctggaggtcaccttgcccggggctcggggaggccactgcgggctttgtctgctcagctcctcccggctccctcccgcgttcccagcggcaaacctcccaggccccccgcggtcaccgcagtgtcccgggctggatgccggcccgggcttttgtgggcatcggccgtctgggtctgcgggggagcgccgggggtgtcaccgcgtgtccgagcgcgcgggccctggcccatgtctgcagcccccaaccctccccccggtcctgcccagcaccccggaggggttcgcaccccggcctcggccccgcgcccccgcgtccccagccctgagccccagcccctccgcacctacccgcgccccgccctgcccctcacccgtccccctccgggcctctccccgcgcgccctccactccccgccccgccccgcgtccctccccctccgcgccccgccccccgcgccctccgcgccccgcccccgtcgccgccccgcccccaacctgaggcgctcgcgcggggcggggcggccaggctgaccctgcgcggcggaaggcgcggctgcatggacgcgggtccggcgcgcgggaggcgatgacggccccgccatggcccgggcgggcagctgcggcggcgccgcggcgggcgcagggcggccggagccctgggagctgtccctggaggaggtgctgaaggcctacgagcagccgctcaacgaggagcaggcgtgggccgtgtgcttccagggctgccgcgggctgcggggctcgccgggccggcgcctgcgggataccggggacctcctgctgcgcggggacggctcggtcggggcgcgggagcccgaggccgcgggtgaggccgggggcggggcagccggcggggaccgcggtctggggcgtccgtcccgccccctgggtgggggtggtcccggcggagaggctgcgaccggttctggagcgggagatccccttctctgcgggacccggagctccctccctcccactctccgtccctctttccctctctctttcctccctccttctctccctccttcctctccctccccggccctggacgttcccctcccggacccccccacctgacg

SEQ ID NO: 64068 - DNA, 1085 bp, Homo sapiens
tccgttgtcaggcctgttaaatccagatccgagtcctgcccggaacatctgactctgaccctcccaggtcagcctgagaatctgcatctgtaacaagttccctggtctgctgctgcaggagtgaggcaccccaccctcaggggactcggatggtggtgagggggaagagttgaggtctccgtgtcagccctggagccaaggctaggcccagggtcagactcagctgggtggccttgggtcagttcctcaccctctctggacctcttggaccgggattaatagcatagccgcatcgtgaggcgcatgtgacaggggtgcttcttagccaggagagagggcaccttctcaggtaggatctgacgctgtcacctctcagctgctgcctttctgctgtgaccagcggtggggtccccttagggctcacctcaagacttgacacacgccaggcaggggctgggtcgggatccctgcaggagcggagaagcgggggatcaggggcactgctgagggcagttctgtggccaacacacgcctcccggactcgggtctccgcacgcacctcccggactcgggtctccgcaggcattgatgcctggcatcctgggttcttgttgaggaggaggacgccccgtgcggggggcgtgtgagtttatggaacgagtgggttggtctcagccagggatcagccaccgccctctgagacgagcactggcggaagtgagatgcaagaggaagctcacggctcaaccacatggttccctctgacccaaagagcaggctctgtttgctaaacaaacacagactcctggtttcgtgcgggcgtttctccctctgggcttccatttgcctgctctcagcagcttctttttttgtttttatttttttttctgagacaagtcttgctctgtcacccaggctggagtgcctcagctcactgcagtctccgcctccggggatcaaacgattctcccacctcagcctccagagtaactgggaccacaggcacacaccaccacgctcagcattttttttttttttttttttttttgtatttttaagagagacgggatcttaccacattgccc

SEQ ID NO: 64069 - DNA, 1673 bp, Homo sapiens
agcctcccgagtagctgggattacaggcgtgcgcagccacgcccagctaatttttgtatttttagtagagggagtttcaccgtgttgcccaacctggtctcgaattcccgacctcaggtgattcgcccaccttggcctcccaaagtgctgggattacaagcgtgagcaccgcgcccggcccttagatcgtgacaaacgcgggcggcctgtcctagaactgtcagaaccactgtccctaaagaggcctcgggcgggcagtaagggccgcgtcactcaatgctgctcgaggggcggcggctccagggcagaggcgggcatcgacggctagatcactcgaatgacaccctgacacgaaaaggaccaactagcaacgtccgggacgcagctgaaatgctgcaggcacggtgcggggacaggccccggcgggcagaacgcggctgcgggttccgggccacatggatgggcaaggccgggcagggccgactgtcgccggctgcgcgcccgttaccccgaatcgaagcccgtcatccccgcggggcacctctccatgcccggtgcgcacggcgcgcagacacccagctctccagagacctggcccggaccccccggagcccgcccagacgccgccgctgaagcgggaaagttccggagagccgcgacgcgcaggcgccgcagccaggtcctgcccccacccctcgcgccaagagtgcgcaggcgcgcagccagctcccccgcccccgaccccgcgcgaagagtgcgcaggcgcgccgacagccgagttttctgcgcttccttctccctctctccagacgtcgtggtcgttcggtcctatgtcgcgccgggccctccggaggctgaggggggaacagcgcggccaggagcccctcgggcccggcgccttgcatttcgatctccgtgatgacgatgacgcggaagaagaagggcccaagcgggagcttggtgtccggcgtcccgggggcgcagggaaggagggcgtccgagtcaacaaccgcttcgagctggtgaggagcgcggcggcccgggtgggggtggggtggcccttgacgttgtggggcggggcgagcgtccagccgggtcggggagcggggttgtgatgccaggggtgggaagggtgacgtgggtcccagccgcagtggggagggcggggccgtgcgtcggggccagggcgacgcgggtgggcggtggcgtggggtgaagacggcgggccgcggagttagactgggttctaaccccggtgaggtgggcggggctaagggatggggcggggccgtgctgtcggggcggggcgaccgaatgggcggggttaagcggggtccgggttgtggagggtgcggggccttgatgccaagggcgtggccaacgtccgcggggccgggccacgacgtgggcgggattaaatgggcctgcggccacgtggctgtcgtggggccgtgacgctaaagggcgtggctaaagacgggggggtggcgaggcgatggcgtgggcggggttaaatgaggcctggggccaccgtgggggtggggccacggcgtaggggcaggagtcgggtggggcttccctttctcgagtctagaggggccttctctcggttccagggttgaggacttgccaggcctctgcgagcattctgctttaatcctcacaacaactct

SEQ ID NO: 64070 - DNA, 371 bp, Homo sapiens
ctgacctcgcgatccgcccgcctcggcctcccgaagcgctgggatgacaggcgtgagccgccgcgcccgcccattttttttaaacgtgttggggtttgggtttcagccacaggccttctgcgatgagaggaaacccaggacgcgcagccccaggtcaggcccgcggaacagccgggcggactccggggctcgcagactcgcgacccgcgtgccatgaacctccgcgccggaggcggcagcagcgagcgcggggctggatccagcgtagcggggcggccgggcggatccagcgcagccgggagacagatgcgaggcggcggtcaggtgagcggcgcggggccggcggggtcggggccggcggggacggggcc

SEQ ID NO: 64071 - DNA, 2204 bp, Homo sapiens
gcatgaaacctctccgtttgagaaccttcgccatgttcacgctgtaagtcatcaaactcagccttctcctgaacgatggcggcgctcaaggtcgcatttggctggctctggtcttccagccacaagctcagcagctgctccatgctctccatcactgcacttcgatggcgagtcaaccgagaggctctcagaggagtagctatttgtgaactcgctttgattttttctttactatctcgaatggtcgccactgtagagatagcaagatctaaggcctttgcgatctgactgagcttctcacccgcttcaaatcgtcgtaacacttccaatttgaggtcaagggtaatcgctttccgttcccttttggcactagggatgacagttgcatctgtgggcctttccccaggcatttctgcctccaaaatgtcagaaaatcacagcggtctcaagcgcaagaacgctgtggttcctctacgtccccttgcagaactcggtcaacagaaaacgaggctgcgaagaggctcaggctgatgtcctggagacgtggacgggtccccatgggcaggcccagccccactgcctagcccagctgctgcttcactgtccactccgaggaggccgcgcgggtctcccggtaccgctcgaagtccgcgtgttggggccgtgcggccgcaggcacatacaagcggcctgggtcctggggctccagagaacaaccgaccaagcagacaaacggaactccgtgagggggacactgcggcagaaacgtccaggggcggttttccagtgcagcggagggcggaccgggcgggtgttgtttcgggagctgctttccatggaggaccccagaaataagtgttgatgccgatgcccgatttaagataagtctaaaggcgctggctatccccttagggcccagctgtctgggcagggcgaggctgcgctggcgatcaaaccctcgaacggtcaggcgacggcgtggacacccaagacggggccccagccggcgccgcgcccctgccgcgcctgcgcgagtcctccctgcgctcgcggggccctaggaccgctctcccattgcgcatgcgcgcgcccgggcggcgcgggatctgggtctggggatgtggtaccggctgctggcggcggccggcagtagagcggtggccaggccgctggccttgctgtggcgatgtggtggcccaggaggcggcaggacggccaagaccagcgcgagggccctgggcaaggcccgacaggtgagcggggaggcgctctccgccggtgccgggcggctggtctgctctggacgccgcgtgacgccattcgcctgcgccggccgcgggggagcgcgggagggcggcggccctgacctggtccgcgcagtgaggccgacagcacctggccagagcttcccgcccccccgcctcctccgtctccaaactcctgctcttctcctcgctacctcttccacccacttcttgcggaattcccgctgtttactggatgcccggtcccctcggacatcggaaccgggacctccagcctccttgctcggctttgtaaagcgccgggcgttgagcgatttgcgcttgagtcccacctcctcgcgaaccagctttgtggccccgcgtgccagcccgtgtcctcctgggctcggcggcgttcggctttatccacctcgcagttactcagtgaaccagacacgataagaggcgtgaaagggttttgcaaactgttctttatacagcgaccagtcactgtcgttaacagctaatgctgagagctaagggctttacgcggattatctaagtcttatacccgccctataggtagatatcgctataaccctattgttatttattatattatttttaaaaatttgggagcggggccggagtctcgctgtgttgtctaggctgatctcgaactcatgggcacaagcgattctcctttctcaacctctggagtagctgggactacaggcttgagccaccgtgccctgctcataaccctgttttatagggttagggtctaagaccggaatattctgcattttaagattgctttatttttgtattgatacatcccagtgagcagcagtaacgttgaattgtttttctaatgcagagtttttgaattttgatcccagaaagctgtcatggttttcagacagcagtaaaataagaagaaggatcccatgagtattt

SEQ ID NO: 64072 - DNA, 1581 bp, Homo sapiens
gactcagcagtgtcccttagcagcgatgacacagcaaggatgactcagcactgcccctcaccaaggatgactcagcactgccgctcaacagacatgactcagggatggcttagtactgcccctcagcagggatgactcagcagggatgactcagcaccacccctcaacagggatgactcagcagggatgactcagcactgcccctcaacagggatgactgcagggatgactcagcactgcccctcagcagggatgactcagcactgcccctcagcagggatgactcagcagggatgactcagcaccgcccctcaacaggcatgactctgcagagatgactcagcactgcccctcagcagggatggctcagcagggatgactcagcattgcccctcaacagggatgactcagcagactcagcagggatgactcagcactgcccctcaacagacatgactcagcagggatgactcagcaccgcccctcagcaaggatgactcagcagggatgattcagcagagataactcggggatgactctgattgtccttcagcagggatgagtctgttttgctccgatggaagcatctgtagtgtccatcagcaggtgaatggccaaagtggtatatactgtagtcacattcagctataaaaaggaataaagtatcgatgcatgccacaacatgggtgaacctagaaaatactgatctaaatgcaagaagccaggcacaaaaggccacatagtatatgttcccatttatgtgaaatgtgcagaataataataaaaatgtatagaatagcaaatctgtagggacagacatgaggtgagtggttgccagaagtggaaatgggagttaactataaattgcacagggtaccttacagagatgatggaaatgtcctaaaactagattatggcaatagttgcactacgtgatcagtttattaaaaatcgttgatgtgtgtgtgtaaaatgggtggattttatggtttataaattataccttaataaaggttaacaaaaaatgtggctaaatagtggtgactgatggacacctcccattacctttaagttctctactgaagttcagccttggcctctctgctggagattttccttaacaactgatctgggtcaagctccagcggccaggagcagcactgactgttggctattccttcctgggtctggtgctgatatttcgaatgtttgcaatgaagcagccctgattgctgcctggcatctgagttcttctgttcaggagaaacactttcagcaggccattgagagggtcatcggaggtgagcctgggagcccttagggagggaggggtgtttgcagctctgggcctggcaggctcaccccctggccccagtttcaattctgcatgcaggccgggcgcagtggctcacacctgtaatcctggcactttgggaggccgaggcgggtggatcacttgagttcaggagtttgagaccagcctggccaccatggcgaaaccctatcttgatttttaaatacaaaaattagccgggcatggtggcacacacctgtagtcccagctactcaggaggctgaggc

SEQ ID NO: 64073 - DNA, 1853 bp, Homo sapiens
gtgcatgccccacatccccaagacccatctcagcccctcgcccctggcaggatccctgcccgcgagtctacggccctcgccccccgggactcgcggctgggcgaacaaagcggacgcgcttgcaagcggccagcgtcgccctcacgccccaccgacagggaccccaaactccagccccggaacccccctcccccgctccccgggtcaccggctggcttggctgggagggggctcaggacgaaactccgggccacccaccaaggagcgtgccgggcacggcttcccgggccgggagcgcagagaacaagggggcggagactcggtccgtgtgcccccagccccgcgcggggaccgcgcccgggaggtgcccctggcccgccggacgaccccgagctgccaaaggggtcttcgcgactcccgggagcggcgaagggtgagccctggggggaggggctgcggctcgctgcggggaagcgctgcgcgggggtctcgggggctggggctgaactcacctccggtgccggcgccctccgggggctccatgcggccggtgcggtctgggaggggcacgggcgacggcggcgtcgcctggcccgggcgccccaacagctgcggcagcgactcggccccggctccgggcgcagcgcatcggggcagcaaccggggggccgcggcggcagggaggagcccgcggggcggggcggggcgcgcagctgctcccgggccccggccccctcccggcgcccccccagccgcaggacaggtgcggccccgccccggcccgcgcgcgccccctgctggcccctggcccagcggacccctcccccgccgacccttccctcgcgggccgcgccccgccgcggacaccaccgggacctggctgcgccctcccgaccccggccgggcgtccggggctcctgcgcactcacttggcggccgcgcccgctggcgtcctcttgttctcttccaggtacttgcgtgtggggcgccgactgtgtgcgggcgcccctcggggctggcgaggggcacaggaggggcctgactcgcgctgggtaatgacagactcacagagcgccctggatggcgcgaattaacgcggggggcgggtgggggcgagggcgtgtgcttgggaggctggaaggggcgggatgggggatgggaggtaaggagagggcggcgggcccgggctgcagagagcgccaaggcagtttcgatgaaactgacccccatgtccctatcgcccagattcagcgattgccagctcctggcctgggccactgcttctctgtcctcattcacttccctccactgctgggtcattttgaagcaaattatatacacattagatcattgcatttgtaagtacttcaatatttatctctcaaagaaagtccgtttgcaggagcattgactcatgcctgtaatcccagccctttgggaggctgaggtgggagcacagcttgagctcaggagtccaaggctgccgtgagctatgattgtatgtctcaaaaaaaaaaaagaaaagaaaagaaaagaaaaagtctagtcttcataaacactcttgttaacccagcatccaggccttcactgagttgatgccgtggcctgaggcggtttacctggtggatagtgggtggcaggaagcatcagacatcagacagagggcagtcggtttgtttgtattaacatttgctctgggattttgcaggaaactcagatgccatttatctgggtttctgagctgcacagcttgacactgaatgaaagtatcttaagccacatatgtgaagaaaaggctcttttctaaaaatctgaactcgaattcaatatgaaaagaacaggtcgcagtgggc

SEQ ID NO: 64074 - DNA, 1348 bp, Homo sapiens
caggaagagcagtttatttttgtgaaaggaatacttactgatttcaaacatttggaactaaactggaacgtatttttctttccgatttctgcgtttttgaggtgtgtgtaaacccaccagcgcagcagctgggagggcccttcaaaggtgggcgggtggggtgagtgaggcccaggggatagagtgtttgcccagatttgaatctcatttggggaaagtttcagaggcttgggtggctgattgatcattccttcaatggtccttcatcagcacgtctttactgagcacgtgctgtgtgctgttctaggcgctgaaggatagaagtgaagggttcccccctcgtggagcttaggttccagcaataagcaaaacatgccctgcagcgaaaggcttctgggctgccggcgacattttcccaacgttcacaaccgggttccttccggacgcccgtctctagggacgcactcccgcctttggcagggccgctgcccggcggagtctcgcgaggatcttgtgacttatcgcggcatcgcccagcggttgccgggaaacggcgtggcttccgggggcgggcgccctggtcccggagtcgccgctgggcctgtccgctggcgtcatggtgagcaggggcgggagcggggctggggtcctcggcaggggcccggagacctcggggcagggaggcctcggtacacggagaccctgggaatgggaggcctggagcgctgggtttctggaattgagagctcggtgctcttgtgggggtctccgtggggcaaactcaggatgctcccggccccggggcctggcagcactcgggactgagacctgggctgtccagagccctgtgctcacaggggtggtcatagaacgcccagggcccggggtcggcggcgcacggtccccagaagagtgaacatgcgtcaaggggactctcatcctggaatggcagactcggtctgttggatccctgggacctagggtttcagctcacgaggctttgcagagcaccagggtccccatggaatagagccggaggcaggaattaccctaagacctttggtctcccggatggagagcctggggcacaccagagtggctagagatccctctacaccaaggaggcccggacaggtccagtgcccttggagtgcccagggcacaaccttgggatacaggaaccactgttcccttggaaagcctggcaggagtcaggcccagaccgagaagaggaaggcggagctcgtggcctcatcagctccatgtctgtctttctcttgtaaagggctctccctttgtggtacaggaattgtcagtaactcaatttctgggcaggtgtggcagggtg

SEQ ID NO: 64075 - DNA, 1593 bp, Homo sapiens
gaccccatggaggctgagggacacactgcccctcaggcctggctgggaatcccagcacgcacctgggcttgctacctcagtcttcccatgtgtagaagggtgaattatggtgctggcccacggggtgtatggagaatgaaaagagtggaaataatgtccagcgtactgcctggcacaaggttacccgtgatctcagtgagctcttcgatgccacctcaggcctcacctcaccaccaccccccgccctcgccctggcacagctgccagggagaggcagaaactcactcccaccccatcagggtcacaggggcctgaggctggagggagggaggaaagagctcctctcctcatccctgtattttcagaggaggaaacgggctgagagaagcagaagagagagcccctaacctcactcccaacccgggctgagaggagggtcggcagcggtgagctccgccctccagcctcactgcctggccccttagtccccgccatctgtctcagggcggcactccccctcccagggcctctctcctaccttgtcctcagctccgcccactgctggccgtggtcctccagccagcacaagcggaggcagaggcctctggctgggagccctgaggcggtgtccagcacgtgggtggtcagtaggttgtccggaggctccgtgctgctgccctgggccaggagaaggaggccagggtgagcctctggagccctgtgcccgcctacccacaccaatcctgcgtccacaccagctgtggggcttaaacagccctctggacagagttctccgagctgcccaggggacagggggcaagggtgaccggaagtgcccaggcagctgatgaggcaccaaacgtaaacagcgcagcctgtgcctgccgaccctcccccaccaatccctgtggctcccctgccccactggggacacccactgtcccgcccacggccccacgaaatggccatttccccccaggccctcagttccagcccctggggtggttctcccggaactgggctctcctccgcgccccggttcctgggccctcgacgctcagccccacgcaagcagctgaggggacaggagccctgcaggtccaggcctggccccctaacctcctgggggcctaggtgtcgctggagcctcagcagccgcgggacggcccgggggctcatcctgccctgccggactgcgacgcccgcgggcaaagggaagggcggggccggtcaccccgccccggaccacctcgtgcccaccaggagggccccagcggggctttgcccaggaaggtgcgctggtggcgaatcagggcgcacagacctggggcccagaagcggagtcgcgaggacctgctggggggtggtgggggcggggacgggggcggggccgcggtgagaaggggcgggaccgcggtgagagggggcggggggcggggccgcggtgagatggggcggggccgcggtgagggggcggggccgcggtgagagggggcgggaccgcggtgagagggggcgggaccgcggtgagagggggcgggaccgcggtgagagggggcgggaccgcggtgagagggagcggggggcgggacc

SEQ ID NO: 64076 - DNA, 763 bp, Homo sapiens
catgttgacgtcccccgaacacttacagaactatcccctgttcttcctcaactctagtcatgaaagtggcggatttgtttaattagttatttccgatctctttacactctcggggaatgtaaggggttagcagactttcgctgaagccacctcagagctggggtgtgcaagtgtgtggtgatcacgtttgtcttcttgtggctattgagataaggttttattactaatgacttactcatccttcctgcagactggggcgtctcccctgtgtgtcctctggtgaatgaggaggactgacttccggctaaagccccgctcacactctctgcagacataaggcttctcccctgtgtgtgtcctctggtgactgaggaggtctgacttccggctaaagccctcccacactctctgcagacgtagggcttcccccctgtgtgtgtcctttggtgtgtaataacatctgacttatcactgaaaccttgcccacactctccatatttgactttcgcaattcttgagattcctacccccacaaataatttgcctgtgttccctggattcactttctggcctgttctggactcttcttccatcattctttctcccactctagagctccccatttgtcctttgggtgggctagaaaaggcccttgaaatctccctctgccatgtccttttattcaagagtttggacctttctttgatctcttgacctttggttttgtcattacagcagcgtggatcagaatattgccgctcct

SEQ ID NO: 64077 - DNA, 882 bp, Homo sapiens
gctcacctctggagctgctcctctgagatgggcctggccccctagataattggagggtcctgcatctcatggcagtttccaccatgccctgctgcagctcgcacccagagccctctgatcacgggagtgggcagctgccatttactgctgcaccattctgaccatgtgccccacgttatttcatgtagccctcactactgctgtgtccaggaggctcagagaggtcaagttacttacctaaggtcacacagctggtatgtgccagagctgggaagagaacgtgcacttgtatgactccgggatgttggctttctgccttgacgccccagcctcttcagctgtggctggtggcaggtcctgggcctctagcgaggacgtgcctggctgtgggcccagcctgggattgacctcacaccctctctcacacctggggcttcactgacagcggcgggcacagtgccttcctttctctttccctagacaccagctctgaccctccaatttccaccatgatcacagtgttctcagagtcaggcagcatatgaggaaaattgccctttccctggaataatttaccatcttgtaatttccattacctgaccctgttggagcctattccgtgctgagctgtttgaatttccagcttggaaatccccaggctgggcgggaaatgctgtttcctgagggaggagcagacgagggaggtgctgcctgcaggcttggcggagggtcagggggtgtttgggacagggacacagtggggagggggctgagaacagcaaccaggcagcatttgtgattcttctgaatccagaggggcttgtgtgatgaaattccacagggctctgccaggctgatacgtgggaagggtggcagagggct

SEQ ID NO: 64078 - DNA, 825 bp, Homo sapiens
tgggtgggtctgacgggatttcgtttgacagcatgtgcctgtctgtgtggcacgtgtgcgtgtgtgtgcagagggtggggccaacatggaaatggggctgggctttccagtagagcctgatctgagagctgccttaccagccactgctctaccccccgcctgaaattcctctgtaagtttcattcccttggatttagacctgtaagacacgaccgctgggagagaacagactctgtcccagcccctcatccattctactcatggggaaaccaacacctagagaggaaaaatgacttccaacgccaagactgtccggcccaggagtcccccaggaaaacaccagccctgtgggggctgggcctgtaagccctgctgatgaggtcacgttgggccacctccatgatcatggcagccactaggggcagggtcaaggggtcagggttaggagtacagtcacacagacgtgacctggtcatgcccctgcctcccactggccaggtgcaaaggtcagggagtgaagtgagctggacatgagggcccttcccttctgagagaagcatgcccatttttcttgcaacaggcacccctattggtctgtcttctttcttttcacagggatgtgaaacaagaacggtttcactttcttcttaaaaacactgcaacggtgatgctgaaagggtgtcagagacaacagggccgggtggggactgcagcgaaccacagaatgcaaccggggagcggctacttcccctgaccaacttccctgagcagggagcggctacttcccctgaccaactttcccccaagcggggagcggctacttac

SEQ ID NO: 64079 - DNA, 608 bp, Homo sapiens
atttcggctcccacctgggaactgcttgttgaaggagcccaagagaaacctctccatgaagcagagaagcttctagggaaaaagaagcctcaaccctcctcacccgcttggaaaaggcccagtcctcaggtgtgctgagggcggtgctccaggccccggggggcagcgtcccacacccctgcctccgccagcagcttctgcacggcccagcccagactccagctcccaggtggctctccgcgggtcctgccaggtacttctccaaccttcctcccctcacctcaccagagccagggtttgcttacagccagcagccaaggccatccccggctgacctcgcctgctatctgtgggcccagctgtctcctcttgctcacagaaacacaaacaggcgtttctctgttgcaactccagggttaggcactgccctgcctgggaacaagctgtccggttctctgcacactacccattctcctggcagaggctaagaccccaaataagtgagaatgcccataagagggccagcggagggctcaggcaacagtgggggccaccccagaacatggcttgctacagagaagacaggcagggggaagggtcagacagaa

SEQ ID NO: 64080 - DNA, 1688 bp, Homo sapiens
ggacatggattgcaggggattttgaaggcagcaaagccattattctccccacatgtccttacacattggttgaagtccacactacctacacctccaagatccaaccctaagtgtacactacacgtttcagttaataataatgtatcagtattaccacatttattgtaacaaatgtacctcaccaaagcaagatgttaatcatgggaaattgaaagaggtaagaggttagacgggaactctgtactttttgttcaattttttctgtaaacctaacactgttcaagaaaaaaaaaaaaaagtaaagtgctaccaaatgcaatgaaaaaaattttaattttcttcttcatagagaaaacaaaaatagcacactaatggtcatcaatgcggaagaatcttgccacgccactaatattacatttgagtgttataccctcccgaatgcttttgtgtggactaatcacaggcgcccatcatccctgtttgctaaaggaggaaggtacgtactgtccatgcctgtgttccatccccaccacgtggccctcccttgggagtgcagaacactgaaaggtcaacaaatactgggccccagttctttcttcaccacatgcatcacagttggaatctgtgtttatttctttgtttacgtgttaatctctggaaggtgcacggggagaagggtcacctccattgtgctggctctgaagagccactgcatattgcacagtgcacgagatgaatccaaaatgaatcagacagcggctccaataaatgctgaggccatgcaaagaacactgggagtgaagagaaggcgcagtgaagatcttgctctgtggcagtcctggagggcttcaaagagaagaatgtggtgcagggctcagagggaaaaggagggacttggcaggcagaaggcggcattccagggagagaatggtcctcccagaagtgccacaaaggaagaggaaactcactcagagaactagggtaattgggcaggagggaaactcgcctgggcaggttagtgactgccctgaggtcacagctcgctggcaccaacttgggcagagctgggaactccgaagctgtagaaacagccaagtgcaccttgagctttcactgaagtcaggctgagaagagaggaaagtgaacacaccctccccatttcacccacatctcccaacatccaggggccaggagcgtgcccagaaattaccagctcaaactcaaaacggctctaaggttaaatgcacgttctatcccaccacatattgattatttcaaaaattaaaatgactgggcacagtggaccatgcctgtaatcccaacactttgggaggccaaggtgggaggattgcttgaggccaggagttcgagaccaacctgggcaatgtagcaagaccccatctctataaaaaaactttttaataaaaataaatgttaaaaattaactaattaattcaatttaattaaaataatgcttctcctccaccttaagacataaccttccaaaaatgtcttccagtaaaatcgagtccaggattatgcaactctagttttatgtagtaatagcagcagcagctgacatttctgtaacaccttatctatatcatcactcacaatctccactgcaatcccatcgagggccatcagcaccctgatattactgctgtgcccagcacaccacagggaca

SEQ ID NO: 64081 - DNA, 3722 bp, Homo sapiens
agctggtgacagagcaagaccccatctcaaaaaaagaaaaaaaagttccaaacacagtatctggtacctagcaggccctcacaaaacaaaacaaaacaaacccgttttttaaaccaagctggtccctgaatgctggtgaacttctctgcactaaaaggatgaaatgggaattaaaaaaactgtgaccctctgaccgcaggccctgatgatggatgaaatcttggcctgggctgtcagccaaggccatctgggccaaaccatagggcaggaaacagcaggcttcctcctcctgtctgaactctggcccagagaggagcttccttcagctggccgcacccacttccccgacaacattccagaacattccatgataggccaggagactccaggaagaggtcactgagtagctcttagcatctcctcccagcccagccaggagaagatgctccccccttctaggactccatgtacaacttctgaactgtacccctgcccatcacccacggcctccccacagagggccaaggctcagcttgtccacctccgacctacctctctccaacgtctctaggctgccccccaagccagtaagagatgtcctgggtggctgggttgcttgtccttggctatggccctagtttggcttcttaaaccctctttacctgggcccttaactggtcatctgcctccagtcctggtatccactacacataaacgagactcttcaaggactgtcaagaaacactcccctcctcaagcaccctcaatagctcccactgcctcctgaaaagttcagaggccacaccctgagactgacggtcctccacaatatagtcccacacctaccctctgttccctacaggactcacctgctgcaaccaaaatagattacaccaagaatcgtacccacatgtctggacctgtaagtacagacccacctcccatctccacctagctgagtctcactcctcctgcaccccgcctgtctcttccatgagcctctctttttcttgtctctgaattcctccagcatgcaatttccaaagcacaggcctccacacgccaccagccatccccacgtggctcccgtacgattctttacttaatatttccctttaaatcaacccactcttttacttgaacaaatttattttcaaaggaaactgtatatctccaccataaatagaaaaaccatgccatatgccacaaatagaaggcagatgaaaaaaaacaagttatgctctaatacacatgaaaataaatcatcaggaaaacatttttaaatgcttgtccatgtgcctgacgaggtaaacctatatacaggttgtaaatggaacagcacctcgagggacaagggtcccgaaacgggcccctgcatgtgcgtacaggccgtgcttacatcctgacaacttcaactgctcctgaccaagtcaactggccacgcggccttccaaaatcttcaaaaatcccctcctgctctaagacgcgtggccttggcactttatgttctgctttctttgtggcccctgggtttttcggccccatctcacagttatctggggacttgtcaccaaatgtgagtatcccagggtagggagcacagagcctgctgcagcccctgagccagtcttgcacgcagcataacacgcaatacaaacagctctccaacagcacgctctggtctgctccgatgcgtggcccccattctctgcctgaccccaggcccatctgctgctagcgcacaacccctctgccccactcccccaaatccatctctgtccactggggtgtttcaaaggaccacacagaaagagcaacggaggcaccagcggggcatgaggctgttctccagccccggctgcctcttctttagaagcagcaggacctgcggcacgaggctgttctccagccccggctgcctcttctttagaagcagcaggacctggggcagcctggaaaagcaagtttccagtcaacgattaaccagacgctctcccagcaaagacacaaaccttttccccggaagttagcaaagttctgtgaaaacccctgcatgaactgggcccctgactccaggaaaacagaggcatcttccaatgtccttggagccatgagaccccgaaacacctaccgggaacagaggggcttcacccagacaggccccaccagggaggaggaggccgctctccctcccaccaccgttgtcgggggtgacccgaggtgttccagatgaggagctgaatcactgggacttaagtcaataagtggcagccaccaggcaggcccagctggagccaaaccaaggcctggattctcctcgtggatgtctggtaaggccccaccacgtaccccagtcacgtagtctctaaaactgaacagatttgggacgcttcctcttagagggcagccctctttgggactgttagtctggccacttttacacatttcaagcattttttgggttagaaagggcacattttctgtatccaaaacagcccttacaggcagcagtggtggtgcacggggcctgcgtcagcatctcatcgcttcctgaagccccgctgcctggagtggggccccttttgggtgtggctcttcaggagcaaggcaaattgacgcacagagaacttgacagatgtgtaaatggaacagcttcccggaggtacctcgaggagggcaagggtaatgaaatgaatgaaatgaacccctgcacagcgagggagcacttacaccctgacaccctcctgcagggagaaggaagatgacaaggatctctctgttgaccttttcatagtgcaaacaagctactgatagaaaaaagaaaatgttttcatgcttaaaaaaaaaataaacaccatcagcaacctttccccatggggagcagcagcaggtgctaccacaagagagacagacagatggatataattgccaagaggctctcaaactgggttccaaggagccaggggtgtggagaccctcttcaggactgtacaggcgaagcagggggctgggaacaaggccggttattataacccaacaaactgggttccaaggagccaggggtgtggagcccctcttcaggaccgtgcaagcagaagcagggggctgggaacaagggggttattacagcccaacccagagcaactcagctttttcctcgtcatctgtcaggcttccaggtaagacttcatttgaagaaaaggtcctgcagtaaagatgttgagaagtgctgatatgcgctgctggttatatgaaagggtggaaggaggactggcacggtggctcactcctgtaaccccagctactccagaggccgaggcgggtggatcacctaaggtcaggagttcgagaccagcctggccaacatagtaaaaacccatctctactgaaaatacaaaaattagccaggtgtggtggcaaatgtctgtagccccagccattcaggaggctgaggtgggagggtggctggagtctaggagtttgaggctgctgtgagccatgatctagccaccgtactccagcctaggtgacagagtgagacctcgccttaaaatttaaaaaataaaataaaattcatgggtaggccaggcatagtggctcacgcctgtaaccctagcacttgggaaggctgaggcttggccagacatggtcgtgggcaactgtcgtcccaactactcgggaggctgaggcaggagaatcgcttgaacccggaaggcggagct

SEQ ID NO: 64082 - DNA, 1793 bp, Homo sapiens
cggggcgcgatctcccccggtgtcgggcggggcggggcggggacgggactgcagtcctggctctacccacgcgcccaccagggtctgcaggggcgtccccagggctccccctgccctcaggctgccgggagggtcaaaggtgcgcgctgcacagatgtagggtgacagtgaccattccccggaatctccgtggctctgatctccccggggacgggtctccacctgcagcaagacgcctccccgcaggacgacccccaaggtgttacggacccaggcgaccctggggtcgctctgccctctgagcagccgggcaggaggcacaagccccagcgcccccggcagaggcctccgtgcggcgcaggaaaggaaaggcggctccacggcgggcccagagccgtcgtcccgagcagtgaggcgcctgggacggatggaagcgcttccccgacgcctccgcccgactccgggaagcggctttgggagggctggaagccaaccccgcgggactcaggctggaagggatgggcggggcgagtggaggcgtcgtcggtctcggctgtgagaagggccccccaaatcctgcacgcacgaccccccttccgaccacccagccgcgggcgaaagcccaagtgtgcagggcccggggcccccacgggggcccccagtctcgtggggcgtcgggtccacgccgcaggcgaggccaggtgcagaggggcggcagcctggacccccgggcccctccccgcacgtgcgcgccggggcgggcgctgggaaacgccgcgctgtggactcgctccccggaactcacccggcgccgccctcccccaccccccgccgcgtccccgcccccccccacccgcaccccgagctgggggcaccacagggtccccgagggtccccgaggtcggggcggagcgcaggccgttcggagcggggggctccgggcccgggcgctgctcgggggagtcgggtgcagcccaggctccggccgccggcgggaggaaacccagctccaggccctgcccgcgccccgccggccccggaaccgcccccgcccggggcgccaagagctcccaggtccccgccgcctccctgtgcgccccgccggccccgccgctgagccgcgcgcaccccccgccctcggactgggccccggacccggggcggccccgcttcccccccggactcacccggggttcggccccgcagcccgcgcgctccctcgctgccctctggcggcaaaaccgtgaaaccggcgcccgccccgccccgccccgctgggacctgtggccgcagagcccgggccggagggcacctgctgggcggcctctggatggtgacctcgccgcggggcgggtccccacggtctcgctggacggcaggggcgcggctcactgcagcctccgcctcctgggctccagcgaccctttcaccccagcctccccggcagtcgggaccgcaggcaccgctcccacgcccggccaatttttgtatgttttgtagagacgaggtcccactgtgttacccaggctggtctcgaactccaagcctcagtttctttatgtgcaaaacagagacaacaatagtcctgttgtgatgactgaatgaggtcgtgaccccaggtctcgctcactgtaggcccctcagctggagagcattcttaatgttaatattccctcctcacctcctaaccctaaagcctcaagggtgcaggaattccgctggccttagcccaccccccagcccccaggagctgctcgcaccgccgcttgcacagacgggggtagaccactccg

SEQ ID NO: 64083 - DNA, 864 bp, Homo sapiens
agaaaaaatattcaaaatgagtattatatccatgtggcaacaaaatgaaggatcacaaaagaagatagagtgaaaacgaagtgtcttttcctctccttccaaagagacagtcattttacccatttcttatgtatccttttagcagtattccaggcacatacatatatgcatagatggcaccttttttacacacgtgtttatgtggtaagtattgattgaaagcctgctgtatgccagacactactttaggtgatgggggtacagccgggaacaaaacaaagtttccagctttcctgtttctaatagaaagagaaagtgctacacagataaacagatgtacatgtcaagctgcactcgtgctgtggaggggagtaagcacagcaaagggacacaggggaaaggtcaggaaaggcttctctgataaggtaacacgtgaacaaagcaaggacagccagggcaagagtgttccaggtgccggagaaacagcaaggaggtcctggggttggggtggagcacgggggcagcagatgttagcaaaccgcacacaccgcgcctcgctccctctccatgaacagtcttggcctttgttccacatcagcctaaaatgagctgcctcgttcttttttagaggcagccaagtagtccaccatatggaggtagtacaatttgcttaactagttgtagagtttttcttttcctttttttttttaaggtatgaagtgaaaatcaggaagcggttggagtgagttctcaaaggaggaagagggaagcacagacctgctcttcacagttgcaaagcctggggcaagagcaggcacagcggcccacgcaccttatgtctaaatattaaaagttatgacaaac

SEQ ID NO: 64084 - DNA, 2525 bp, Homo sapiens
atgggattaaaagggatctttatttttttaaatactacggttattttacctttaaaatagcatatttacatgtatcgtatttctttctgtgcacacccaaaatagttaaacagtgtttcttcatgaaagaactctggaacccctgccttggaggtccttacagatagtgccatcttacctggggagtggcctggggctaaacggactgctctgtggctccaaggccaaaccctggaaggtcatgaccttcgcaactcaacatgaccaggtccccaggcagagtgtgctgctgcctctgcctctggctggcttatgtgccactgaggggccttggtagacacacttcctatttgacctgctatattgctgccctggcacacaggagctccaagctgggctgtctgaactatcatttatgactgtcttcttgtggtctaggcatctgtaaattataaatacaaagtgggtagaagagcagaacctttccaaattactttctttctcttggcctcaggggaatcccagaccaagtgtgaaaaggacttctaattccatgtttaaggctgaatcaaaggttattctgggtcttccttctgctccatcagttgctgaactatggccatgtgggggcctccagcagaggcatcaccctttcctgtcccccagttcctaaacgtcagcatcccaaacaatggctatttgttgaggcagattgaaaatgccatgtaaatttcagaagacacataaaagcccaaaggattctgcttaacttagtaacacttctgagcatggaataactggctgtgactcatcatcaccaaaggctgggtcctagcacagacaagcttgttactgcttttctcatatgggttggagtgctactgacctacttttaacaggtcatgccctttgaggagcttacacaactccagggaggtgaccagtcatactttcttgcccagtcttcttttaacaaggcctttctgtaagacagctgcctgggcagccttatggctggacactgagctttcctctgtggcaggccaactggtctgacccaaggttgtctgtggccatgttaggacgtatattcttactcgccgagcgacgcagcccagagggttcaggaaaaggaggtggtgagtgggcagccaggatggctcacctgctgggtggtggccagacagtactctgccgtgctcaggatgttacagatgaggcagagctcctccagagtgaacttggctacttctgagccctccttttccttgaggaggctgctgatagtcagtcctccactgctggttgtggttctgaagaaaaggaacaggaacaagtcagcatggaatttctaatttgcttcctgaactggaaactacattattttaagatacagaaaagggggaagtaaaggctggacatggcccaaatcaattcacatacaatgagtccttttcctactgaccttaccttgacaccgtcagaaataggaagagatgattcctattttagttaatctgaatcatcagcaggccattagtcacattaactaggatggtctaatatccaaagggaaggctgctgagctgtcctctctttagcttggaatctcctgatgtgcagaactcatttaggaccgtgtggagcacgaaagatggttacctaccctgtttctttcagttaagaaaagtctgcactgggactcatgtgtgctggtggaggaggacataagcgcatgttaagagaagtctgcactggaactcatgtgtgtttgtggaggaggacataagtgaatgttaagaaaagtctgcactgggactcgtgtgtgctggtggaggaggatataagcgaatgttaagagaagtctgcaaggggactcatgtgtgcttgtggaggaggacataagcgaatgttaagacatgcttcctgcccaaggccctaagtgtctcaagaggccaacacccatcacacatcctcctgtgactacaggttttggggcagccccagctactgagtgagttctatggtagtaaccactacccactcatatctggatgctttggaatcctctgttggctcctttcaccttgcccccacttctgtgaacagtctctctactgacataatcccagctgagtatgccatttttttctgctgagatgctgactaatacacgtgggaaaatgctcccacgatgaagttaaacggtagctgcagggaataaagctataagcagtatagccccaattccgtgacacaaacaaacaaaagcacacagatcacacacattaggtatctatcaagaacggaaaaatatatacaaaaagttacgttctctttgggtagtgggattatacataatttatttatttatttatttattttttagggcggagtctccctgcaatgcccaggctggagtgcaatggcacaatctcggctcagcgcaacctccgcctcccgggttcaagtgattctcctgcctcagcctcccgagcagccgggactacaggcatgcaccacca

SEQ ID NO: 64085 - DNA, 1315 bp, Homo sapiens
tacttgttatctctacgcattgtcagtcttactcctgctccttcacactcattctttctgctgtggctggatctgtcagttacctgctgctcctcgaggatggaatccttacactcgttttacagcaagcgacagaaaaactaccctgtgaatctgcaatgagatattttgggaaatgggcagtaatgatcacgggaaatttgactttctgcaaaccaaaactgaaagagatctaaaagtcagaatgccactggtctctgatgtcgcaagatgctgctgaagaggcctaagagtgggaatgccaccagcctctctcctaagagttggaatgccaccagcctcactccacatgtgccactcttccctgactccaacctctgggattcctgttcttaaagtgctatgtttttgccaaatagtgtggtctcccttaacacataaaaccaggttccaagccacgacatgtgtttcacaatagtgaactacctagaaaggcagccaaagagaaaatgctgtgatactggcctcctgacctgagcgaacactggaaagataccaggcgctgtactgacgcatcacgacgggaaggtctttgttaccaaaagcaattcaatgaccaaagttttgctgagactttctttacagtacgtcactgagtgaacatgactggctaagtggactacagtaaaaagaacacttggaatctactcctggcttggctaaaaagccatgcatgtagctttggagcacttgctcacctcatatgaaaaataatagactttaggtgataagtaaggttcttctaaatctttattttttgtcaactctttccaattccacccatctcaactgaagttccacgcttctaaagtgttatataagctgcctgagacctgagtttttaaaatgttgacttactccatgctgagtggtttttatgtcatctgctgaacaccctaacttctcaattctcacttcaggatgaaagtgacctgatagagaagtcatagatgccaaaacctatgggttcacgggttcagattttttcatttacaaagagtttactaggttgtgccttggaaaaatttttaaaaatcttaattcccacttgtgaaatggaaatagtaacacaaggcctttaagaaaagcccatagtctttaaaaagaaaactaggctgggagcggtggctcacgcctgtaatcccagcactttgggaggccaaggcaggcagatcatgaggtcaggagatcgagatccatcatggctaacatggtgaaaccccatctctactaaaaaaaaatacaaaaaaattag

SEQ ID NO: 64086 - DNA, 2112 bp, Homo sapiens
atcgtgccgttgcactccagcccgggcgacagagcgagaatccgtctcaaaaaaaaaaaaaaaaaaaagttcctgaagggaaaagaggccccttgggagtattctccaacctcacccaaactattcaacggtaggaattctcaaccttttaagaatggtaacgatgtcatttttcaacactttctctcttctctgccgtccgcttcagaaattaaagtcattcccttcccccagttccaagccactcacgaggtgccagcttgcaaaaccggggcgttggcacgagtctggtaaatgcatgaagcccccacagtccccagaatctgaggatggcacccaaggcctgcattctcctagcgtcgtcctctctaagcgcacaattcctttccccaaaaccaccagaacccccagccctcgccaaagacaatcaaagcctagaaagggttctctttcctttccttctgattcagaaaccgcttctcacccgcaccacctccccacctccactttcccttctgccgcgagcccccggccctccgtccacccgccgcggcctccccagcgcccggagctgccgtctcccctcccgcactcccgtttcccctcctgaggggcggaacgcttacctgctcgatggccagctgcacctcgggcgtgagctgcagcacggcttccagctcctccacgaactccagttcctcctcctccatcattccgccacccggccccctgccgacccccgccgcgagcccaactcaggcctccagccgccacccaggccccagcacagcaactccctcgcggcagcgacctggtgagcccggctccgtcagccgctctgtcagccgctccggcacttccggcaggccagggcacttccgggaccggggaactgtgggatcacggcggactgagactggcggcgttcctgtcacgtcaggtgtctcccgggcaacgcagtatcccggcggccccgcgtggcctcagcgcgtccttaggatgggcggggcctcttccctccccaaggcgcgccccgcactgaggaccccgaggttggggtagggtctggcctccagcaggacgcccggatgaaagtcagccctgcggcgtcgccaaccgcagcccacagcctccgcgggcagcgcagcggcgacctctcagctcccggggccccctcggtcagtggcagcgggtgtccccggccacgggggcgacgtgatcccagctggcgagtggcgatgtcgccaaggacattcgtaggacgggacagtgcccactcgatagaaattccccgtgcgccgggctctgcgcagaagcttttcgaggtgactgcagcctccttatggggagaaacgtcttttttttttttttttttttttttgagacggagtcttacttgttgcccaggctggagtgcaacggcgcgatctcggctcactgcaaccccgcctgctgggttcaagcgattctcctgtctcagcctcccgagtagctgggattacaggcgcccgccaccacgcccagctaatttttgtatttttagtggagacgaggtttcaccatgttggccaggctggtctcgaactcttgacctcgtgatccgcccgcctcggcctcccaaagtgctgggatgacaggcgtgagctactgcgcccggccagaaacgtttttttaaagccagatgacgcagcgccctggagctggggagacgtttactgaggttgaatatccgggatctaagtcctgaatagtccaccattgataagttgtgtgacttggaacaaattactaccccgcgtcgatgtggagaggattaaacattaacagcgcgatgtaaattcaagctggtaatacaggaaatagtgaggtgcccagcccttacccccacaaaggaacaaataagccagatcaccgatcaccctgtgaaaccacctttcctgcagacactgaaaagaaggagggaattgcagcccaaggaggacccgctccaccaggtgaaccgggaaactccaggagggaaacgcgttggccccactgaacttttttttgttgttgttatcagagttgctcaaagtaaaaaataggagcagtatgattttttcttttattttt

SEQ ID NO: 64087 - DNA, 1299 bp, Homo sapiens
cacatcctgaggcctcccaccgagaagcaccagggcttggtggacggggcccgcgaacccagggccacacgccgcctccctccttccttccccgcgggcctcgccccaccccggagggggttcctacctggcttcctcggccccgcgcccaccccgccccttcgcccggggccggcgagaagagcaggtcggggaggggcgcgtccgctgacggaacagaagccgggagccgcggcccttcccgcctccgcctgggccccgcggccgctcgggagggagcggcggactcggaacgcgcgcgcgccgcggccccggccacagccgccgcctcggtccccgcctccgcccccgcccacccgcccgccggggacgccggggaaccctccgggcccagggaccgcgagagaccccgccccgccctatcgcagccgccgggcctggtcacgcgcagagccgcgccgcgggatcggggccagcgccgggcggaggcgggacggggacgggggcggagggttgaaatcgcgcggccgggccggggcgcgccgagccgaacccagccacgcggcgccagcgaggcggccggacccgcagccccgatgctgctgacgctggccgggggcgcgctcttcttcccggggctcttcgcgctctgcacctgggcgctgcgccgctcccagcccggatggagccgcaccgactgcgtgatgatcagcaccaggtaccggcgccgccgagacgccccccgaggcccggggcgctgcccaccgcaccccacccggccgcggggcccagggcggaaaaggggggcggcaggaagcccgggggctgctccctccgcgtcccggcggcccgagtttccgaagcccctccgcgtcctcccctggcgggagcggggccggggcgggcgggaatggccgatgagcctccggagcccgctccccacatctgcctgcggctggggagagtcaggccgaagggccgggccgggctccctgcggtcctcggaccggactgagcgcgcgcgctgttctctccgcccgcgctaggctggtttcctcggtgcacgccgtgctggccaccggctcggggatcgtcatcattcgctcctgcgacgacgtgatcaccggcaggtaagagcccgggccggggccttgttgcaaatgtcacatttcagtagctcgcaggctctggctctcgcagcacacgcgctcagaaagctgactaatgggaaaagctggcaccacaatgggctccttcttcctctccggagtcttcgggcacccccagcttaggagaaag

SEQ ID NO: 64088 - DNA, 1714 bp, Homo sapiens
gaccatttccccccagcctactactgctgacacatctcggggtgcctcacccccagctctcccagaacagcctcctggtcttagcagcgtgtgccaagatttagcagggagcatctagttcctatgggctccctcccagaccttgcctgtaagattctgaatccggacgcacgcaggttcacaaagtgatacctcaggagcgcagccgcccccaccgcgggtgtgacccgcgcaaccccacaagggacactgtacctcggcgatctcaatgcaaagtcgcccaaaactcagtggggagacacacttccattctccccgctctgtcgatgaggaaacgtcatgagcgtaagacacttggagcgttaagacacttgctcaagaacgcagctgccgttcaggaaatgaggccgtcggggcgcccaggggtgctcggagggagcccgtttcccaaagcacgtgcgcgagccccgggcgcttccaagggctctaacttcacgtctgctccgtgttttcaagcgcagggggccggaggcggcaagacgcggcccaacgcgcggcgggacccggaccaccccccgccaaggccaccccgggacccctagacccgccccgacgcgggggacgtttcggtccgggcccgcgcgagcgtgcgcgacaggaggagacgcgacggggcagcaccgctctggtggcgcattgctggacgcagcccggggccggggagccgcggcacccacctaggtccatggcggcgacgccggcggctgcgcggggctaacgccccctcccctccgagaactcgaacgcggcgcgggacgcacggcacgatgggagacgcaggagccacggcggccgcgcttaggcctgctcacaacctccgcccggccccgcccacagcctccgccgcgcacgcgcagtcctcacgaacgagcgcgccaagcgcacagcgccgccttccggcagagccctcccaccagccctcaggtacccggacgtcgctcactagacccctccgcaccgtcccctgcccggcccctcttccggggtcccagcgggtcgggctcatgattccccggccccgcattcaccctcacccggtaaccccgggcgtgccccgcacacagttcacccccaccgagcgcctcccccgggacgcccaccacccagcgcggccgcaccacgcgaggcttccactcccacccgcccagctcgcgccacatacagtccctcaacgcgctcctgccgcgccgccccctccagacagcagcgttccggatcctagacgctttttgacggctggtcctccccagaaaatgcgccgtgtgagcccaaacatggtggggtttacgctggaccccgagcttgcaatctgtgcttgacaaaacacaaacatcgcgtgcctgtctcctccccctgagatcgagtagtaacagccactccaactctccacctccagcttctagcaccagggaccgcctccaccaccccatgtgccaagtggagttcgagctgcgcggccctcaagcagctgaagggtcccgtgagcgatcaggagaagctgctggtctacggcttgtacaaacaggccacccagggcgactgcgacatccccggccctccggcctcagacgtgagagccagggccaagtgggaggcttggagcgcgaaaaaaggggcgtccaagatggacgccatgaggggctacgcggccaaa

SEQ ID NO: 64089 - DNA, 2144 bp, Homo sapiens
cgtgtttaatctttgcaacaaccttttgatcgacgaggaaatactaacaagggacagctctgtggtttctgctatcgaaagtttggtggtttttcactatcaaattctgacttccattaccatcatctacgtacaaatccagttccaactcccaccccaacccaggccatgagctctaatggaggatatatatcagggtcatttgcacctttgttgccaaaactcaacgtagtaccctgaaaatagcagatattttaaaaatgacctgacgaattcagatccccgtctattgcaccgtctatacactaaaccgcgctcttgcacctttcaagtcttccttagtggtgtgttccctacctccctggcttatcaaaggaggtccccaaaacccagttccccaaccaactgaatcctgcaaataacagctcctcaggacccgagacagaccgcttctgggtgctgttgaaaagcagatgggttgagagttggagcatatattcagagactgagtatccgaaacggactattcagaccagccttgctagaagcagaactctgaatacgctgattttatctacatcaaaggctccaaaccggaaaacacaaatattaactagaaagcattatataacattttatttaccgtcttttccggtagacggtaagctccacaagggcggggctcaataaacgtttacgagtggcttaaatgaaaggacgtgcgtgggcacaccgcggggactaatcgtgttaggcccttctccaaggcctatgatccccaacggcaactcgccacgctcctgaagctgaacaccgcgcagggcctaaggtcggacaccctccggcttaggttcacgacacacccattttcccctccctccgccagggccggctcgggcgccggttccagcctcgcgcgccagcccctgtcggccccggcctgcaccttcatccccaggacgtcccgatagaaacgcgccgtctggaagcggtttcccactttgaatacgaagtgcagagctctgcgagcagccatgattcccgccgcacgcagccgtcacgcgcaccgtacagcccagtccacgaagggcgccacgggccgtgacgtcactagccgccgacggcgcgctttcgtgacgcagcccgggtctcagggaacatggcggcgctggtgagacccgcgaggtttgtcgtgcgaccgttgctgcaggtggtccaggcttgggaccttgacgcgaggcgctgggtccgggcgctgcggcggagcccagtgaaagtggtgtttccttccggagaggtggtggaacagaagcgcgctcctgggaagcagccccgcaaggcaccatctgaggccagtgcccaggagcaacgagagaaacaaccgctcgaggagtccgcatcccgcgctcccagcacctgggaagagtctgggcttcgctacgataaagcttatcccggggacaggaggctgaggtgatgtggttcttgagcctgtcgaatgttctcgtttcccttcccgtcgcacagcggaaccttaacctccttccgatggaggacttcttccagtacagcccgctggtttttgtattatgcacagagggccgaataagcgtctttggaattagcttctgtttctccttagctctttgttgttgtttttgtttcaccatgttagccaggctgatctggaactcctgacctcaggtgatccgcccgcctcggcctcccaatgtgctgggattacaggcgtgagccaccgcgcccggccctctccgtagctctttatttctgttacaactaagcgtgtctcagtaacaaggatgttgatagttacctgttttttttttttatttccatctacagcagtgtaatgacaatagtaaagtccaggccatttcgggaaaaacaagggaagatcctgctggaaggtcgcaggctcatttcagacgctctcaaggctggagctgtgccaaaaatgttcttctttagccgtctagaatacctaaaggagttgccagtcgataagctgaaaggtgtcagcctcattaaggtgaaatttgaggatatcaaggattggtccgacctcgtaacgccacaaggaataatgggttagtgattacccagtgtatctttttttttttttg

SEQ ID NO: 64090 - DNA, 2020 bp, Homo sapiens
tttattttttatttttttaatttttagtagagatggggtttcaccatgtttgtcagactggtctcgaactcctgacctcgtgatccaccggcctcggcctcccacagtgctggatgacaggcgtgagcccccgcgcccggtccgtgcatttacagcacaagttcacgcttatctacaaagcatccacctctcaccgcaccttccgggaccacgggatttaacgcctcaccgcccgatgacagcacgaggtggaaagggcagcgacaatgctcgcgcgtcccctcccggcgatccggagcacggcagccccggagcgcgcggccactcctcgctcccctcaggagctcgtaagagccccgcgcggggccgaggcgcgagagcacgcgcaacgcttcctgggaaatgtagttgggtgtcggattagaactacaaatcccggtactcaccgcgctgcagccccgaccgtgagggcgctttctggtgaatctgaatctcgtttgtctgtgacatggggaaagctgtccaagcccaattccattttcacaagaggctttctttttggaaacatgatagcggtctcgctggtgtgcgcaccaggagcgttgcggccgcggcttcctcctgcggcgaatctgccgttgcatcacagtggctagtctcagggcccgcaacgtgacgcttgtcgaatctgctgcggggagaaggacgcgagggttgcttgggcagcgactgtcatggcggcggccgcccccaatgccggaggctcggcccctgagacagcgggttccgccgaagctccgctgcagtacagcctgctcctgcagtacctggtgggtgacaagcgtcagccccggctcctggagcctgggagcctgggcgggatcccaagtccagccaagagtgaggagcagaagatgatcgagaaggcgatggaaagctgcgctttcaaggctgcgctggcctgcgtgggaggtgaggccgggcgatgggacccttgggaggctgagggcctggacggcagtggggatctctgccgagaagaccacgcgcctgggaggcgagggactgcgggccttgaccttgaccacaccctcgcctcgttcgtgaatcgggcgtcacctctcctgccccctcaggccggctttcctgatgaaaattgggttagagaatcggtgctgtggttggggcctgaaagttattacatgacatcctggctaacacggtgaaaccccgtctctactaaaaatacaaaaaattagctggacgtggtggtgggcgcctgtagtcccagctattcgggaggttgaggcaggagaatcgcttgaacccaggaggcggagcttgcagtgagccgagatgtgccactgctctccagcctgggcgacagagcgagactccgtctcaaaaacaacaacaaaaagttattacgtgggtgacttcattcatccgttcattcccttaaattcattctcttaaataattctttcaacaaattgttcctaagcaatatcacgtgccaggtgaaagagacaagagcctggtcttcatggggcctgtattatactatgtggagaagaatgttgagcaggaacactgcagaggaaggatgcagacatatggaaatgcacatgcagacgactctagggcagcagttgtttgaggtttgaaaaactgaaagaccattgtgactagacagccccgagcaaggagagacgaagtctgcacttgtccttctgtttttcccttaagttgaaggggaggtgcccatgattttattaaactcatattgaccatgaggtcatgagagggcatccatctggacatgtccagccggctcaggaaggacagatgtggcagcagtgtgggatttgccattaggtagctgtgtggccttgggagaagttgcttaacctctctgagcctcagtttatagaaaggagaggctaatagcatctgtctcactggattattgtgaagaatgaatgaggctgtggcatactggcatgtgctcagtaaagca

SEQ ID NO: 64091 - DNA, 783 bp, Homo sapiens
ccaaggccagaggcattcaggtctcagctgcagaagggcaggactttaaaagggggcagggccggacttttaaaagagggcggggcctgagttttaaagggggtggggcctgaccttaaaagggggcggggccggacgggagggagtttatttccttttccagggagtactgaggcccggcccatcaatgcccacgctacacgaggcatactagacagtcgctgcctaagccaaagtcagatcaccgatattcttccaggaaaaggctcctcttgccccctttcccacaagaaggagaaagcctggaggcccgggttggcacaccaccctcccaggagccaggggcaggagccagccgtgcggaggcctgcgtccagggtcacggtaatctcagggactgccgctgccacagtcaccccaggcggtagggcccgaggcctggcttggcaggttcattaactgggaagtgcaggttgcctggaaacagcagcctggcactggagtgatctcataaaacaaacagcagagacgctaattcccttctctcagtaacgaataatcaaatacccagagtcttcggctgaaaataaaccacctccggatgccagacctgacccggctccccccgggccctcccaaatctgcagccccaggggcctcaggcatcggttcacgatgctggggagggaaagtggtgggtagcagattcacggccaggcctgtggagccaagaccagaaccggggacagccaggtccaagtgacaaagataaactgtgacagc

SEQ ID NO: 64092 - DNA, 895 bp, Homo sapiens
agccatttctcccgcgcaccttcggcagcgccggcccggccccccccagcgcccagggcgtgtcacgctcccaccttcacagccaccaggaagggggaccctgagccggggctggtcggggttcccagctcgcactcctccaggagaaacacatcttcgtcctccagaaccttgtccagcaagcctatcgcctcctcttcctcctccatggcagccggagcccgcggagggcagacaggaagcggggtccacgcagcggcggcgggaggagggaggagggaggaggcgggcgggagggggggcaggtctacacccgcgcgcccggcctggggctcccgacccgggactgcatcccggacctagtccagcccgctccgccgccgccgccgccgcctcgcgcgtcctcgcccggcgaaagggggagcaaggcccgggcagcccctgacgccgtgcccggcccgtggcggaggcgaacccgccgcacagcagcccagcgccctcctccgtgtcccgcccggccccgcagggcccgcccttcccgggctccggggctcgggctcgcgctcgctccgaacacacaggaaacgcgcgtcgcgaggtggagccgcccgtcctctggggttgcggggccgcggctggcggaggcttctgcggcggaggaggagcgaggaggccgcggccgggccggggtggggtggagcggggaggccgcttcccagacgcatcttcattccccgcgcgcggccgagccaggagcccggcgagcaggggcgacccccagagccaccccggagtccccatgcgccggagcccccttccggaggggaggccccggcccgcccagaagccacagccgcgtcccgccgccgctggaggagtcaggctttgcaacaga

SEQ ID NO: 64093 - DNA, 1009 bp, Homo sapiens
tggctcagcctcccaagtggctgggattacaggcgcccgccaccacgcccggctaatttttgtattttggtagcgacgggatttcgccatgttggccaggctggtctcgaactcctgacctcaagagatccgcccgcccaggcctcccaaagtgctgggattacaggtgtgagccaccgcgcccggcctggagttccactttctgaccagaagagggcgccggggttccacttttgttcttcacgccccacgtttctctttccaaagttgctaaggtttggagtctaggaataaaaagttcccttctgagtccgccacaatgatggcgggaggcggtgggagggtgggcgatggttttgttcctttgctcgttcaccccggtggggagccggggagccagggagcagagtgtgggaactgggtggagatgtctgcggaacggtcacccggacacgggaacacggctctgaacgtcgggagagaagctgcagctgaaaggagacatttgacctttaagggattgtcggaagaagaggagccgatcaaaagggacagaaaaggagtgagtggggagagatgccaaagagaggagcccagttcccgccgggcacgcggttcagcctgtagtcccggcgctttgccaagcgaggcgggcggagttcgagacctgcctggcccacaaaatgagacccaccccacccccatctctacaaaaataaaatacaaaaataaattagcccggcgtggtgacgggcgcctgcagtcccagctgctcgggggaggctgaggcaggagaacggcgtgaacccgggaggcggcgcttgcagtgagccgagatcgcgccgctgcactccagcctggagaccgagcgagactccgcctcaaaaaaaaaaaattaaataaataaagtaattgagaacggaagctttgcagtcaggggaaacttactgagactcagttttctcatctgaaaacggggcgacggataacaaggaccgtgaagaatccc

SEQ ID NO: 64094 - DNA, 1283 bp, Homo sapiens
ctttcctgtatttttcgcatcatcctgtgaccgcttacacttccagggcctggcacctgctgttccctctacctcctgtctgcttggcaaactgctattcatcctttgaaatccagttcagggccgggagcggtggctcacgtctgtaatcccagcactttgggtggccgaggcgggcggatcacttaaggccgggagttcgagaccatcctggccaacatggtgaaaccccgtctctggtaaaaatacaaaaaatagctgggcacgatggtgggtgcctgtaatcccacgtactcgggaggctgaggcaggagaatcgcttgaacccgagaggtggagcttgcagtgagccaagattgcgacactgcggtccagcctgggcgacagagcgagactcggtctcaaaaaaaaaaaagtttttgttgaatgagcgcatgaaggggcagaggctgcaattgcgcccctacgtcttccacaccgggcgtgtgggttgaaacgccagggtctcgcctgggagagaaggaggctcagggcttcccgggacccgctctccggagggggtggggtcgaggcccccgtgagcggctcccggactttctctcccgggcgggcgttccgtcctccctcggggagcggcgccggaacttccggaggaagagccggaacttttgaagcccaggccccgcccggcgctaataggcacctacgcggccgccggcggaaccgccagaccctaaatcacggcgccccgcccgcccccgcccgcccccgcccgggccgagaactcgcgctcccgggcacgggcaggtgccgcggaaatgccgggcccgccgctcgctttgaagtcggccgcgccccgcagcgcccgggagtcccgggttccaggagggggcgcctctcccgggtcctcggggttcttcgcgtggggccgtttcctgacgtgcgcggggaagggcgggagcggccgggaaacgccaccgggaaacgcgcgctgcgtgggcattttctttgcttttactgaccttttttttttttctggtttattttttgttgtttttgagacggagtctcgctctgtccgccaggctggagcgcagtggcgggatctcggctcactgcaacctccgcctccctggttcaagcgattctctgcctcagcctcccgagtagctgggactacaggctccccgccaccacgtccagctaattgttgtattttagtagagacggggtttcaccgtgttggccaggctggtcttgaactcctgacctcaagtgatccg

SEQ ID NO: 64095 - DNA, 505 bp, Homo sapiens
ttatttgggaataatctggacgacctttactttggatatgcaaatttacagatgtaagattaaggattttgagaatatttctttgtgcatatcttacataaggactaagcccagaagactacacttgctaagaataactcaaaaaggtaggttatcatctaatatgatcctagcacagcagtaacaaaaacaattatctgacctttcacattagataagaatgtttcacaacaaatagtaccgacaagtattacactttacagtttacaaaagcccaaaatttcataaccaccctgcaaattagtaggcaagagagacatcactaatccccatttgaaagataaggaacccagtgattcctgtgcattctgtgatggcagatttaccacatctgccaaatgatgaaatactgtcataactcttacagtaatgcatctccttcaaactttagatatgaatgaagagttaaacacatttcatattgctttagctcgataaaatcctg

SEQ ID NO: 64096 - DNA, 2101 bp, Homo sapiens
aagggccctaacattttgaaatataggtattttaattaggaaaaaaatctaagaatcaaagatacttgattccaaccatgtctcaccccaccctaccacgcaaaagcattaaaaccacaggacccacagacatgacctttcgtttaatactacagtatcgcacaattataaatgtgtgggtatttcaaaaggtggtccaaaaggtggactgggagagaggattaagaataaacttcctgacaatgactggacagacacaatggacattcgatgaagttctgaaaaaggactggagaacccattaggggcaaaagaacaacgaacaaagaggacctactaatatttctacataaacccatttatttaaaacggaaaaaaagaaagcaacaggatcttcaaccttcataactcaaaaaacccagcctcagccgagcgcctggaataggttaagatcccccacgaagtacagaccagcattccgagcctgcagagtcaaccaaaatacagttactgaacactattggaaataactttatttcaacaggtcttcccatttgtcatcacggtgcgcacaaactgtaaagtcatcgtttttacaaacggggggacggaggctcgggctctacaaaggctcgaactctcagagtcgtggcctcctggttctatccatcagaacccacgggtgatggagccagagaaaggttacaggaacttcgagatctcctgttttaagtctgaggaaagggagggagtgaggattttctgggcctccccagaagacgacgaggaggaaaagccccgaaacccctcactacgaggtgccggcctacgggaaagaaacccgatcgcagcatgggagcctgccaccgcccgaagacgaactgcagtgattcccactcacccctctccccccaccatcatccacgactgtcccccacctcaggcctgaggaagcccatcgctctcaaaggtcctcctttgtgagactccacggccgccgccccacacggggcctccggggaaaagccaccgcccccacccgccatatttccctgaaaggcgcccgcgctacagctcccggtcttcgctctctcccatgtggcgggtgctgcttcccccgtcaccccacccaattgttctccacatcccaaggccgtcccagaagctcccatgagggtggctcgttcggagacagcacccgccatctcctccccctcccccgccccgggactcgccctccccccagccgccattttacaaccaactcctccaccccgtcgccccggcctcccggcccgcgagttgtttgcagttaaggacggcgaaggggtcacattccagggcatagagcctcccatcgccccgggagctcccaggccatttcctgcttcccgaacccaagcccccgggccaggctcgcagacgatgccgccattttgtctcctgttcccggcctctgtgggcggcggcagagggtccgagaattccagccccccgttgcccccccaactcaccgtcgtatcgctcagcctgctcggccagcttcgcctggtacaccagatcctctcgatcatccatagcggcagcggctccggcagggtctgcgcgacggatggaagcggatagtgtctccgactctctcagcctctcgctccgcgtccgggcagcaaaaatggcggcgcctcaatccgggacttccgcctgcgcacgcggacaactgctcagctctatggcaaccgctccctggcaactggcgcggggggcgggtcctggaactcggcgcccgaagcggctggaacgagcgcacgagacgcctctcctctgtcggctcagcgggcgccggagcccagaggcgggaactgcgactgccgaaagggagcggcccccggggaacgagaagggctgaggcggggccggccgggactgctcctgaaaaaagccagcgagagacctgggtcagaccggggcccgaggcccgacctgcggaaaagaacgacggaggctgtaacggtttctgtcatggcaggtcttctttcccgaaatctgaggctgtcactaccgcgccctggttttcttttcttttttcttttttcttttttct

SEQ ID NO: 64097 - DNA, 1099 bp, Homo sapiens
cctgggtgacaaaatgagaccctgtctcaaacacacaaaactaaacaaaagtgatgatcctgcaagcagacaaagcctgctggagtttcggctggccttgtgccttgctttcatcaatagaatgcaggggagttcggcggctgcaccttctgggaagcaaggagcacctctgctcggcagctgtgcaactctccaggtgtgacgtggcagccttgtgtgtgacctttctgccctccccaagtttgcattttcttttttttttaatctttgagacagagtctcgctctttcacccaggctggagtgcagtggcgcaatcttggctcagtgcaacctctgcctcccggattcaagccattcttctgaactcagcctcccgagtagctgggattaaggcgcctgccaccacacccagctgctagattttttatatttttagtagagacggggtttcaccgtgttagccaggatggtctcgatctcctgacctcgtgatccacttgcctcggtctcccaaagtgctgggattacaggcgtgaggcactgcacccggccccaagtttgcattttcaacagtaaagtttacttttaaattaaaagatttaaattggggaaaataacaaaaagaatgtaggggactgacattgtgtcaattccacggctacaccttaagagaccttggtctcttggaaccctgccaatagccacggactcagtccaggcagccctgctggaggatgggagaccacaggaagtagagataaactgtgtcagctgagggccatccaagatcaaccagcccctgccaatcagcatctgacctcatccatgagtgaaactggccaagacttggagaactgcccagctgagcccaaccccagctgctgacctgtgtaattataagatggctaagtgattgttattttaagccactaaggattggcatggtttactttgcagcaaagctaactgatagagtaactttgtttgttttgagacagagtcttgctgtgatgctcaggctggagtgaaatggtgtgatctcgacttactgcaacctccgcttcctgggttcaagtgattctcctgcctcagcctct

SEQ ID NO: 64098 - DNA, 3570 bp, Homo sapiens
tattctacaagggcaagtctacaaaggacggctcaagagcttcctgattcatatgagactagtctgaacccattctcagctggccaagaagaaactgcttcgacttggcaacagcgtgaaggcacgaggactcctgatgctgttacacaggtacacatacaatgagaaccccagaattactttgtacctcacaaatctccagtactaagggcatctatctattcccttaaaacagtcccaaatcaactccaacggcatcggtaagacagtcaatctcagggatccctccctggcaaggaaaacccagcgcaggtaatttatgttcttggcgtagagtctgttcccaatatccaggaagactcagcccgcagccccatcttactgagcaaggtgacgccctgaagtacacaccgacaatgtttaagtccaaggaaaatgaagttccagtcacttacagggaagggtctgtttccattgcctcacttctggtttattttgtggaataaaatgtctttcctccactaaacactttgaaaaccagaactctctaacggcggacagtcttctggacgcttagatctcttgcacatagccaggcatcgccttaaactgggttgggctggtcactgaaggctttctgctaccactatttcttctagcacttagttcaccaccttcgtcctccacgggggaagagaacggtacaaagattttggaaaaatgcccaagaaaggaaaaaattgaccggtttcctgagggtgtctccatccctcccggccagtatgtggtgacttcctaccaaaggccaccaggggagcacggccaaacccggctctccaacacggcaggaaacgtttccagcctaaaagccacttgtaggattatcggattcattctgggcgccgctgccaagtgatgcccccgcagtgccaacatctccctcagctctttgtccccacgttgccttgccctgccctacccttgcgcctggcccgggagccagccccaccctggggccgaagcagttccccttccccgcggctgccctccccaggcacaccccggggcctcggtccgcggctcctcctcccccacactcctgctccccgggtgagagcgagcccgagcagccggcgggcccctgccacggtcacccagccctctgcccacgacccccgagggtccgctctcgaggaccagccagccaggctgggagttccgcggccctcaccccgcccagggcccgccgtcccgtcagtccctcaccgggcggaggctgggcgggcgacggtggcaccggcgggcgcgggccgctgctgttgatgatgtagtgggagacgcgcgagttctctgagacgctgagcacatagtccccggggctggtgctcgagtcccgcaccaggaacaccccgtgccgctggccctgcagcagcgccaccgcctcctgccgactcaacctcccccagtaccagctactccgctcctccgagtcgaagttgcccgccatggctgcctccgcgcctaaacgctggggtgccgccgccgcgcgcgcccctccggcccccggcgcccgccgcccagcggaccggctccggtttcagcttcacagcagcgcccgaaatggcggcggcagccgcgggcctccccctccggaaatgacgcgctccctgcccgagggaggctgccgggaaggggcccgcggcccgccattgggagaagggcaaggcgccctcgcgcgcgcactgcgcatgcggattcatgggcggtgccgcccttcccgggcccgggctgcgggggatgggaggcggggtctagggcccgaggggcggggcctcgcagcctcccgcagagacgcgcgcctgcgctgcggacagagcggtgcttctcgtctgggccccggttcctggacgacctgggacttctaggcagcgactcccagacagaattggaggagaaaagatgcgtgtggccctggggcctgagttctcggccaggcttcctgcgatatcagtctgtttcttttttctttttctttttgagacggagtcttgttctgtcgcccacgctggagtgcaatggcgcgatctcggctcactgctcccgggttcaagcgattctcctgcgtcagcctcccgagtagctgagactacaggcgtgagccaccgcgcccggctgttttttgtatttttagtagagacgggggtttcaccatgtcggccaggatggtctcaatctcctgacctcaggtgatccgcccgcctcggcctcccaaagtgctgggattacaggcgagaaacatcgcgcccggccacgtcggtccgtttctgctcgttcctctagcttctccacagaccagctgacgttctcattttcattgattcacctaggacattgttgttgacactccacttgcactgcgggtgcaaaggttatcatggctgggccctgcactcctcgaactcacagaccagtgagaggaaccaggaaactggatgacaaaaggatgacaaatgctgacaaacgctatcatgggaaacggacatgaacacagagcagagcccccacagccagtctatggagtaatccaggagggcttcccagaggaggcagcatgtgttgactgctgaatgacaaatggggaaggacattctttcttttttttttttttttttttttgagatggagtctcgctctgtcgcccaggctggagtgcctgggcgtgatctcggctcactgcaagctccgcctcccgggttcacgccattctcctgcctcagcctcccgagttgctgggactgcaggcacccgccaccacgcccggctaactttttgtatttttagtagagatggggtttcaccgtgttagccaggctggtctcgatctcctgaccttgagatccgcccacctcggcctcccaaagtgctgggattacaggcgtgagccaccgcactcggcggggaaggacattcaaagcaaagggagcagagtgtaccaagccacgtgaagtacagagttctcttctcttttgaggctttggggtcacctgcccagataattctaaacactaaattgtagccaggggcatctcctactctcactgccctcatgattgcctctggactgtgttcctacgagtgtcgtgctcgctggtgctctttcgtctggctgcccctaatcgcactgcaaacaactcccactgagttttctaaaatacagatctggccgggcgccgtggctcatgcctgtaatcccaacactttgggaggctgtggctggcagatcacctgaggtcagaagttcgagaccgggctgaccaatatggtgaagcccggtctctactaaaaatacaaaaattagccaggtgtgttagcgggcgcctgtaatcccagctactcaggaggatgaggcaggagaatcgcttgaacccaggaggcggaggttgcagtgagccgaaatcatgccactgcactccagcctgggtgacagagggagatcctgtctcaaaaatatatatatatgtatacaaatctgaatgtgttgctaccttgtgtaaaacttttaacagtctt

SEQ ID NO: 64099 - DNA, 658 bp, Homo sapiens
ctcaacaaccttatttgacaagtatccccatcttacaaaagagaaaactgaagctcagagagtttaagtaatgtgtccagagagacatggtcgcagagtgaggagctagggttcaaatcctggaaggagagacagctatggtcactctgctctaccctcaattttctgagataggaattgggaggaagggttggcagaaatctacatttttaaaaaagcagtaagctgtggattatggtctaaggaataacacagtcctgctggactcaccttacacacccttgggcctgctctggggaagtggggggtgggggactgggaggcacaagggcacctttcctgctgcaggtgactcatcgtgaccctggcttagtgacagcctggcaccgtgagccagcagaagcagccgtcccagtgtgaattctggctggtctgtgagctctggaccttacccagagactgcctgttccaaagcagtccctctgagatccctccctagggcatacggaaattacaagaaaaataattttttttttttgagacggagtttcattcctgttgcccaggctgccgtgcaatggcacgatctcagctcaccgcaacctccatctcccgggttcaagtgattctcctgccccagcctcccgagtagctggaa

SEQ ID NO: 64100 - DNA, 648 bp, Homo sapiens
accctcccacctccccatccacccccacaccccctattcccccatccaccccacctccccatctacctcccccatcccccaccactcctccccatccatgaaaaggcaccttttgcttattgtccgcacgctgtacatgaagcacaaaaagactgtcgctcaggctgctgacagagattcctgaggggagagggcaaaggtcagaggtcgagggtcagagcagggccctccccctgcagccctggaccctggctgaccggtcaggttggcgtaatcaatcctctgcttgactttggcgtcctccacgatgacgacggcgttgggcgtgagcagcagctgccgggagcgaggcttgtagcccttgcggtcgtatttcacaacaggcaccgcatactggggacagaggccaggctgaaggggctggggagaggctcccaaggctccgcccctgccctgacctgccttcagctctcaggcagtagcaccgtgctgctggactcagggctgcaggcaggctcttacctgaatgggctcagagcccaaggcctgcagcactcgggggctgatctcatctgtacctgcaactcagatggcggggagggaagtcagtggaggcaatgggggaccaggatggtgacgaaaggtctg

SEQ ID NO: 64101 - DNA, 661 bp, Homo sapiens
agacttttcaacacagggttctgagcagtctctaccaatcaagggcagttggcccacgatatgaaccctactggccaccccagctgtactccagtgtccacttcctacacgaggcccagcagggcctggcatccaactgaggtcaccggtagaccggggtaaatacggtagactagggtaaatagagcagaccggggtaaatagagcagaccggggtaaacagagtagaccggggtaaatacggtaggcggggtaaatatggtaggcagggcaaaatacggtagaccggggtcaatactatagacggggtaaatacagtagattgcggtaaatagagtagactggggtaaatacggtaggtggggtaaatacagtagaccgagataaatacggtaggcggggtaaatacggtagactggggtaaatagagtagaccagggtaaatacggtagatcggggtaaatacggtagaacgcggtaaatacggtagaccggggtaaatgcccctccaggcggacaccctttgagcaatgcttgcgactccctgactccacttcctcatcctcacccagccccgctctccgtacctgctgcttccactcagggctgatactccggcagtatttccacaccatgttctttatgcacaactcccgcagaa

SEQ ID NO: 64102 - DNA, 2072 bp, Homo sapiens
tgttgagcttggaccaatcccctcctctctctggttccttcctcctaaaggaggaggagttgagttagaccaggtgacctcaggtccctcagctctgagccacgtgtgacaggtgctttggaggacaaatggctcagggtcaattctgcaggcagggtggggccgtctctcccacccagacccacccccacctccaccggtagagcgtcgagcaccaagcaagaggttactcccagactacaccagaggggttcccccagagggcctcccaccccagctgggctcagccacccactccagaacgcgggggaggccctccctcgcatggctggggccactccctttcctccagctgctgggctccccaggcacctcctccactgagagtcctgagaagcctcaggggatgggggctttaccatggaaagcccagctgcctctgggtcctactggagggtggagggtggtgcaggctgagcaagaccctcgccccacaaccagggctgagatggatccctcttcaaacagggtctcagggctccaaaaaatggacacccagagtatccagggtcagagaagaacaaggtggtggtgattgggggtggatcccaaaggggccgccggtgtcctctgaccacgaaaggcccagatttctggccgggggcctgcccctcccaggcttgtcctcaccgccccgctccaatcccgcgccgaagcggctgccaaatccggccgcggtccccgccccctcgccctcgggtcaggggtctccgcgttctcaggcgtccccggcggctcctcatccggccccgggtccgagcgtcccgcgccgccctccccgcctcggcctcctccccctgcaacttcccgggacgtttttccacccggaattcctgggccgcgcccgcttcctggcgaggccgaggcgacgccgcgaggtggggagggacgcccgggaccccccgccctgccccgccgcccccaggctcaccgacgcccggtagcgcatcctgcccggccggcctggcgcccgctccgctgcccgcgctccgggtcccgggctcggcggcggtggcggcggcgtcagcgagggagggcccgccccccgcaccgcccccacccgggcccctgaagcgcggggcttccccggcctcccccgcctcccgcgcggccgggctggggtcccctccaggtggggttggtggaggtgggggtgtcggggcggggggtccgcgggccgggggcgggggcgggctccgcctgagtcaggttttccaggagggacgccgttggcaccagggtggagcccggaacccgcgcggccgccgcgtctacaccgacccggaactcacttccgggcctgggactacactccgcggcgggcctgggcgctgggcgggcaccgaggcctgcgggtcccagaggaagcgggattttcctcccccaacccccgaactcgagtcccgggaaagttaaaaatagaaccaatgtccaaatacggccggcgcgcccggcgggcggagcgttctccgtgcgggacgccgtccacccacacgcgccggggcctggtccgagcctcgaacccaggaagatcttggttttcctcgtcagcacggagctcgcgccccagggacagggacggccaacgggtgccctggccgagcgcgcggagtacccggcccctctggagggctcagttccccctctgggaaattcgcgtcccccccgcccacggcatttggggcccacagcctctccccacccgggacaccccactcgcctctgggcccggacctcctccctccctcctttttttttctgttttttttttgagacggggtcttgcgctggctcccaggttggagttcagtggcgcgatctcggctcactgcaacctctgcctcccgggttctagcgattttcctgtctcagcctcccgagtagctgggattacaggcgtgcgccaccacactcggctaatttttgtatttttagtagagacggggttttaccatgttggccaagctggtctggaactcctgacctcaggtgatccacccgcctcggcctcc

SEQ ID NO: 64103 - DNA, 1368 bp, Homo sapiens
aggcacgagaatcgcttgaacccgggagacggaggttgcagtgagccgagattgtgccactgcactccagcctgggcgacagagcgaagctccgtctccaaacaaaacagaacaaggaaaatctagagggagcaaggaggcgacccagcctccagcccgcccaggggtggggaacgtcctagaagacggggtagagggtcaagagagcccctcccggaagctcagctctctccctgccccgcgaggcgtgggggactcgggccgggggcgtggcaggagccagcgggggcgcggccagaggacggggcggagcttcgcggccgcagtgtccgccccgcccctccacgtcacgcggttggaatgaggggaatccgcgcgcggaggggtcgggcccgcttcttccagttcccgggccgcgccgccgcattcccgggatgcccgctggcgcccccgcagccaccgcccggcggcggaaggagggggcgtctccgccgctcgcgggccccagggcggctccagcactggcaacccccggcctgcccctcctcactggacggaagcgcgagccccgggcggggagggaagcggggaacctgggtgggaaagacgccgcggctgaggctgcagcgccaggcgcctcctgcgttctccgcgctttcttgggttactcctttcagtgacgccagccaagccgtgaggtccgtatcatcactccaatgcagaagaacttgaggctgggcaggtgacttgtgcaaggtctcaggaggagtgggactggaacccgggcactggaacaccttactgcagggctgccctgagcctctttgtgcggttatcagggctaccagggctgtgaccttcagtgacaccgttcaggcccctgtcggtgtcgtgtgattctattatgtcacatgtgggctttaggagtgggccagggcctttggctctgggcctagaggttccctgcaggccatggcccctgagtgacataggagacttcttccccaaggctgcctctgggtcttctcccacctggggaggcatttactggaaccacaggggatggggtggcccagcagacctgggctatctagtgcccttcagctcctataggccaggtgcctacaagcctgacttctgcggacagcggaaagctcaaatgttcccccagcctaagggcacacagatcttgccatggggtaggggtgttgggggctgggaggaggtgtcatctgaggcacccgggactgctgctataaaccgatgtccactgagcccaaggcagcagaaaggcagccacagcttgtctcacgggtggcacagagcagggcttcaacttctgtttattaaacaaatcttagatctggg

SEQ ID NO: 64104 - DNA, 1925 bp, Homo sapiens
gtgagcagaggtcgcaccactgcattccatcctgggcaacagagcgagactccatctcaaaacaaaacaaaacaacaacaaaaacaaacaaaaacctcacctccatcactgctccttacctgggccaagacagcagcctaactggcctccttgccttcctcctaccaatccatttcctctggggcaacacaaatcaaatcaacacctcatgttcatagagtgaaggtttaggacaccctccatatgccaggcccatgattcacactcactgctgcttaccaggaccctgcctatgaactcccgagacccccctgctgtccccagtttaccccactgctcctgcattccgatgtgccagatggcccgctccagtcccctctccccccacccctccccccaggagggggccttcgcaccgtcgccagccagtccaagcttcagtgcctgcacctgcggcttccccagcccggggcactctccctgcccacctcactgagactcggctcaggtgtcacctcctccagaaccccttcctgattctcccaaacacgcagcgcctccttatcgcaccccgcaggaatcagctgtttccttgtcagtccctcccaggagacggctcccactccctacacgcagcgaggcacacggtggggctcagtcaccccttcccggacccctggatgaatgaatgaatctcagagccaggcgtgtgcgcgggaggccggagcgtgaggactgagggccgcgtggccatcctccttctccggccaccccggagccccccgcccgtcacactcggggcgcgctgggccccaggggcggagaacgggaaggggcgggtttaggcggcttctccggaacccagaggcggagcagggctgcgggcggggcccgaagggcgcgcagggtcctgggtcctgcagcccaggccgctcttccccgcctcccgctccccgcaggtaaatctaagtctccaccaggctgcgccggcgcctccgggtcgtgggaccccccccccccgcacgggtccacgcggccgttcttcggccccagcgatccccggccgtgacccctgcctcgtgcacggcggctcccggcccggccgcccgctccccacacccgccccccgcggccgccgtccccgcgccccgagtacccaccggcgtggctcttccggcgcgggcggggccgggctgggcggcgtggcgggcttggggatccgcggcccgggcgcactctccccgcccagggcccgccgggggccgggccgcagcctgtcgtcatcccgggcagggccgcgcaccctccggccccgccccgccccgcctcagccccggccgcgtccgcgaagcctcggtgcgtgcggcccccgcctcggcccgttcccggggccacagcgaacacgcgcgcgcccctccggccgaagacccggctccccgccgcgctgctgggggcgtgggggcgcccgactttctccctcctccgggccctttgcatctccagccccttcctgcgggccgggccagggccgcgctcccccgtttctacccacccgtgacccttcacccacctcccacaccgtccttctgttctgagtcttgggcggtcccagccctgcggactggagaggagcggggcgttgactgagcctggagcttccatgccctggtccttcgacctcacagcagccggcacttgccttttgtgcccagtattcacggttctgcccactgaggttcgggaagccggggaagagtcaagcccagacctccacttccaaaaatcctgctgctagtggcccttgcatccttactcttccactcaccccgtcttgttcagtctgttctggccccgccaaggatcggaacccctccccgctgctcagctcttgcccgagggctcgcctgagaggggctgcccggcct

SEQ ID NO: 64105 - DNA, 1607 bp, Homo sapiens
tggaatggcagagggtacagggggatgggagaaaagggcagttaatgccaaaacatctctcctccaacagaccccgtccttagaggtcgacgttctcaaaagcacttcaagaaattcttggccagtttaaagcaacttcctgtccctccctgttagcataaacaacactatacagaaaccaccttcccaggcactcggcctgagattttgagcttcatttgtttacgatctccccctgctgtccgacagaggcttaaggaacaaagaccttttactcagagacttcttttcccagactcactctaagaggatggagagcaaaagtccggatttcttgttcccactctcaaatccgacgattagcagcaaatccaagcatcgtgacttagactaagtgggcgattagcgttgttccccgtgaaagagcaggcaagagaccaggctaagtcacttccctaaaggatcttatctcaatctgatttcggattcccggggttcaccatgggatcaggcagacctcctgatgtatgtgctgatgaaaagtaggaaaaagatttctaaccgagagccgaagggtgacggcctcgttatgtctttaacctcaaacaaccccacacggctgtcctctccagaaagcaaccgggacacctgctgcgccccagtgggaacgagcttggcggcctcggcttagagggggcgcgaggctcgggcccaacacagcccacctgacacaggcgtgggagaaggcgagagcgcctctgaaccaaaggcagtcatggaggtctggtgccttgtccacccccagcccgcagcccaaggggcgccgatccccccgagcaggcctgcctctgccgccagggtgccctcacctgagcctcctgcctttcggcccgctcagcttccgcgagctcatggccgccgtcgtccccgcgcggtggtccggcaggttcgcgtctcccggccagcgggtcccggccagagcagccctgcgggcggccggtctcacgcgcctagctgtcgcggactgtttttcttccggactccgaccgtccgccccggcttccgtcagagacgcgccctccgcgcaccccgggatctgggtggtgcggttcgcagaaggaggcgggactctcccacgagcgcaaagctgcgagaggctgagcgaagacgggttcgcggacgtaagaggggcgtgtcgggcctgtcatcagcgcacgcgcaacactgccccagacgacgcgaggtgtgcggccgccactagacccggcccagcccgcgcccgccgtccgcagctcccagcgtgccccgcgccaggggccgtcttccggcggaagttgtctcttcgccgccgccgcagcctctgccccactcgtgagggatccgagggctccgtccttgtgctgtcttcgccccggctcccaggggtcaaacgagggtcgggggtggggacacgcagcctagccactgtcctgcctgggatccggtctcccccgccccccggctgcaggtaatctccccattcctgctactgcgggagcgcctccgttctccacgcccactttcaggcttctactccaaacttattggattacctattgcatatggga

SEQ ID NO: 64106 - DNA, 426 bp, Homo sapiens
atttagaaattacatttttccagtggagctccagtggcgcaattggttagcgcatggtgctgatacagaaattatgtttttcttttcttttggccaaggatcaatatatgaacatttaacgtgcagaaaaatgcccatgtcagccgcaacactcttcccagaatgacacagagaacaggggcatctctcagttggcacaagctgtgtacccagaaccctgccccaggcagggagatgtccacacttgcaacacatgctcactgcgactctcttagacatcaagaaaatccacctttggccctagaccagacacacccagccacactgcatactgcctttttttttttttttttttttttttaataaacggagttttgctcttgttgtccaagctggagtggaatggcacgatctcggctcactgta

SEQ ID NO: 64107 - DNA, 669 bp, Homo sapiens
ctcaagtaatccgcctgcctcagcctctcaaagtgctaggattacaggcatgagccaccgtgcccgaccctgtcttttaagaacatctgtgcatccctcatttccaagaatctaacttccagcccagtgcttaaggagtagggagggctgtgcttcagctacagcaagaaaactctaagggttacacatcccagaccccaccaatgaccgcaaatctcctgatacaaggtccctgaacctgtgtggggccactgagggttggaaagagcaatgaccccgtattctggattgcagtcattcccaaagtccacaggataagggtgatatgcgtcacgtaaggatcccagactcatcagactctagggagtaccaggtgccaacaaagaaagcaagtgcaggaggacaggtcagcagaggctggtgggaggaccccgcagcccaacactgtctgtacccacacatggaggctggtgggaggaaaggtcacctacctcacagacaagtgccaggggacctctcaggactccccagggttatgaatcagtaccagcttaggccctcccaacaggtctattcctagatggccctggaaacctaggaatcttggaaggctaagaatctgaatcactcgaaagaaatttaagaatgtctggactagaatagaaagtt

SEQ ID NO: 64108 - DNA, 1595 bp, Homo sapiens
atcccaacatactctctttccggaccagcctcgaccccggtaacttcccggccttctccacttcggaccctacccaacattttctggcctcctcgcccaagtctccccacgtcccaagcagtcatcccaagcttgttccaaaagcctcctcttccgcaccagctgcttgggcaccacggttactccggcccgcatctcagccccctctgcatgtcctcagacccttcacctgtctccccagccaggccctgacttcctagtcctcctcctgtgtccacttaccaccacccctcacccgatgcctaaggcggccactcctccccatccccatcccaactccatcgcggagcctctgacccatccacccggctctccgtgtgaactgttcggccctccacctttccccaccgccgggaggccctgcctgccccggtgcgcctcttcctcggccgccgcggggcctctcagcgccgcctgcagtcccggctgagcccgcgccctcggcccgcgcagagcgaccccacagcactcccagcgctcggcgtcccctcggcctcccccagtcccgggccagctctccctgccctgaccccgtctcgggcctggcctcgccctcgctgtccccggcctctcctcgggtccacttgggcctccgaggcccccggggcgcctgaggagccgtccgcccgggttgtccctccgtgcccgtgggcccctccatgccccggctgcccgtccatgccccgtgggccccggctcagatgccgaacgccccggctgcccctccacgccccggccgcccctccacgccccggccgcccctccgtgccccgtgggccccgcctcacgtgccgcccgccccggatcccctccatccccgctgggcccgcctcaggcaccctccgtccctgctgcccctccgtccatccgggccctgcgtccctcgccgcgccgtcgccccggcggccgtccccaccctccctcctccccgcttccgcacggccgccggacactcactactccttgagcagcaccatgtcgcttcgcggctcggtggctgcccgcggcccgcccggcctcccgcccgctgcccgccggccgctctccccgtggcccggcccggcccggctgcctgtgcgtcttcgtcgtgctctgctccgtccccgccgccctcgccgcggtcgccgcgccggctcctgccgcccgggcctcgtcgcctctcgcgccgctgccgacgccgcccggagctccggttccgcagcgccgcgcgggggcggggcgtctctgcggcaaccagagcgtcacacgccgcggtgcgcgctgacgtcacgcggggccgagccttcccaggcccgccctcccgtccttaagtgggccgcggcggcgctgtcggttccgaggtggggccccgcggctggggccagacccggcagaaggcggagcagactagggtgtccgtcaccgtcctcggtgtgaaccgccacggatgcacgcgggtgctggctggggggcctccccggttgagggaattgagacccaggaaaaggttgtttcaaaaaatattaatagccgcgcgcggtggcccacgcctgtaa

SEQ ID NO: 64109 - DNA, 856 bp, Homo sapiens
gttctgggattacaggcgtgagccaccgcgcccggccctgctgggtggttctgcaaagtgtttctctttggaccagctccaggccccagactctggggagggcccaccccactcagctgtgcccagggcctgtgggtgtctggctgagccgagtggaaagcgtggtgccagcggggacctgcggtttgggaaacaggcccagagaggagtgtggaggctgggcttggctctgcagtgccctcgtccagagaagcattgagtaatcgcggaaactcagcaccacagatcccgcccccctccctcagaccctgccaggacagccacagcttcctccaggcctggggaggggcaggcggagggcaagcggagctgggattaccccaggggctgttgcgggaattgggagagagttccgggctaaatcttagcacatgtcaggctctgctggcccagaggtgggaaaggaatcccagcaacacatgagctggtcccacatcagagactgtggatgatgatgtttgagtttcagtttttgggtcaaggcctgagccagagaagaaggaaccactgtggttccttttatgtttctggggcttcttggaaaaagatacaggtttcattttagccagggctggagaaagctatggccagagctgggcgcactgaggctctggatgggcccgtctggtgtattctggactcagtcacccatgttgctgcccgtgatgagggcaactggaacttccgcatttagcttcaggcagccagaacctacccatccttcccagtgagcagccagggccagccccaggactcggctgtagtggcccctgaggccataatgagctgcacaggt

SEQ ID NO: 64110 - DNA, 961 bp, Homo sapiens
attacaggggcccaccaccacgcctggctaattttttgtatttttagtagagatgggggtttcacaatcttggccaggctggtcttgaactcctgacctcatgatccacctgcctcagcctccaaaagggctaggattacaggcgtgagccaccgtgcctggcctagactaccattttcacagtagaactggctgttatctggttccctttgctatcttttccttttgataaagctggatttctcatcccctaaaaacctgataactgattcttcacaagtcctagggtatcttcaccttgataaaaacaaggaaaccatcggaaaaagtggcacaccagggaggctgccaataaaaaggatttggagtgtttgtcccgcctggggatgactaaggctgactcagctcaggccccggggaagtcctgactttctctgtagaatcaaaacctctaatcagctgaagacctgccctgtttggaaaagtggactgtgggttatcagctgtgtttgttggagctgacaagcctcaactgttcgcaagctccgaggaagtctctgccctgccctgtttctcggtgagggatgcagatcccagtgtgggccagttgccccagcgtctccagccccgtcctgacctcgatgcccagggtgtccacgcacccaccgtgccactttctgggaggactttgggcttgacctgctgtctttcagccatgctcaggtggagcgttctgttctgttttcatttacagacacacacggcaaccctccccctcaggcactggaaaacacacaccccacaccccacacccaggaggctattttggtccttccctccctcctggaccaggaaaccctgatggggacacgaagaaacagttggggctggcagtgatgcaatagctctgacgggcagacagctcctgggatgcggcctttccatggcccggctggcccgg

SEQ ID NO: 64111 - DNA, 2047 bp, Homo sapiens
aacgcatgctcagggccgtggaactagtcctggcctgcagcaggactgacatcgcctggggccagcatggaacgcagcgtgaggtgggcaggggcagatccgagggctgcctctcccagggaccctgacaggtgccctcccgcccgcgcccgagacccttccccagagctggtttcttcaaccacaagatcagcgcccagacctacggaacggcccgccccggcgcgctcattggccggacggcgcaggaactgccgcgccattggccgccgtctaggtcgctaggcgctgcggccacgcgaacccagcgtgggagacgaggagccggttcaaaccggtggcgcgagccagccgcgcgacccccatctcgggcgttcccccggcaactcgcccgtttccatggcctcggacccccgcgcctccattccccagcccgcatctgttcgtcatctcttccctggcggcccctcatcgctccatctctctcctcgttcccacgttttctccctacgccccttcggcggccgcttctgcccccgcgccctcgccccggccgcgatcccctccctgctgcagctcacccggctcctccggcgtgtgtcgggcccgcccggcgccttttctgccctcttttattccagcccttttattccgaccccaagaagaaaacactgccgcccgctgattggctgagcggggctggaaacaggcgtcgaccaatcagcagccagccccccgcccgccccgccgcgagcagaagccggttccggccggactcggagacaaacaagagagatgggggacgggaggggcctgggcgctgcgggccgggcctcggctttgcagccttcaacccgagtcacagcgcggccgggaatccccggcgacatcgccccgcggcctctccagcggcctgaccctgcgaggctggggctccggctccgcgtcccggcccccagcggactccccccagaagccgccgggccaccagcgcccccagccgggctctcccgcggccgccccgccgtccccagctgccccctgcgcgcgggtcaccacgcccagatgcgccggctccgcacggtggttccactctcgaatccccaccccgcctcctccccacgcagcgccgccgtccccgccgcctcgggctttgggtcctggttcctcgctcccccgccccggtggttcccgtcccggcgtattcggggcctgggatcccggacccggtccagccgtggcgccccccgctgatgcaccgaccccttcccctctccccggtggcgtctgcccggtccctggaagttggcccttggaaatctgcaaggggatttggggctggtctgtcccgtcctaggatggggtctcctgagctccccccatcagactgacctttctccgcccgtgttcacgcactgctcggtcctccggggaccctccacccttgatcgtcatctgggtgctccctgcccgcgctggccaccttcaccccgttccccgtccctttcagggaaggtcccctctgcagggcgatgctacgggccacgtccgccagctggtacaagctagggagggttcgagggggctccgggtccccgtctgataagcccgggctccgaaagctcagctccccgtcttcgtcccccggattcgaggcactaacccgacccgggaagaccctctgactgccccagaatcgccttggtcaccctggctcgctccggggggctggcttagcaccccagggctgccgcgcggtgtccacgtctggaatcccagcggtttgggaggctaaggtcggagggccacttggggacaggagtttgagaccagcctgggcagcatggcgagaaccatctctaccaaaataaaaaccaaaaataaaaccccaccaccaccccagggctgtgggagccccaaacgcctcttgctccacctgccccagtccgagtgtgccccctactgtctagaatccgcccgggccacctggcgagggcaacctcccccagacaacgcttggagctgtcagcctgctggggggcggctc

SEQ ID NO: 64112 - DNA, 2785 bp, Homo sapiens
acttgggggacaagggtgccctaacagataacagagcagtgctccagctgagagcgggggccgaggccggccgggggcgcagatctgtctgccacctccccgcttcctggccgacctgctgtgcagcatgcaaaccttgcttgagtgcccaccgagggctggacgctgcgtcctgggctgggtccttgccctcatacggcactcaccgggtcctcagggttccctggggcgcctgcgccggcggtcgcccattcgggctcctgtccgtgctggtgcccgggccgcccggcctgcccccgcgctcgctctttagcctgcggagtcgcggcttcgccaggctgctggcgctccctctcgcggtcctgcgcggcgcgcagctgggtctgcatggccgccagcttgtgccgcagctcagcgttcaccagcaggaggcgctgcagctgctcctgcaactgggagcggagcaaagggtggggtgggcggggcaccgagggccccccggagccccgcccagcgcctgcctcgctccgcccccgcccccggagccccgcccagcgcctgccacgctccgcccccgccccgccccagagccccgccccgccctcaccgcctcggtctcctggccgcgctgccgcaggtcgcggttgtgcgcccggagttcgtcccgctgtcggtccgtgacctccttgagctgccgcagcagcgcgcgctcctctgaggaaggggcgttcttagcggcggcggcgcgcggcccgcgggagggaggggaggacccgagcaggtcgtcacccgccctgccctggccggggctgcgcttaccctgtggccccgcgcgcagctccctgcggaggcgctcgttctcctcccgcagccgccgcagctcctgctccgccggctgcgccgacacctgcagctggggagacccgggtctcaggcttcggccctgccggccccgtgggtggcgaagggagggccatgactcaccgagtccggggcgggccccacggcagcctgttccaagagctccagcgcccgcaccactagcggcaccagcccggccgccgcctccggcccgaaacggcgcgccagatcctgcagctcagtgcccagggccccggctagatggtacacaagctccgcggccgatgccgaccccgcggcctcccgagacccccagccaggcaccccgggcgccgccctcctgggctccatgtctcccagaggcttagggctgcgacccccccaccccaccctccactgggacggggaaaagcgaaacagttccgccccaggaagccgtttagggcggtgtgggcggggtagaagcgataagggtagggaggaacgaggaagggagaaggcgtggggtagggagatagtgccctaggtcgcctgggctctgtcctttccacccccaaggtcacaggaaacaagacagccaacttccagccaggcgtccaagagctgaggttcagggctgcaagtggtcacttgagtggagccctccccacaggcccaatccaggctccgcccgtttggagtcatggggccaacttggcagtggcccgctccaggcgagaggtgacaggtaggcagccggtctctggcctccgcccggctgtacacaaactgcctgcctgtgtgcttgttttcctgaccaggactgacacagaaagcttaaagggctgggctggacaccgcagccgctcagcacaagccacagagttcctagacccgggaaagggcaactgctcccaaaactgtggaaaggaggcgagagcttccaagtagttttgtggaaaaagcagcaaatgtggtcaaggcagcggagtgtgaaagcccagccctgcctcaggtctccactgagtccaggggctatctaccccaaagccctgaataggaagggggcctcatactccccccttcacagccgagcccagcatcttgctgtgaaccgctccagtccagcctcctgttagacctaaatccagaatttgagtttgggggggaaaaaaaaaacaaaccagcccctgaactcctatttatacaaaatttattattatattttattcaggatgacaagccatcaggaggtcaacaacacaagcacagacagagggaaagaggccaaactgctgaatgtcagcggcctgtctggaggggctgaggcttcggcctcgggaggctgaagcaggaggcagggaaacggtcaggcatacaggtcctcccgatccgcagagtaaacctccccctcctgcaggagagcaaagttgaggaagtgagagggcctgtgcacctcgtggtagaactctttggggttcgccagctgtagctcatatttcatgttggggtcatgccgaacaccttcggggagaaggaaacagccaatgttaacagggctcctgcctcatgcagcctgcgccacctccaagccagccaggccccaagtgcaaagggcgatggcctcaccttatccctactgctatccccacatccccaggctcctcccacttacccatgaagttgtagttccacgaggactgggcagggaccatgaagaagccaaggaaacggtccgacagcagcatctgcaccctctcatagtgtgaaggcaggtagcccttggggttgttgcccttgtctgtgttctggcggccccattcgtagccactgggggtcagcttgtaggccgtcagtgtacaggagcctggcgtgaagctgggggaggaacgaggacagagtaacagctcaggccactgttctgggccctggcctgcaatccctg

SEQ ID NO: 64113 - DNA, 697 bp, Homo sapiens
ggctggtctcgaactcctgacttggtgattcacccaccttggcctcccaaagtgctgggattacgggcgtgagccactgtgtccagccaattccacacttttctcttgtacactcaactgctactgggctccttaattaaaacacgctcaagtcactgtcattcaaaaacacctgcactgacttacagctccctctaggtggcatctgatgtccttccttctcttcaactgacaaacagattgtccttgctgtctccactcactcacttcccatgaagcctcacccactgccatctggcttccatccctactatttctgtaacagctcctgctaaggtcaccaatgacgtcctaactgtcaaatccaatggatacttttcagtcctcatctaactgaaatgctcttaggcaactgacactgctcagcatcaccccaattctggacacgtgttcctgaaggccttggttccaagacccggcaccctcccacaggttctgaccacacttcatcttagtattccccacatttccaaattcctccctctcctcttctcactccacattgtccctgggtgatgtcactcattcttgagcttttgaccttttgtggataggctccgaaatctacatctttaatccagacctgttctccatgtttcttcagattgcttctcacctaggaacctctaagctatcc

SEQ ID NO: 64114 - DNA, 1285 bp, Homo sapiens
gattatagacacgcgccaccacacacgactcatttttgtatttttcgtagagacgaggtttcactgtgttggccaggctggtctcgaactcctgacctcaggtgatccgcccgcctgggcctcccaaagtgctgggattacaaccgtgagccaccgcgcccggcctgacatttttattacagagcttcaaggttttgttattctctgtctctcccgctgtaatttaaaccccgtaaggacaggaattttgtctccgtcactactgtacccccgctggatcagcgcttgcaaataatacgcgcttaaaatgacttgatgaaaaattaactggaaataacaagggagctgacacctcaggagctgcccaaacggggagggtccccacccgcctgcgcgcgcgcacacccgccccgcctccggcccgcgcgccgctccacactctcgcctcacctttctcctgcagcttctcctccgacatgtagtccggtagcggggctagagggccaggcaccgggttacccggccctcgataaggaaacactccggccatatccggagaatctggggagcggcgggatagaaaaattcactaaccacaggcccgggcccacaagaagcgcagcagaaaggcgtccggggaccccggcctgcagtcccgccacacagtgcatccagccccgcccggcctaaccccttcggtcactcggcccgacccgaccacgcctcccgcagcccggccttaaacgcctgccacgcaccccacaggccctcacacaagaggccgctttccccgcagcgcaatggcggccagactgcgtccgctccgcgttcccagcgccgggaagtgcgcaacccgagttcagcagttgatccagtcggcgccgaggtgctcagatggattagtgagacgaccaattagagttgcacactgcgccgaggaggcgggcccataggcggaaaggctttgaacgcaagggggtgtggtcggggtgaagccccgcctcctccatttccgaggctgtttctggggcctctgacagacctcagcgtgtgatgggctcccggcgtcgcactgtgagagagcgaagtctaaagggtttgaataaatttgccaagattgcgcattgtacgatgtctgttgtcatcaatgtgtacatgcaatgcagtactagctcctggacagtcatttgttcatgcattcattcatttaaccatcactgtctaccgaggacgagggataaagcaggaaaaaagacaaccagtagagttcacaggggagcagaaa

SEQ ID NO: 64115 - DNA, 2045 bp, Homo sapiens
aggctgaggcaggagaattgcttgaacccaggaggcgaaggttgcagtgaacagaggccgaaccactggaccccagcctgggtgacagagtgagactccgtctcaaaaaaaaaaaaaaaaaaaaaaaaaaagaatgaggagagactgggaacctcgggctggacagggctcccctcctcccttcctgtctggcttctgccctcagagtctcaccaccaaatgatgacagagaagatcccaggtcttgcccaaggtctggttccacagcaggtcagctccgtctgccaggaagtaacctgtgggcatgggggtaggggttaggctgctccagagcccgggcagcttagagaggatttccagcccccccgccccgcccctctcccagttcttagttttcccttggtaaagccttcaggaacgtttaacccccatgggggcggggaatggacctggaaggacagcagaacctgccccccgccccatccccaccaccggcccagccttccctgcagactcacccacagacacagccaccagcaccagagcccagcgcgggtggccatggatggggtcggcggccatctgagggtacagtgacaggctgggggcatggggtggggacatgggggggggcatggtcagcctctcgaggccccggccgcagtctccctgtgcgcacccccaccccagtctcagctctggagacgcccggcgggtctcccggcctcagcctcccacccctcgccctcgccccgtgcgcctcgagcccccaagcccgcacccgagcagcgccccggtccccgagagcaggctgtgcgccagggagacgcagaggttccaccactgccagcggtcccgagcggccgattccggcgtgggcagccgccgcaacccccagtgcagcccccggaacgcgaggaaggaggcgccggccaccaggagccccgtgggcgccatggcctggcggttggggggttgcggggagtccgggtcggtcccctcggcgcccgcgctctcggccgggactgggaacccgtttcccggcagggctggggccccggctcccctccccgccgcgcctttgggatcagcaggaacttttccccgttcgtccacgcccagtccctcgcctgggcggtgattggagcagccgcggggccgccgcccccggagccttggccaccgattgcgtcttgctccagccgggggagcggttcgggggctccgggcagtagaccatgccctggagctcggggggcctccgggatgttcgccaataggggtcctccccagctccaagcgtcctgaagcgctggagttgcagacctgggtctccagtctaacctcaactgacactcccgggccccacccacgaaccttgacctcttcccggctcccgcgactttcacctgctgagcgtcatcaccacccaccgccacaccctgcaaggcagaggctagcgcagcccactcgtacctgcccgagcctggccgccgcccccacttccctccccgcgtccgtggtggggacggggtgccccactttcttggagccaccccttcggcctcctgaggtttccacgcctttaccatatcccggcaaacctgtaattccagcagttctgctccccctcccccacaacccccaggagaccccatgttggagaagcgacccactgggccccgccccgacccccagcattgttttcggccctacggaggagcctcattaggaagaggacgcaaaagggaatcgctggcccccagtcttgaaaagcacttccttccccaagggcttggtacccgttgggtgggtagaatatcttcaatccgagggcaaggaaaggtaacacagggtcccttcaaggctgggacagagtcagaagagaaaaacagacctgtcctgctcttagtagcagggcggttaggattccagaaccctccagccttaagaggaagagcctcccccagcccctcaccacctgaagagccccaggttgcactgctttccttccaccttactccactccacctcttcagctggca

SEQ ID NO: 64116 - DNA, 5447 bp, Homo sapiens
agtaagagcagaaggatgactcctcacgcctgggtttagtatcacttttccctgaagagtgagcttacttttggacctcatctggaaaggccagtggggaagaatgaaagatacggaaggagggtcaagaaggaagtcggggagacagagtgttctctccacttcttcccactgtcacacaaagaccaactaaccttgggttgtttgagccttctactcctcaatccagccagtgtctctaatctaaaaccgctccttgctgggccaatctgggcaaaggctctccaacttgcccaaaacgtatcatccaccctgctgttcggaccttcccagcccatttctgtcaccttccagatgatggggaaagcagctcctcctcctcctcgaagccaggggcagagggcaacagttcttcaactggcagctttagctgggtcaggacataaagcttgccactgaagaactactgcggctcagccaggtgagggcgtgagaggaacaggctcctaagggaaagggagggaaaatgggaaagatctgagcagggcatgttgctgcaacgctgacccactcgctggccatcagggtcctgccccagtagacctctgagattctaatgcagggctgcagctctgatctgggcccgcggaagctgttaacctcgctgagcagcaagaggtggctgtaaacagacttcccttgctcttctttccagaactggagtctagagaaacccagtcctgctctcaccctcccctgccctagcggcccctgggggcccagcctcctcagcattcagacagggtggggcccgggaccctggacacaccccaccagcacgcaggtactagaagtgtggtacctcaggtccagaaatgtgagttcagtgatcagcccaactgacttgttcccagggagttcagctggaaggagagttctgggggcctggattggggaagagtgaggaagggaggaggcctagcgtttgaaagaaggtcagcagaggcccccggggctgtgaggggcggacaggggaccacaggctggagaggagggaggtatcggcagggtggccggggctgtgaggggcgggcaggggaccacaggctggaggggagggaggtatgggcagggtggctgggcagcttccccaggactctcagatgccaggcattccgcttgcgcattccgggtacatctggtatgaattccaggctgtctgccggcccctccatgtctgaactttgttccaagttccaagccccgcccccacagttccaacgcatgaatcagcaggaaaagccgggccctgcagcatggcccagggagggggctgggggcgtggcaggctcgggggatgtgagctggggagggcgggtccgtgctgacactcagtccaagggcatggcccacgccaggctgaggggccaaggcggtcttgccttggaatttctatactcagagggtaagaaagattgggggatacggggtgcggttcaaattccgaaaccctcttgggaggcatgaactttgtgtatcttccttcccctgggtgaccagtccaactccgtccgaccttcctctgtctgagatagctctgttcaacccagaggactcagcagctgctgagagtctgtgccaagcaggtgcccttggctgcagggcggggtgggcccagggcactgaccctctgaccagctgctccatcaaccctctggcactctgacagctcctagcccaatctgacagccaggatgacaggccaaaggagttggaggctggaaccagggccggagggaggtgggggtgacagcctcgccggaggccatggggaggggccaagagttggccgagaggtggggagagaggcagcccagtgatgactaacccaggcgccccacccagccagccggcttcccaggcagtcagggccaggcctgggctaggggcctcacaatcggacaggctggggggaggtgcagaggtgaccttctctcggcccaagacggccagttagtctggggagcgggggttagagtttccaggccctcctcttgccctcttccccccgcccaaccacggtgaaaccctaacctttgggttgcataaggccccggcaccgccgccccctactcctctcccctccccccttacataacatcccctggagagaacgagaggaggggccggcccgcccagcgaccccttccctgccagggcgctgaactggccctgacccagtgaacgccggcagaggcaaagcacctcctcgccgcccgctcggggggtccagaccctccccaggctagatggccggcccctgtatcctcagaccgggggccgccgggtgagccgcccccggccctccggcccctcggctctccccccgccccccgccactccgccagcccttccgccacgactcccgtcccagactctttcctcgtagctcctgacacactaacccggccagtccaggcccctctccccgaggcgcccctgcccccgccgccccttctcctcccggaagggctgggtgtggccgcccggaccccactttcaccctccatcccgttaccgcggctccccgctgcgtgaccgggtcgccagctcacacccacctggtgctgggtgtgggggttgctgcacgagggggagcaaatcactgcgtccgctccccacggccggcggcgctgtctcttctcggcacccagcacacaccggctccaggctccgatcagctggcggcgtcgtgacgcacgagctgcgaatgcacggcccggggccaatcaccgcccactgctgggcaacgtggccccgcccacccgggggccgacggggcctcgccctggtcccgcctctccgggcgccctggctctgattggcaaggaggccacccttttgccgggcggaattgcacgaagccacgcccacccactgaggagccggccaatagacggacaggtgtggcccagccctccgcgtcagcgacccgcttagaaaagcgctacgtcaaacgagagtcctaaagagcaggcgaaagccacggcgtctgcgtttgcaatgcatgctggtccgtgtagttctcagcctgacaccgtcgttcccagaacccagcgcgctctgtgagttggcatttttaaactgagctcggaatccagcccggggaagtccttaaagggcgacagcccctccttgttggagtcgtgagtgcttcttttagacattccccaaactgactcgccggcctctgcgggacgctatagctctttaaggaaaggtggagcggaccaaggagcaggagtgggcagagcgtcagcccccagggcagcagagactgccgttggagagctctccagggtttttggaggagggagggtgctcgcctcgcccagcccactcctcctgggggctcttcctaaccacaggaggctttttttcttggatgtctcttcccagtcccagaagagcccccagagcctcccaagaggtagctttctaacaaaagattcatagcacagtcctcaccttagggtagagggagggcttctggtcagaaattaggggatgggccatgccaaagtgcaaagggtcagcaatcgcatcctctgattaacccccattcagtcccgccctccaaagctcttcactgactcaggcctacttagggaagagattcgaaggtggagaccaatgagcaggctgctccttccccaggggccaatcagagtctagatgagcgggggatgggcaaaaagtgaaatgaacccagtgacttggcaaaagctgctggtcggcgtttttaaaggggcaagccggagacctgccctaccttatcaatccccgcaagtcccccaaagaggaacatgtggactgaaatccatgccttttccttcagctccaaataggggctgagggtaactaagcaggaatgatgaggctggagggtgagatccttccttctgttaaatacgcactccatcaggtaattgataaggttcacttggagctccaaaattctgagcctgcgttcaggacattgcgcctttaaggaaacttcctgccttgcgccccagtaacagctgattgttggaaagtgtgacctctggggacgaatcagctgttaccacatcctcctccttgcttaccctcctccatccccttatccactcccatgggtggtgaaggaaagaacgtgggggatgtgattgtatgatctttcttttcccccatcactccaagactgtctcccccaaccccaaccccgctctgctccttagttcttcagaggctctgggcttggaaagagaggtatttcctgttagcacagtaaattcagactctgtggtctagaccctccctggtctaggggaaggccagtactggggaggtccagaatggtggctggcgctggggagggtacagtgaacccgaggaccaagcctggggaggaggaatggctatgggaagcaaacttggggttcagaacgctgcttctcaggccagccgccccctacttcctactcaagttgccctattcctccatggacaggtgtctgctgatgggatcctcctgcttttgcccatttactccacctccttatttattttttttttttctgtttttgagacagagtctcgctctgttgcccaggctggagtgcagtggcgcgatctcggctcactgcaacctccacctcccgggttcaagcgattctcctccttcagcctcctgagtagctgggattacaggcgtgcgctaccactcccagctaatttttgtatttttagtagagatggtgttttgccatgtgggccaggctggtctcgaactcctcacctcaggtgatccacccgcctcggtctcccaaagtgctaggattataggcgtgtgagccaccgcgcccggccgcattcactccacttctaactgttctcagctgccacctggtccctgggccgctccatttttggcttttggcggtgccctgcccacatggccaccccccatagcaagggtcctaattgctcaaggactgcaggtgggacacgttggccccagaagccagcgtctttggctgggaagtgctgggaagacccaggtaaatattttgcctcgatcctgagttgggagtcagggtcactccaggacaagcttagtgtgaagtcctaggactgacttggcaaggcgtggagaaattgagcagggccctggccaagcatggaaggaagtgaagcctcaccagtggcccctattctccattatcctgagcatagaaatcccatccctttcccactcacggcccttggggtgacccttttccattttgttctgaacactgaccccaccccctaggtcaaaagcacaggcttcgagtccagggtttcgccacctcagcacccactggcattttaagtagaataatttcttgtgggagggctaccgg

SEQ ID NO: 64117 - DNA, 1851 bp, Homo sapiens
ctaagtctccattccgccaggcggacaagcctctctggcggttgttggttatcacttgtaaaatataaacagtaataactgtcctccctacctcacagagtgtgttgcgagggccaaatggaatgtgactgttgaagtacttaggaaagttaaaaagctccttcctatggaaggtggcatggaggcgccggggggattccatgtcaaaagtcccagttctggccgggcgcggtggctcacgcctgtcatcccagcaccttgggaggccgagacgggtggatcacgaggccaggagttcgagatcagcctggccaacaaggcgaaaccccatctctactaaaaaatacaaaaattagccgggcgtggtggcgcgctcctgacgtcccagctactcgggaggccgaggcaagagaatcgcttgaacccgggaggcagaggttgcggtgagccgagatcgcgccactgcactccagcctgggcgacagagcaagactccgtctcaaaaatagacacaacagaagtcccagttctgcccctggttgtgcggtccgcacttaactaagaggctggcatctctgggaacagcctccgggacccgcgcgctggtgcgtgctggagggagtagggaggggtggggcggtaggcatcgccctccgccgggcccggctggagctggctggagaccctttcagccccgggaggaagcggagcccagaccgagccagagcggagcagcgggagggagggcggggaggccgccgggcaggaagcggggtcccgcccgggcctctggagccacgtgcgcttgtttccgtgctggggcgatcacgtgacccgcgtcagctgacccgtcacggtggagcccggtgctcgcgcccggcagcctctgccccgccgcgcccggagcgcaggacccgcggaggggtaagcgcgccccccgtccgcctcttcgccgccgccggcttcctgcggccgcctccgccccagcccctgtcccgcgcccatcccagccccgccggcctggcaccccggaagccgtcgccagcagggccgtggctgggctcagccccgcgctgcccccgggcggcctggaggagatggcccagggcagcggggggcgggaaggcgctctcagaaccccggccgggggctggcattccccgccaagcccagacatgcaggagctgctccggagcgtggagagggacctgagcatcgatcccaggcagctggctccggccccggggggcacccacgtggtggccctagtgcctgcgcgctggctggccagcctccgcgatcgccggctgcccctgggaccctgtccccgcgcagagggcctgggagaagcggaagtcaggactctcctgcagcgctctgtgcaaaggctgcctgccggctggacgcgcgtggaggtgcatgggctgcggaagcggagactgtcctaccctctgggcgggggcctgccctttgaggacgggtcctgcggccctgagaccctcactcgcttcatgcaggaggttgccgcccagaattatcgcaacctgtggcgccatgcataccacacttacggccagccgtacagtcacagccctgccccctcagctgtccctgccttggactcagtacggcaggctctgcagagggtctatggttgctccttcctgccagtgggtgaaactacccaatgcccttcatatgccagagaaggcccctgcccccctcggggcagccctgcttgccctagtcttttacgggctgaggccttgctggagtcgccggagatgctgtatgtggtacacccttacgtacagttctccctacatgacgtggtcaccttcagccctgcca

SEQ ID NO: 64118 - DNA, 2995 bp, Homo sapiens
gactttccttcccagggaagacccttcgcacagtggagccgctggacagccgggtgcccctgactgcggtggctgtcatgcccgccccccacaccagcatcaccatggccagctctgactctaccctgcgctttgtggactgcaggaagcctggtctgcaggtcaggggggtccagttccctgagcactcgcctggttctctggggacctggcaaggaggagagactccccaaaaacagaaagccaggatgttgttctggggccctagttagtttctctttggtgctagatcacccacagccacacatcctgcggggcaggactctggcctgtgatgggggtggggttctgggcttttcatgccccctgatgagggtcagaggctcaggccttcctgctgtgtgggcttgggtggtgggcagggccttggggagtgtgagatgggaaggtggtgcctcagctcagccgccctctccctgcagcacgagttccgactgggcggtgggctgaaccctgggcttgtccgtgccctggccatcagccccagtggccgtagtgtcgtggccggcttctcctcaggcttcatggtgctcctggacacccgcacaggcctggttctgcgaggctggccagcccacgagggggacattctgcagatcaaggtgacgggccgggtctccctccccttgctgcccaacccccgcccctgtccagccatcacccctgcttagggtctgcctgcccgggttcaggctcgaactggtctgtcttatatacctggtccaggactaactgggcagggagggtagccctctcggtccaccttgggagccagttgcactgcaggggtctcagcaggaggcaggccatgggggcgggagccacggggcagtggggcgggagctatggggcagggctgaccctgttgctcatggcgatgttctaatgagtaacccttgtccatatttgtcttgcttggaggatcaggggtcaggccctgtccgtgacctagttcaggttaaataaagctgagctgggaggctgtttactgcctgtagaccgctgagcagagtccatggccctgccgggctgccctggctgggggcaggagcacgcctgggcatggggatcctgtccccgtctccttcccctccccctccctccattctcagtcacaggcctcggggagctgctcagggaggcccaggaggggaggaacagggcttcgtgtgggaggatttctgcaggcagctgggactttcctccccagcttggctggaggccaggagtcttgcattgccctgctgacagcaggctgtcgctggctccctccagagccccagggaaccctcagctcaaggtgcccccaaattctaactttccaagaaagtgtcaggagggctctggggtcagcctgggtgttaatcccagctctgctgcttgctggccccatgaccttggtatggttacttcacttctctgagcctcacttttcctgtttgtgaaatggggacaatggcagcatccaccgcatagggttgttacgaaggtcaaggtcgtcacgtgcacgcctggcaccatgcctgtgcgtagttctcaagttagagtgacgactgggttacggatgctgagcgtattaaaatgaaccaacgtgaatatggtgtgtgtgggagggtggcggcttgtcacccacccaggacggcctgtctccctggagagaaactgcggagggaactgggaaggccttggggcccaagggtatgcagaaggacccaggctcctgctgaggctctcctctcccgggacaggcggtggagggcagcgtcctggtcagctcctcctctgaccattccttgaccgtctggaaggagctggagcagaagcccacccatcactacaagtcagcatccgaccccatccacacctttgacctgtacggcagcgaggtggtcactggcaccgtgtccaacaagattggcgtctgctccctgcttgagccaccctcgcaggccaccacgaagctcagctctgagaacttccgcggcacgctcaccagcctggccttgctgcccactaaacgccacctcctgctgggctcagacaacggggttatccgcctcctggcatagactgaggcaggagctggccgggcaagggtgggaagacatctgcgggcgcgtgtccactcaccctgttccctgagcagcagctccctccagggaggccctgggtcccacgccctgggtgcccacatggcctgccaactagggcctgcaaatggagtgggggagtcctggcccctgaatcaccagagccaccaagcctgccagaggggtctcattcatggcttggggacacagggctcctagcaagcaggaagttaagagcaggaggaagcgttgctaccttcacttctccccagctctgccctctgggtccacatgaggacagggaagctcgggaaggggaagggagactggccctgcccagccggtctctagcccctcagcccccgctgggcactctctgtcccatccctctaggacagggaagctggcctggtccagggcactgatggtgcttggattccagcctaaggaaggctggccgtggtccaggagttaagggcttgggtctggggtttaagtggccacccatccaggccctggccagtgtgggaccgggacgggaaggaagaaggaggctaggagcagggggaaaaggtgcacttggccagtggcgcctgccaggagtgagtccatgcgttgtctgcccacccctaccacagtgtttgtgccttcagctgagggggcagcctctgggccctgaacccctgctggggctccacgaccctgagagaaggggtgagaagaatcatctctgcacctcgggtctctgccagaggaagacttaagcatccctgcgacctcacattctagacagagatgaggtccaggggttggcccctgctgccttctcacaatttgcaatagat

SEQ ID NO: 64119 - DNA, 1230 bp, Homo sapiens
actaagaaatacagaattagccaggcgtggtggtgcatgcctgtaatcccagctattcgggaggctgaagcaggagaatcgcttgaacctgggaggtggaggttgcggtgagccgagatcctgccactgcactccagcctggtcaacgagagcgaaactccgtctcaaaaaataaacaacaaaaaatcccaaaaagacggtcttattttggtcctcaccatgcatgtgagaagagtgagggacttgtgccaccgttttacaaggtaaggccaagcctggtggagttacgggaaatgccgaggtcctttggcaagaggtagcctggattcagacacagatctgattcacagcgcagggccttgtagaatgagaacgtttttgatttggtatctccctcctattcaccaaaacaccctcagtgcatgaaatgcatgaaatatgaaacaccagaaactaaaaagggggagaagccagggcggatgtcccagctgcaggagtgggagccgctgctcgtgtgtttggggtctgttctgattctggagcctgcttcttccccttggcaatcatgacccaggacttggcgttatctgtgatcgcgtgggtaggattccctggcgggcgtggggatgtgagatgggaacagagctttctgtccctgccacaggaacatggcgctgctctgggggctcctggtgctcagctggtcctgcctgcaaggcccctgctccgtggtgaggctgggctgaagtcaaggtggggtggggtggagggggaagaagaggggcgttggcatggagggagggcttggctccgaggggacctcctatcctcatccctttctccacagttctcccctgtgagcgccatggagcccttgggccggcaggtactggggagtgaggagcctgtgatggggggaaggtcccgggggtctcactggtggcttgggcagggtggggggcctgtgggaagggtcggtctccatctgcttgctcctttccgcagctaactagcgggccgaaccaggagcaggtgtccccacttaccctcctcaagttgggcaaccaggtacaaccaggtggggctggggaagagtgggcggggctagagggaggagggcccatcggcaggggtcggggggtgggggcgcgtgctgaggctgaggctctggagtccagaggccagaagggagagagggtggggaggaccgaaggtgggcgccaggcccca

SEQ ID NO: 64120 - DNA, 3259 bp, Homo sapiens
agtgctgggataacaagcgtgagccactgcgcccagctttgtttgcatttttaggtgagatggggtttcaccacgttggccaggctggtcttgaactcctgacctcaggtgatgcacctgcctcagtctcccaaagtgctggattacaggcgttagcccctgcgcccggcccctgaaggaaaatctaaaggaagaggaaggtgtgcaaatgtgtgcgccttaggcgtaatggatggtggtgcagcagtgggttaaagttaacacgagacagtgatgcaatcacagaatccaaattgagtgcaggtcgctttaagaaaggagtagctgtaatctgaagcctgctggacgctggattagaaggcagcaaaaaaagctctgtgctggctggagccccctcagtgtgcaggcttagagggactaggctgggtgtggagctgcagcgtatccacaggtaaagcagctccctggctgctctgatgccagggacggcgggagaggctcccctgggctggggggacaggggagaggcaggggcactccagggagcagaaaagaggggtgcaagggagaggaaatgcggagacagcagcccctgcaatttgggcaaaagggtgagtggatgagagagggcagagggagctggggggacaaggccgaaggccaggacccagtgatccccaaatcccactgcaccgacggaagaggctggaaaggcttttgaatgaagtgagtgggaaacagcggaggggcggtcatggggaggaaaggggagctaagctgctgggtcgggtctgagcagcaccccaagactggagcccgaggcaaggaggctcacgggagctgcttccaccaagggcagtcaggaaggcggccgccctgcagcccagccctggcccctgctccctcggctccctgctactttttcaaaatcagctggtgctgactgttaaggcaatttcccagcaccaccaaaccgctggcctcggcgccctggctgagggctgggatggaggacagctgggtccttctagccagcccccacccactctctttggctacgtgagtcaaggctgggcgaccaatgaggttgtggcctccggcaaacaatgaccactatttaggccggcaggtgtatagggcatgggggcccagctgccagtgctggagacaagggccgtccgagatgaaccctttctgctgcctgccaagccactgggaggggtaggtctcagcaggattcccagaaaccccgcccctgtccagcctaggccccccacccggtgttagctaacccaacgttagcccccaggttccgtggggttggagggcagggagtcctattcttggggctgctgcttctggggtgtggggaagtgcaactccacggcaccctgggctgactcattcagcttctaaagcttcaggaaacattgtttggggctgggtcaccatgggtgggccagagaggacccctcaatcccctccggagagccaggggagggggaggtgcccttccccatgctatctccgaggcccactgccatgtggctgaaggctgtgcggttctgggaagagggggaggtggcggtggaggctgtttgtctcctaactgggcttaatctgaaacacatgtattggcttgagttgatccgcctcacgtggaggcaagatcacaaaagcttctgtgtttcttgatgtgggcaattgtcagaaaataaggcctgaccttggcccagcagggagggtatctacctctccctgagccctcccccgcctgctaggacgagagcggggcttggatactgccctttggacaggatggcatcattgtctgtggctgcagccagccagcggtcgcctgctcagcccatgagcaaccactgtggacagggtattgcgtgtgtgctgaggggcgtccatgcagacccccacgcttgccctctcactgcccttgtagggttttcaatcatctctcctcttcccttatccagatggcttgaagtggaggattcagacttgccgttaatactctgggtccctgtgtctagctcggggccacctttggacccatgtcccttccctgccaggctccctcacctcacctcagcctacccacattgtgacaatcatctaccacctgatctggggtttgggcttagattctgtaggcaccaagactaaagtcgctccttcaagtccatttgaattgtgactttagtttccttaaatactatgccaggataatggccagggatggtggctcacgcctgtactcctggcactttgggatgctggtggatcacctgagatcaggattccaggccagcctggccaacacggtgaaaccccatctctactaaaacataaaaattaaccaggtgtggtggcgggcacctgtaatcccagctactcaggagactgaggcaggagaattgcttgaacccgggaggtggaagttgcactgagctgagatcgcgccactgcactttagcctgggcgacaagagtgaaactctgtctcaaaaacaaaaaaaactatgccgggatgagcctgtctcctcccttaatttcttacttgggccagaggaactagaactaacaacttctcttctagccttgcctcctgtgtacctcactgaatttttggtctctaataaaccagtctgcagaggctcaggggaggcaggctcctggcagctgggtggggctggccccagccgggtggagaccagctgtaggcctggatggtggtgaggcctctgtcttgcgctgcagaaagcttttcctgttgtctacacgaaagttttctccctgcatgtcagggcagccacgtgcaagagcagctggctgggaacgcagaggtctgcggctcgaggcggggtttagaaagaaaaccaggctgcttcctgctgcccgtcctgccttaagctgagtaaactcaaaggcaatcttctttcatgcctcacgatattgtccagtggattatctgatttaatttgaaggacgagagccaacaatcacacaacgtcctcccaaattttctgatccactttgttctgggaagtcaaaaagtgtgtgtgctgtgtgggtggatgtttgtgtatataaatggataatgaaggatgatgtgttgggggccagggcaggggagacaacgctgttcagattctacatttttttttccttttttttttttttttgagatggagtcttgctctgttgcccagcctggagtgcagtggcgcgatctcagctcactg

SEQ ID NO: 64121 - DNA, 555 bp, Homo sapiens
tatgacctgtaccgggtgcgatccagcacgagccccacgaccaacgtgctcctgtctcctctcagtgtggccacggccctctcggccctctcgctgggtgagtgctcagatgcaggaagccccaggcagacctggagaggccccctgtggcctctgcgtaaacgtggctgagtttattgacatttcagttcagcgaggggtgaagtagcaccaggggcctggcctgggggtcccagctgtgtaagcaggagctcaggggctgcacacacacgattccccagctccccgaaaggggctgggcaccactgacatggcgcttggcctcagggttcgcttattgacacagtgacttcaaggcacattcttgcattccttaaccaagctggtgctagcctaggttcctgggatgtaactgcaaacaagcaggtgtgggcttgccctcaccgaggacacagctgggttcacaggggaactaataccagctcactacagaatagtctttttttttttttttttttctttctgagacggagtctcgctttgtcgccaaggctg

SEQ ID NO: 64122 - DNA, 788 bp, Homo sapiens
cccacctcggcctcccaaaatgctgggattaccatgtccaactttccacttcttgtttgaccaaggatggatggcagacatcagaaggggcttggaaagggaggtgtcaaagaccttgcccagcatggagtctgggtcacagctgggggaggatctgggaactgtgcttgcctgaagcttacctgcttgtcatcaaatccaaggcaaggcgtgaatgtctatagagtgagagacttgtggagacagaagagcagagagggaggaagaatgaacactgggtctgtttggggctttcccagcttttgagtcagacaagatttatttatttatttaagatggagtctcattctgttgcccaggctggagtgcagtggtgccatcttggctcactacagcctccccacctcccaggttcaagtgcttctcctgcctcagcctcccgagtagttgggattacaggcgcccgccaccacacccagctaatttttgtattttcagtagagatggggtttcgccatgctggccaggctgttctcgaaaactcctgacctcagatgatccacccgcctcggcctcccacagtgctgggattacaggcgtgagccactgcgctggccaaatcagacaaggtttaaatcccagctctgcctgtactagctgaggaactctgcacacatttcataacctttctgggcctacgttctcacctttaacgtgaggataatatatctacttcatagacacctttttatgttgtctccaagttttctaacagctctagttctgta

SEQ ID NO: 64123 - DNA, 1674 bp, Homo sapiens
agcgttatgtttgttagcaaaacagaaggcaaagatctctcctaaagaggaaataaagaagtttcaacatgcttttaaaaacaccatagaaaaaaagtaatacccagaagagcctaggaaaggaacagtgtgtgccctgtgaagtgggaaagggactcacccgttgaaaaagatctgggccaatttgaagagctcatggcccatttcaacactggacggcccgtggcgaacctccaccacgtagagactcctctgtagatgggtggctgacttttgccagtctcctgtgagaagagaaaaatcttgttccagaaaagaaccactgtcaactgtggatgcatattttcagggggaggaaatggaacgagagggggagcaccctcagtttacagagcggggggtaaccaggcagacaaggccggggccacggcgaagtgcccacagcagactgttcccgacgcagaacgtgaaggctcatgctgtacctaaggcagcacaggcccgggccaggccatccgcgatctctcccaccacggcgtgctctgcccacaggaagctctcggcgtcacgctggcaccccgacagccgctgaacagctcgctctgtcaatgcagaggaaagacgtctcactatagacagaagcccagtcctaggaatgagaatccaggtctcaaatcctctgaatcagctgggctgaatgtggaaattccccctggcctccctgggttgtcaccaacgcacaatgtctgttccaataaagctgctgttttcttctgttttctctgtcagtggagaaaggcgctaggggaggcctccccacatttacactgtattttcaacattaacttcccaactcgaccaactctacctttcacgtacggccatgatttctcttgaccctgaaatctaagctaaaggtcaactttcataaagcagggtaaataaaaatcccatgatgtcaagctctaaggcagggttttcaagggcaatggggagctccgcaagtctcagacaaaagcaagacactcctatcagctgggctcacgccccactgctctctagcagagactagctctgaggagggaagaaccgcccttctaggaagttacatcactaggccctggaattaaaataaatgacactcaacttctggaactgcacacagctcacggatgtcagcgatgacccgttagttggcaggggtacttcaacttagcaatcagatgcagaagaaaacaacagctgaaatcacctggccccttttcaagggccccacagtaacaaagctggtcagggtttggactcactggcctatatagccatcttgtggctggcatggggataattacatccaattctcccatcagtactgagtatccctgagtccaaaacggtatcagaacaaataaaagggaaggggctggaggaccaaagcagggagccagtctcacctagttcaccatctctgagaagcttctgggccactctgacctgctgctgtaggtcctgtaaccgagagaccaggtggtccctgctgacggcggattctgcacaagatctgctgccacagcgcagcacgtcatctccctgtggaagtcagttttctctttattccaatgccagggtcagttatcaacaccgcctgtgcttacattacaggactgctccatagtt

SEQ ID NO: 64124 - DNA, 2121 bp, Homo sapiens
ggtcttgaacccctggcctccaagtgatctgtccacctcagcctcccaaagtgctgggataataggcatgtgtcactgtgcccagcctatcctgggacttttcaatgactgacttcagcaaataaattcccagtctcccccagatcccaaaccagttcagatgggatcttctgtcctttataaaggaaacattactaaattgaacctttccctgtggtttctctggaggggaactagtgtatggggatgactggctaaaatggaggtgatattactggtctcagcacttacaagtccctgatggcttcctcctaaacactgatcacccttggggtggaaaactgacctccaggaaaagtggaggagacagaagagagaattacctgcatgggcgctccgcaactgttgcaacagaatgcttcccacctgggccctgcagccatcctgtgtgcctcagtttgacaagctggacaggcgcagtcaaagaaatactgagacctcagcttctgctgcctttcggcaacccccatccggctcttgtgaggccctggagggagatcaccgtcagccaatattgaaagcaagagagagtcaaacactacgtaaaaaccttcagcttagcagagggtctggacaattacctatcatgtgacagctaacctttacccaaatatttgtggaactggatactaaaataagcttccaagttgctgagacaggaagaaagagaagccaagaagttgttcctagcccattttcagaataggaagtttatagtgattaaacagcgagacatagtttagccgcaatagggccctagcacgaaggccattccttccatcctcccttccttgtttttggcctaagtgttcactgcctcttccaggaagcagacagtagacaggtgaagtcacatgcctggtggcttgctgacttgcgtccccgtccttttctgttggagaagggcaggatggcagtgcggagggatggctcaccatagcagtggagaatctcttgcccctttctaatccgctgtgacgcccggatggtggcgacagtgctaatgaaggacacgctggtgttggggctacaggagtggttcaggaggctgataacagggaagatgcctgtggcaaggcgcacctgcctgctgtcggtaacgatgctccctttaggtcctgaaagggcaagaggaaagaaggaaaaaggtgtcagcacatgagccctggccttgccctctgttcctcagaagatgagctgggcagctaggcctgcagcccgtgtgagtcatggctccacagccagatccaatataaatcagatgggacatgactcacggcaagctccagtccccaggaagcaaagtggatgaacgcacacaaagtccactggagtcctggaacctaacgactgtgtctctacaccacgaaatagccaaagataagaacttataaagaagtaataaaaaagggatgataagtagggagcgttctagatagtttcataatgttctcacatagaaaccagagcccctgttgaggtgacttcccaaagacttttagagcccaagggcttttgtttatctggtctttggttggttaacagaacaagcgacctagttactaccccaaactttatatatttaagcaggccaggcaccagggctcctgcctgaaatcccgaggctcacgcagaagaattgcttgagcccaggagttcaaggccagcctggacaacacagctagatttggtctctaaaaaaaaaaaattaaaatattagccagctgtggtggtgcacacctgtagtcccagctactcaggaggctgaggtgggaggatcagttgagccctagagagcgaggctgcagtgagccaggattgcaccactgcactccagcctgggtgacagagcaggccctgtctgaagaaaaataaataaaaatttaaaaaaagttttactctaattgtaacatttattatttttttcttttttggtcttttcaggcccatagtttactttaaaattttgttcattttggccgggcgcggtggctcacgcctgtaatcccagtactttgggaggccgaggcgggcagatcacaaggtcaggagatcgagacc

SEQ ID NO: 64125 - DNA, 1058 bp, Homo sapiens
tttttttgagtcagggtctcactctgtcacccagggtagtgcagagaccagcctggccaacatggcgaaaacccatctctactaaaaatacaaaaattagctgggcgtggtgccgcatacctgtaatcccagctactcaggagactaaggtgggaggatcgcttgaacccgggaggcaaatgttgcagtgatcacagctcactgaagcctggaactcccgggctcagtgaccctcctgcctcagcctcctgactggctgggactgatatgggaggggggcagggaactgctgtgtagagaaaggcgggtccctgggtagggcttcacccttgggcctgtgtccactgacccaggtgaggacaagcactcccgccttcgcgcccaaatgttgcattttccaagaccaccctggtttgccacgccccccagcctgggcctataaaaacccaagaccctagcaggcagacacataagcagctggatgttgtcaggagtatgccggcggaagagcagccgacaggcatcggcatgccatcgaccagtgcagaaggacacggactttggccagagcagctggtaaagaggtgggcctctgagtggcctgactccaggggaaaaccatctcccttctggctcccaacctgctgagagctacttctactcaataaaaccttgcactcattcttaaagcccacgtgtgatccgattcttccagcacaccaaggcaagaacccgggatacaggaagccctctgtccttgcgacaaggtggagagtttaactgagctggttaacacaagccgcgtatagacagcaaactaaaagagcaccctgtaacacacgcccactggggcttcaactgtaaacattcatccctagacactgccctggggtcggagccccgcagcctgcccatctatatgctcccctagaggtttgagtagcagggcacggaggaagcgagccacacctccatcgcacgccctgcgaggggaacaagggaactttttccgtttcaggaccacagatgcatgccaccactagtcaggctaatttaaa

SEQ ID NO: 64126 - DNA, 1264 bp, Homo sapiens
actttcaatccagcctccaacactgagacagaagtcagtgctctgcccttaaattcatcaacgctactccaagcataccaggaagcccaggacaaaaccatccttacttgacccttgtctgactttctaattctcaggtgtcacttactcctctgcatgcacccttgcatactgaacaactcattgctatccccggcttgccaggctatttcaactctccaatgttttggcataggctactcatgctttccggaccaaccctaccctggcttatggagtccacctggaaaattcccacacgttcttcgactcggctcaaatggcacctcctccgggacggcgtccctgatttcccagctgtgattccaacacccttggggcctgtaccacgtctacctggaggtggggttactgacggcataaagtgcccccacacactgtcctcttctctaaggacgggggccgggtctgattccctttcggagaccccccacccccaccccccaccgccacggtgccaagctcagggcttggaggcgggaagtcagccccgcgttgctggacgaatcgggtcactactgcgactctatttagcagcggaggtctcaaggaacagctttaacctcctctgggataccaacccgtgcactcgccagagaccgaggcgagaacgcctcgagaaccgctcagacgcgcccggaactgcgccctggtctccctcccagcgcccgcgcagctcctggcgcgccccttggcgccccgctccgccccgcaccgcgtccggcgtcccgcgccaggcctcgcttgggaccatgggtgggtcacgtgggccgcgcctcggccaatgcggcggctgcgtagcgcccgggcccgcccctgagccgcgcgcacgtcgggggcgggagcggtgcgcgcaacttctcgggccaataactgcgcagcgcgcgggacccgggtggggaagctggagctgttgcggggtccgcggggaagtcttggcggtggagccatggtcggccaactgagcgagggggccattgcggtgaggaggtgccgggggctgggccggcggtccggggtggctgcggccccgagcctcgcggagtagagagggggaggggagcccggggcgacgggggatgaacgcgaggggaggagatggcggggggcggtggggacccgccgggcgtccctctagtgtcatcgccccctcctcaaagcattctttcgatcgtctttaaaacatgctcacatttttcctacg

SEQ ID NO: 64127 - DNA, 801 bp, Homo sapiens
taaatattgccctaggcctgtttcttcagctcccttgccactaacctcattcaggcctctgtcattttgtctcttctcttggtctccctgcctccagtcatgttcccattaaattccttctttttaaaatgcagacattgtgatatgctcatcaagtatgtattgagcaacaactgtgggccatttgcttcattaagcactgagggatacctgtctttattgacagtacagtctagtaggagcgagagagaataataaaataatcactaatgaacatataattaagacggagcagagtgttctgaaggaaagaaatcaaggctgtaggaaagactagaacaaagcaacctgatctcaactagagattaaggaagtgtctcttgaagtgatgtttgagacgagagctaaaaaatgagtattagatgaggcaaaatgagaaggaacacaacaccgcaatctcagagcatcacggacaaaggccttgtggcaagagggactgtcccatgtggtggaactgaaagaaaacaggaaggccagagggcagagggcagagggcaggcagcggcacgggaggggggttagcaaggccaggccaggcaagccatggcccaggtttttctttgtggcctaaggtcattgggaagttatcacaacgttttaattagagttaaaaagcaaaagaactgtaagttcttaaaaatgggtcattattacattttttaaaatatctattgtcataattggttttcactgggaaaaagtcattgttgagataagtatgtgtttctgaaaacagttcat

SEQ ID NO: 64128 - DNA, 621 bp, Homo sapiens
gggccaagctctggggatccattgttgcaggagccagttcccttctgggtgggaattatgaagcccacagaattttttgaggtgtggctgttaagcttttctatgtcctgggagttttgcatgaggcaaaggccagcctgaccatctcaaggaagaatgagtctactcatgtattatgaaggcccattgggggccgtcagcttgtcattcagtggaactgctggtatttgatgagcaagtgaggcaatccccaaagtatttacttagaagcaaagtagtagcagagtaaagttcagtgccctttctttcggtgtttagctgctaaccttcattcattagccaatatgacctccaagaagcacctgcagctatgctgtgttctggccacagacacaccagagaggactagtttctgccagctttcagatctctctgggccaacaccgtcattgctgagggcaggctcggggtcccaaggaaaaggtcccgcaagcgggaagaacattccatttcaaaaggcttctggttcctccttctggggggagcatggctgctcttgctgactagtgtccctgacagaagctgtaatcgggtctctggctttagggataccatagctcc

SEQ ID NO: 64129 - DNA, 685 bp, Homo sapiens
attgactttccatctctccgcactgagtgtatgttgactccgtgaggacggtggttttgcctgctgtgttctccgcagtaccctcagggcccagaacactggcatccagcaggtgacctgtcacaatggctggatgaaggaagaatctttctgagtcagcagggggactgagagatgctgctcaggaagccctaggcccagggcctggctcctagcaggcgctccataaacagaggggcgcttacccaaagcgaggagactcagagcctccagggtgagagcagagactaggccctggctctatctggaggcttcctggtcaatcacggggtgaccacacggtgaggagagctctgggaaggaggatccagccccaggccagccagaggcccagggcagggtgaccagggcaggtttgcctgggacagaggggttttccaggatgtgtgggactttcagtgctaaaaccaggacagtcccaaacaaaccaaccaaccaggacaggtcagtcatccaggtcattcaggtcaggcaaatccaagcctgtgcctccctcaacaaaaacctctgaatgcaggaaggggaggggcacacaggcaggcacaaggcacgtgtcttctcaaacaccatgcgtcccgctcagtccctgcagccaggaggccggcctgggcccagactgagcctg

SEQ ID NO: 64130 - DNA, 4261 bp, Homo sapiens
cctgggaccatgctcagagcccacagtgatggaatgagcctctcaggccccagcagcccactgagctctcactgcaaaaggtaggcatggggccgagtgcaggggctcacacctgtaatcccagcactttgggaggccaagggaggccaaggcgggtggatcacctgaggacaggagtttgagaccggcctggccaacatggtgaaacaccgtctctactaaaaatacaaaaattagccgggcatggtggtaggtgcctgtaaccccagctactcgggaagctgaggcaggaaaatcacttaaactcgggaggcggaggttgcagtgagccgagattgcgccattgcactacagcctgggtgacaagagtgaaactctgtctcaaaaaaaaaaaaaaaaaaaagataggcatggcaggggaacctctacagccaggagggcctaagcttggctctggaaagacctttgtcctttgctcactctcctcgtccttacaggctcataccccagatgagggagctgactctcactgtcgccggaagtcccacctgccagaaggcgtagaacaacatggttctgcctggcactgcgtgctgaagaaatacccctggatcattatcatccccctcagatggctcgctgcaagatctaccatcaaaggtaaacaagtccttatcttcttgctaattggttcgaatcgattgactttataagtgggtctaatgtgcaactggtgagagatggcctatgtgccgagcaacccatgcacttaactagctgtcgctcaagcacggaacaaggcatattaacccaaatttctcagaccgccttctcctgagaggctgcagagccagcgtctcccctgttgggctcatatttgctgggtcaacaggcccgcttagaggcacctggatgctgttaggcgggtggcgataacactggtgtaggttccttggcgaggtgagggcgtgctgagcctgtgacaagcatccctgggccctgccctgccctggctcaggctgcctggcaggagaagggactgaatcccaagtgttggcaggggaggagcaggaaggcaattttcccggtactctcatcatctgccttccatgtgccttttgatgtgtttccttactcggctttctcccaggaaagcttgaatctgtctcattgaacccatctctgaggccaggtcactgctgctttccaggtgagagctgatgttcagtcttttatcactgccagtgtctgaaatagtccagaaactggtaaagacaacagacaccaggagatgacctaaaaatcttgggcagagtacgggtgaacagcagctctccccacctcccctcccccccggcccaaggtccccctgcagagggctggctgctgccctccccctgagaagcggccagctacccccaacttttttctgctctattaataaacctcagctgagatccttgtgacccccctcttccggatgtgatcctcgctgccttgccttatcagccttgcttttcacaagctcttaaattcatgagaaaagggaaaaagtgaaatcagatagaaatgcaggtctgtttgctgttttctccaatgaaatggttctgggtaaacagcagacgcctttgatgaaatcccagcaggcttaaacaataaagctggttacaaactcaatctggcggagatatcagatctgaaattgtttcaaaaaacatgtcaacattttctaatgctcctaaaaaaaaccttcctgggctgcccactgtggagtctgggtctcggagacaggacgggggccaccccagcctctgcccaggccagctgggactctgtgcacaaagaacccaggagcaggctattcctggttgctgggggccctgccagctgcagatgtgtaaatggccacttcagtcataacccaagccaggcaggggaccagccacccttgtgtacaccactgcaccatcccccgcaaccaacctggcctccccgccttcccccttaactatcttccattctccacactgcagccagcagaggcttttaaaaatgtaaatcagatcatgtcattcctttgcttaaaacctctaatgcattcacactgcacttagaacaaaatccaaactcctccgtggcccacgagaccttcagggatctgccgctcactacctgcttcttcactcacgacaatcaacctcactggccttcctcgcaaattatttcctgcctctgggcctttgcacttcctacagactttgtctgggatgctttttccccaacccatcgtcctcagccagctccaggaccagcccagctgatgtggctcctctcccggccaagtacaatatcacattaacagttttattctctacactgagtccaaccacgatctgaaatcatcgcatgtgtttacttattaactgtcgctctctggaatgcgatccctctgcaggtctgaacttgtctgtctggtagtcgacaagtatgactggcccatagtaggtgctcaatcataaaccactgcatgaatgagcagtgaggatgtcaccgtcccctctaggtattccccaggcaatgcccaggaaatcgggagcaccaccagcacactaaggtatcctactccaaggtacaggaacacctcgccagcctccctctagggcacccctagctgcccctgccccacccaggcctcatccaagcccctgctggctttaaaccactaggactcggaggtcaggcctgagccggggctgggaggtccccgcccccttcacagccctcctactcgggcctgcatccccgcagacccccgaccccagctgacgccctctgagaagggaggtgacaagggcaggccggcaggggccggcgcgctcctcgcaggccttctggggaaagcgtgggcgcaggtgccttcggttgggctcctgggtctggggcctgggggcgggcagcgatgtccccctcagggtgccgggcgccccacccccacccccgcctccgccccaggccgcgatcgatcccggcctctcccggcctcattaccgagggagagctgccggggctggcaggggagccagacggcggcggagggggcggggaggcctccttggctccctggcccggattaaatatttactatgttttgtttggcctttgggggaggggcggggagggctgtcgcattgatccggagctgcagggcgagggcggtgcccagacccggcgccccaaggcctcccgcaggccgacccgagccgagcgcgccctttgggcaccggccccgcccgggagggtcttctcgctctagagccgggggcccgcgctgagagatcggggttaccgcgcggggagccgcggccgcgctgggatccgttccctctcgcgggagccgccggccggggatctgcgcaccccacgcgccccgctcgggtcgggcctcccctccccgcggctgcccccgggccggccaccgctgcccagcgcgcaggtccctgccggatccccggcggctttcctgcccccactttacagacgtgaacgctgaggcggagggtgggggacgtggggccggctcgcctcctcctgggctcgccgggatgtggcctccgaggtcgccgcggcgctttcctgcccaagctggcgctgccggagcgcccgggccccgctcccctcacgggcctcgcagcacagacggggacaggggcggcctcgcgcgcacggggaccccggggtgggggtgggggtggggctctgcgagggccctaaaaacgctggggacgcgggtttgacgcactttcccggcagccgaagacgaccccggagcccctttattctctacgcgctcatcccacgcgcagaacagacacaggccctgccctcaccgagggttccagtcggctgtgcacaactgaagagctgctcccccttccctgcacgatgccatcctctcacacacagggcggggaccactccacagccccttacagcgatgttcactcgccccagagagctgctcacgccagtctacaccagacacatgcgcgatcacacacacacacacacacacacgctgcactgaatgtgtgctcatcatacacacacacacacacacacaccggccgggcgcggtggctcacggctgtaatctcagcactttgggaggcggaggcgggcggatcacgagatcaagagttggagaccatcctggccaacatggtgaaaccccgtctctaccaagaatacaaaaattagccgg

SEQ ID NO: 64131 - DNA, 2765 bp, Homo sapiens
ccccatcctgctgtgaggtcagaatcctgtgcttacgacacctcggtctgttgccatggaaacaggggcggattaaggctggagcgtggagcgcagggatcaggcccctcggctacctgagctcccgcctcagccgctcccgcagggccggggcagccagccgcaggcgccgcggcttctcagcctcctggccgggccaggcgcgggggggatcccggcggggcgccacagcctgctcgggcctgggaggggagaggcagacgcagaggctggaacagctggtggcggggcccgtgggctcccggcgtgatcacctgccctcccagggcccgggggacggcgccccgcgtggcaaccacgtgggggcgcggcgggacttccccggtgcccgcaccaactttgccgcgctccgtaccgggccgggctgctggggcgtctagctacggtggtcgcgaagccagctgtcctcaagttgagctgtgcaccggtcgcgcacactggcggcacggctttcgcgtccctccgctcccagcataatgaaagtttgaggaactggacatcaggcgctggccgctccccaccctcagccgctgggtgcccagagcccatccctagcgatcagagcagaactgcagagaagacgtccgcgtccgggccccgtctggggagctagggcgcgcggggagcgcccgggccgcgcggtcactgaccgctggctgcacgggggcgccgtgcggactcggcctccacaaagcggcagaagcaagggcgtgtgcccgcgcagggaatggaggctgcaagtgcaaaactttatcccagcaaagcaaaggtcccaggaggccggctccccttccaccaccggccgctcactctggtctccgactgacccctccgggccggatctctaggcctggccactcgatccatggagaaaaccccgtgtctcacaactggccgctgacgggagctgagccccagcagcagcccctcggcgggtgcgcccggcaaaacccaccagcccgccgggggctacttcccagaccgggagccccggcgccgggcggcgcccgggctcgcggctctttccggagcgcattcaacttcaacttgcccctgcggctccaactcacctttgcgaagcatgttggccacggggccgccgctccgaggtcggcctaggcgcactccctcccggggtccagattcaaatccctgggcgccagctgcagctaatccgagcgcgtcgaggcgggggcaagccggggatccgctcgtgcccggtggcccggccccgcaggggcatggtgagctccagccccgcgccgagggcaccggcgcccgcaagcaaccgtggtgctgcccggcagccccgcgcgcttgctcagccccggggcgagcggcttgctccgcggagccggcggcctgcttctgccacccggagcacttcgcaggcggttttgaggggggacgccgccccctggccggccggccgcagccccctcctctccgccccctcggaccaccgccgccgcggctgcagcaaaagggcgctcgcacgcaccgccgagctccggggaaagcgcccggcgcgcgtttgcaggaccgagcgatcggcggagcggggcgcctcccttcctccccccggcttccccctcctctcctcctccctccctcccttgctctctagctccctccctctcgctccgctccccgcccccgctcacggagcgcctcccatacaaaatttatgaaagtgctctcagctcgcagtgccgagcgccgtcctattcccaaggcagcagcgctcagccgcgcggcgccgcctcccaaggtgttttcactgcgcccgcccccggggaagatgctcggcccgcgtccgtccaggcacctgcccccagtccccaagccggtcctcggaccactccacgcccctccccggccccgcaggcctcctggagcccgaacccgcagcccagcccccgcccgctcgcccttcgcggctggaggtcatcgggagacgcggctgggacgcgaggaccgccgcccagagtacggatcgcgagtccgctccctgccccgtctcctccctggccagcgccccttctcccagtctcgacggctcttccccgcactgaacagctccagcgaacccggctgccccgcaccccgagtcccaggacactgttctttcgtggggagaggaggggagcaagcattcggaaagggccagctgcaaattccagggagaaggaaggacccgtgcgggttcgggtgggccgtctccgcctgggtggggtggcggcggggggtctctgatctcccttggtccacacagaccccgccggggggttcgcggaaaatggaggaggcgccgcttggaaagcgggtcccgcaggggcctgttgagctgagggaagagaaggttcgggccaggcgagatcctgggtggaggcggcaccccctgctggcctgggatcagagggattcggagagaagaaaaagcggatggaccaaggctgtcattcaacacacattcaccgaaggctcagcatgtgtggggcactactgttcctgaaaattcagcagacgaaaaagacttgtctttgccctgtcctcaaggagtttccattttaataggggccaaatgaggaaagtccagagaagatgggaagattgtgcttcgaagaaaaacaagcagagtattgttctggagctgacacgggggtagaggtggcagtcaaggaaagctgctctgagcaggtgac

SEQ ID NO: 64132 - DNA, 1201 bp, Homo sapiens
aaggaacatctggtgggtgtccccttcacaagactcggcctgcagagttcgtgcagggagttcgcacataggagagcaccggtccgggagtgccaggctcgtgcccggccggggagaggagtgggagactaagtcgcagggcaagggcaactgcatagtcggggacctctagggaatcctgagtcccggcattctgggctggggtggagcccactacagccccgcccctatctcctcctttatggccccgcccagcgggtatcccccgcccccgctggccgatcggcgatcgatcgcaatgtctgcgctctccgcgttcttccagcgctgtctttttagtaccacatgcgcaggcaggtgatggcggcgctggtcgtatccggggcagcggagcagggcggccgagacggccctggcagaggtgggtgctggaacgctgcgccctccagacctcgcatctcggggcggggcccccaagttagggacaggaccaaccccctttaacggcggcggcgcctttctccgctagatcccgctgttagtcgccttgggccgctgtcaccagctcggggtcgctgtcagccggagcccaggggtaccagtcttttgcagctttagggcacgaccgagagcagcccttaatcctccaatcggaaactacagccttgtcttggcgggtagacggataaaatggactcgacggggagggaaagggccaggccagatgcagcgggcattttacgagtgcgccctcagggaatgctttcagggaagaggcaaaaggtttcattcgccaggcattaactgagcgcccaccgaatgccaggcctgcgctgggtgcaggtactagaatcagagatctcagtctactgggggaatgttaatgtaaacatatcatagccacgtgataaaggaggaggtgcctactggtccctgggacacattgaagggctaatgttagcagttccttacacgccagcgaccactagggacctgtcagaggaggatctgtaatgggcctaggaagcctaggctgattgtccaaggcttttgaaacaactggccaaaaaccatagcagtggtaacgttcaaatctgatctcagggccccagcctccgctggaccatccccaccgccgcccacacagtgggtgaagcctcatgtctgggcgggtccctcctatcatagtgtggggccctag

SEQ ID NO: 64133 - DNA, 1612 bp, Homo sapiens
ccctaggcggccgtggctctgagggacatttcctggcagcagccctacccgatggacttctacgctggcagctccttggggccctggacggtgaaccacggccaggaccgccgtccccacgccccgggccggcccgcgcgggggaaggtaggcgggggcttccaggagggaggagagaccgcgcctgggcactggccgccgccctgcgaccgcgacgggaaacgcacaggagcggagcggagggaaacgcagggtcgcaggagcgagaccctaaccaaagtctgcgacctcaggtgcaggaggggtccgcgcgtcccccttcggccgtggcttgcgaggactgcagctgcagggacgagaaggtggcgccgctggctccttgacgcgctcccgggcctcaggtatcagcccccgctctgggtgcgccccgccttttgccgttgtcatgggaacgccttggcgctccgaggcccgccctcggggcggtgctgacgttcggttccgccccgtgcattgtgcttccgctcggggaaagaccgcttccggtgcttccgtcgctccttgccgggcataatggccgcgcagcgacccctgcgggtcctgtgcctggcgggcttccggcagagcgagcggggcttccgtgagaagaccggggcgctgaggaaggcgctgcggggtcgcgccgagctcgtgtgcctcagcggcccgcacccggtccccgaccccccgggccccgagggcgccagatcagacttcggtgagacaagccccgctccggaaacgcactcagtttcctccatcttgtttcgtccccctcgacacccttcagcatcccccaccctgcgtccacccgcattcctcccacccagtccacacccttcatttctcgcgacccataccctctttgctcaaactgcagcctgtcctcccaggcttccgccttcaccgtcttcctccgctgtctcctgttcaggccaatccactcatttcccccctctcatttcccccagacttttgcctcgattccctttttctctctgtcatctcgaaccctcctgccctttctcatttctttccttcctggagcctcccatgccctaatcccatcctttttcctcatatcgctgtagggtcctgccctccggaggagcagcctcgaggctggtggttttcagagcaggaggccgacgttttctccgcattggaagagcccgccgtctgcaggggcctggaggaatcactggggatggtggcacaggcactgaacaggctggggccttttgacggccttcttggtttcagccaaggggctgcgctagcagcccttgtgtgtgccctgggccaggcaggcgatccccgcttccccttgccacggtttatcctcttggtgtctggtttctgtccccggggcattgggttcaaggaatccatcctgcaaaggcccttgtcattgccttcgctccatgtttttggggacactgacaaagtcatcccctctcaggagagtgtgcaactggccagccaatttcccggagccatcaccctcacccactctggtggccacttcattccagcagctgcaccccagcgtcaggcctacctcaagttcttg

SEQ ID NO: 64134 - DNA, 1057 bp, Homo sapiens
accttggccgggaggacaggacggcctcaggctggccgccagacgcactccgcaggacgcgcgcgctcgagcctcggtggactcagccgccggccccgggaggccgcctccctgcgcagcacctcctgccacccgcgcgggcacgtgggatcttgactcgccgcccccgcctccttctgctccgcgtccccagcccgcggctcggggcgcggcgtggcgcggcgcgtgggcgtgctgcggggcgaccatggctgtagactgttacctccagttcccacagtaacaatcgaaagccacggttgccctggagacgcgggggcggggcgcgcggacggcgccggcgcggggcgggctgacgtcagggccgcgggggggcgggcggggcggcgggggctgaggagcgcgcgtgggccaccgcccctcgcagcccctagggacccggacggggcggcccgatggcggcgcctgcgttgatcagcaccgcggacagcggcggcgcaggcagcgggccgggggcggggccctgagggacggggactgggggtccccgggcgcggcggcggcggccggggccgcggtcctggggcggggccaggcgtcggtggccgtgactggagactgttactgagggcggcccgggcagtaagcagtctagagccaaggtgccggcgcgctgtccgggcggggtgccccggtcgccccggctgccccggctgggggctctgctgctccgcctcccctgcgtctcccgccctgccccgcccggcgctcgcgaccaggcacgcggcccctgacgtcagagggccgtgacgtcaaagatgtcccagagggggcacttccggcgggggcgtgggggcggggcgggacctgggaggccccgcccccccggtcctgagaggacagctccgctcgcagaggcgggaagccgtgggcgccgcgggacccgctggacgggacctgccgggaaggggcgcccgacgccatgcggggcgggggtcccaggagggccggggaagcgggggtgggcgtccgtctctcgcctgcacccccgctcagc

SEQ ID NO: 64135 - DNA, 802 bp, Homo sapiens
ttctacccacctgaatttcctgagcttagatgttccaaacaaagccagataggagtctggtcttccatgggcagagtaagcttgctcttcttgaactgttccttcatggacagaaactattcttttctagagctctcggctccggctgtaccagaaaggtacattctcagcggcaaaagcgtcacagagagcaagctataggcagcagtagctcgggcttcagtccaattctgcttcccctgcagagtgctcttagagcagccacccacattggcaggggttaaggacggatattggcactgccaacacaagcctttcaggtctggctggcttcagctgatctgaaacctggaacacaggcgctggggccctcacttactgaaccagcaggggaggctgcaggctcagcccctggggatgaaagtcctcccgtctgtctcagtctgcaaatatccacacacagtctgtttctacactgccagttagctctgggccagaagcactgaaccttgggctctagtcactctgaaccacactgtttgccttctagacagccacgtccaggaggcctccccttaggtttgtgtttaggctcctttaccaaatttgctcctaattgtatttattctacgcgtggcacaagagtggactctcggagacatctgtagtcttcaacacacttaggcaacatgcagttcagcaacatgtaagtgcctactgtgtgtgtgaggcactgtcctccagaccctggggactcatcacagaacaaaggaaaatccctgtttcacttggggggttgggt

SEQ ID NO: 64136 - DNA, 720 bp, Homo sapiens
aaagtctgcaaatgatcttcatcaggaggtgttggtcaccaataaaaccaaaacaggcaaaaacctcagaacactcattacaaagtctgcaaaattctagtactaagcaatcagggaatgctggctgatttgtaacctgtatttcaaatgcttagaaccagctgggtattgcaatggcgacaagaagctgaattagaaatccctaaaccatcagcaagctctcctcccaccaccagtagaacctggcccaggtgcatttctaaccaaagtcacaggagtgggacacataaatgtttgagtaattccttaaaagaaaagaaaccacaagtaagaatttaagggagtaataaaaaggggtgaacattgaaaagaagggaagaagttaattttttaaatggcatgtgagaaataaaaaggaaatcccctgttcaggcagctctggagttccctaattgcacaagagcaaaggacacccccacggaacatgtatgccttctgaagccattgctcaacctacactcattgtgcaatttcaatcttccaaagttttttgctgcacatatgcaaaccacgttttcctctgcattctagaattaagaacagtttatcattattctcttcactttagagaggggtgtatgcatgagccaaaaaagaaaaaaaaaagtattgctagataagcattcactacaaatgaggttttatattatttcatctggt

SEQ ID NO: 64137 - DNA, 1606 bp, Homo sapiens
agacttcctcctgagaagacatttgtggagcctccccaaaggcctgtccccaggggatgtgatcctcactactctgcagagaagtcagtcacagggtattcctgcctccacacagcacttcgctcccaagctcggtggctactacttccctagcctagtaactgttattacacgtgggaaatgtgaagccgactggactacccctactctttacctggctgaaaacccaactgataagcagagactaagaactccacagtctccaacagcgcaacagggaatcggctttgttttctataaacagacaggcaagaaaaacgttcaggttaaaacgcagtcctcagaggaaggaaaatagaaaccaggcagtggggaatgcttcatattcctacaagtttttttttctaagttaacacatggtgtctgcttctctctagtcacctatttatcactctcctcctcagagaagggaaaaagccctggctgttttcctagtgcagagctttgtggcggaggggggcggggaggaagggggagaaaggagggtgctttaagcatgatgcaaaccatttggagctgagtgagagcactgccaacacaagctgcactatttaaacaagtgaggaaatgatcgtatatacaacatgccagcaagcacacacacacaccaaaggaagtcgagagggcttttttttttcaggacacagagctggatgtcagcggctaaaaggtcgatattttcccttaacacccttctcaatgacttaatcatgttccatttgcacagaaaacttcccaagaataaaaaagtctggagaattaagaggaggggcgaatggggagggatgtttggcctggggctgaccttatccgaggttttctccacgtagcaggggtcctgaggggcagccagcaaggggacaaagcccgagagaagccgatcctcttccaggataagaagggtgaggtcatcatccgggtccttgtacagtggcacctcagactgattcactgcagtcagtatgttacagaaatcagccagcgtcgaccatacatccacagcaacactgtgagaaataaggtaagaaaagagcagctctaaagagggaccagtaaaaaaaagtattctcagtatttgtgagcagggaagtacttgcagcaaatgttgtctaggctggcatctgccaggaaatcataccccaaaaatgctaggaaacaaaactgtgcccaaggcagcaatctgaggtatgtgtatgtggatttatgcaaagttgaaattgattagggggagtttttaatcctcaccagagaggaaaaagaatttggagactcagttgcctaatgcagggtcctgtcatctttccagacagtgtgcctgagacgcttactcaaacactctagacacccagtgcttgtggctgctcccagaattccccactgctgtccagccaagtacatgccacacagacagcaactgagcaccagcctctcctcctccagccacagccatggagggtctagtcacaatacagcaagagtcatgcatgttttcctcctacaatgctttagaaatctcttccctatatataggcaggcaatcaatcaa

SEQ ID NO: 64138 - DNA, 1331 bp, Homo sapiens
attcatgagctagagtggcaagaggcaatatgtaaagagagctgtaagaatcatcctgggcggggtgtggtggctcacgcctgtaatcccagtactttgggaacatgagaagggaggatcacttgaggccaggagttcaagaccagcctgggcaacacagtgagaccctcttgctaaaaacaacaaagaagaatcatcctggaatctccccagtggagttactgcctatgagtcctactagggaggggcctcagatctaagcaatttgtttctcctggagaccaagaatctttgggagatggcagaaaagaaagcattcaagggacatgccaccgaaggtgacagtgggggagaaagtggagcagaggtatgggaactccctgactggctccaggtggaaggaggctgcaatggtttatttactgtaatcattgcactaggaaaaggcaatgaaatgaaacatcttgttttcaagagtgtcctgggaaccagacggaacacagccccattaatcacacaacggcacataatcaacacacgtgtactgcagaagtaactcgcttcacaggctttacccaggaaaaagaacatgtttgggaagaatcaccggagggacgagttttctaaagcctctctcagcgcagacaccgacaaccagactcattcacaaagctccatcttttggctcagccgggtttggctgtcagaaatgtttaaatatggaaaaaaataaacagttgcaacacgtttctgtgcagagatctgcctgagctcctttgtgatgtaatgggaaacgcggcattcaggctaccagctgtagaataaacagaacttcgagggttaaaaggaactgaactttccacgaccccatctgcagagaagaaaataataagaggaatgatgcactgccccacagccctgatagtttatcctccggtcccggctgcagagacaagcaccggatgtgatagggctgctcagggccgcctccgaggttagtgctgcccatgggagacgcacagggaggctcttccagttccccgcttcctcccccagtgccctgctggccacttgagcccgctgcctgagtctgatcccacagcactggtgagctttggccaacaggcactgctcggctgcagagcagcaatttggaaaataaacaggaaagacgacagtgagaaggaagaaggtgaaaagtctcccagctgaattcttggcttgggggccctggttggtgcgtgcaggtcaaggctgctgcaggacatagttgggggttgggggtggtgtgggcagcagcatccccagccagagagaggcggccgaaaatt

SEQ ID NO: 64139 - DNA, 440 bp, Homo sapiens
aagctccactggggcaggactgagaggaggagagagtctgaaaagagtggagcaccaacgcctgaccaagactcagtccatcttcctggcaagtctaaggaggatgaggcactcacacactccttcatattttactgggggaacaagctgactggtgattaacatcaagtacaatgaccccatgttacaagcctgctggggcctgtggaggtggccatttcctgtgtaataccagcttgtttaaacactaacattcaaactccacagctgcagaacaaacccggaaagagttgagtgagaagaagccgtgcattgtgtttcagagctatggaagatcagagaagcagtacagatgggaaacaagttgggtcttctggttcctggagtgaggagatctggaaatacagccaagatggcacagaagctaggcacaaagaagc

SEQ ID NO: 64140 - DNA, 3226 bp, Homo sapiens
tgcactggaaaaggtgccaacagagtttcaaaggaagggaagtgtataactgtttcctttcaaatgcattttccaatgggatccattcagcgaaaaggctggaactaactaaaacattattaaaactgttatggaaagagacagggagatggaaaaagatagacccaaaaaagtgaaatacataagcaagagtgagacagacatacgaggaaaaagaaaggggatctgggcagagagacaggttggacagggaaatggggtgagatggagttttgtctggcagttgctgttcgtggttttatattgctgcagatcaatcgatcaggactgcagtgctgctggcccagtggcacaagacaaaccacagagttggctttacgttcggcacttgcgaactgctgaccttcagttttcaaaccaaaaatattctttggtaaacagtaataccaggttcagtccaaccagtcaagagaaaacaaggactactaacctgaagtagcaccctattcagttacatcaggcaccaacccttcataggcatcaaccggggatgtctgcaaacctgaaaccacaccctaccaaactaactccaggttctgactcaaccaactaggcagtgataaccaggaatgctcaaataagtgacatgtttcaaaattggcttaaccgggacctactcaagcgggaaggccagtccacactcacagagccagaaacacagcaatgctttctgaggtcacatgtgcatgactccagtggaatctgcatgcaatgctcagggcagggtttggcgctgcctcacgaagccattacatttctagacaaagaattaacagtttgtagtgagtgggttatctgttatttcttgctgaattcatctaagctagcatgatgctaaaatttatcgcctaaactgggatacttccgagagtgaaggggtgtgctatgagtaattcataaataggatccatccctgggcaaaccaggacttacagtcaccctggcctaaaccataggatcttttttcttctctgggtcagtattataaaactctacctcagaagaatcttttcaagaggcagaactgctctgctgagtgccaaagcactttctttttgagctcctccaatggagaggtaaacaaatcaattaagttaactacaaaaactaacaagaaagattgagctgacaatcaggattctggagaagctcaaaattccaagcagcagcttcagagaagggaaatgtgccacagatggagctgtggaggctgatccacccggcctctcagcgctaggccctgatgccgcagccagcttcaaacaacagaatgcagggcgggcagacgttggtgcgagtttgctgagttccaggccatcattcttgagggtgtaataaccatgggctgtagcacacatgttgagggatgagggaaaaaaataaacagagagacaaaagaatgaggatgcactgccaatttcaattgtgcagcttttatttttaaatgcttatcaagctgagagagagcagagttcttggaaaacaaggtttccttttttccaatgccagggtaaaacaccctcaaggatgggcactgcacagactgtaacaacaaggaacgtggctttgcatcctcccagcaacaaagtctaccacggatcccaccccactctgatttcggctcagccgagaacttgaaataacgggcccactgcctctggtaaaaactgctcttttaaaattttttattaatctccaaactggctgtgttagaattacagcccattacctaccaactctcttcactaataaaataaatttgtaaaagccctaattactacttttactgaactacactgtttggggatcaagtacaggaagctgagagttcaaccatttgtcagccaggggatgatggggagaggaccgggggacctagagtcactagcaggaacataaggcccagagataagtctcagaacccatgcccaaaaagaaacaaaaggtcactaaccctgtttttgttctcaacagctccacgaggatccatgccatcatggcactttgggaggcctgtcacgagttacacaggcctaggctgcccacaccccagctcagcagaaaaagagaactgcaatccaagtcagacagatcctgcctggactctccgcagagagcctggagagtctgaccagcaaagaaacagcaatcttcctacctaccccactctcaatcccccccaccccaatccaggctcccgaagaagaaaaacaaacaacaacagagcaggcaattgcacaagagctgcagagtgaaggcgaggtggacggcaacggcttctcggctgtgccccgtatctcttcccagaacactgatgacaaagctggagacgttactcacatgctgagccagtcagcccctcacccagggctggtgctgagaagtctgactagaaaccggcagtcaacgctgacacactcatttataataaaaggtgtatattaaacaaactagtcaaatccttaaacaaaaagtaagggcaaaatgtgactgtcattcttaattgtccatgcaaaatcctcccggttaaattccatgtgtctcctggactttgataaatgttatttctcctctcaagaacatgaacagagataccgctgtcgaagtagctctcttggaaagaaacctgataagaaaacctgctatggcaggtgagtgaaacctgtgacggacaccattttgggggatgaccagactggaacataatatttcactgaggcagaggggtctgtggttactttctgcatgccacatgtctagccctaaagaactgaggaatgctctcgacaggaaaaacacagcagccaatgctgcgataccaaagccacaactccacggggccctggagcctctcaaactaagctgccagctagggagctaacactagctttggataaaacacagctctggtacagtaattaatttttttcttaactaggattacattaattttcaaggactaatggagtccagctgtaatgtgaagagtggctgctgatgcacaaaggcacttgtgcgtacattataaacacacacacacgcgcgcgcacacacacacacagacctataaaaaggatctactataacaggatatttttagtttctacaatgctgcactaaaaatacagtcccggctgatacatcatggcagaactattctctctct

SEQ ID NO: 64141 - DNA, 1511 bp, Homo sapiens
gccttgtaaataatgtggcttttacactgagtgaaatgggaagtcagtgaaggattttgaacacagcagactctgtatgtaatgtgtctgtgtgtgcatgtttgggaaggaacgagagaggtaaggggtacaaaaagagaccacttaggagtttcaagactttctttccaagtttaaaaagaagttttatccacaaggggtattcaggccatgtttgcaaacacaggttttctcttccaatgaggaatattgaagaatgtgtcaatggcctacaactgtatccctagcaggcatctgaaaaataatacttacgaaacattttcctctgctcattgccctgacatgagttctgggcatcaccctctctcaggggagaggtgaaaagaggttatgtggaacagacagtgataacaggatgacgtcacaggtgtgcctcaaagaagtccctggtgagctgggctcataactactctgcagtgatttattcgaccctgccagctccagctggagaagagatgcagaaagctgacacagcctaaagccctgggcaggcattataagatctttctccctgcagtcccctgccagctcctcccctctttcaaccactgatccttgcctcagaagccaaagtgtgaacagcacgtgtccggatttcagaaacctgcccagcagttggaaattccctgcagcgtgtcaactgctacatctgctgttggcacttggggcaaagggatcacacgcgcatattttctgaacataagcttcaagatatgagtcttatatttgaagaggggactaaacaagccagaacactccaattacagtaaatgcattcctaaatagacgacaatctgccttctgaaaaggaaactgagacatacaagcaaaccgaatagcactaagaacagcagtagtcaagaacaaaagcacagagaaccctgactaatggaaaggatttcatgggccagcaaggttcaccagatatataatgtgatgtagctgaaacaacagagtactcttttccaaatctctaactcacatctttttgtcaataaatggctcctatcacttcagctgcagcctttcctctccactcctttgatctttcttccccacccaattagccctctaagtgatattctatacactggacacctcttggaaaaatgaaaaaatgtgagcccaatgacaccatttgccataagactgagctgtaaatgggcaggagctggaaaagaaactaatctttggaagagcaaactacatgcccttgccaccctggatgtaggtgcccagtcacactgctcatgggcatcacaggcagagcaaaaaaaaagaaaagaaaagaaagaaagtctgagtaagtctgatggaacaaggaaatcccagcttcctctggtagtacggcagactagacacctagatccattctcccaatcaaacagctcattattctgaaaaaaagagtatgttaaacatctttttgaaaagcattcgtgagctagtaa

SEQ ID NO: 64142 - DNA, 1716 bp, Homo sapiens
aatggaaacaagcccaaaacaggaatcatatgctccagcaagtacatttactgtttgtaggtgtaaggaaaaggggaagaaaagagactgaggttttggatagtgcttcactattttcataagtttaaaaggtaggttcatgaagtatccacaaagataaagcagtttaacccaagaatagctcaccctcggcagtctgtaacttggtggggggcggggggatggggaaagctattcctactactttctagagcagcgggagaaaatagccttaataatccaattatgttaatcaacaaaaaccaatttcacagactggccgcaaacctagagaaggcacctatcacagctaccattctacacaactctattgcctaacgcaggagaggtgagacacttagaatctttcttactttcctgacgtggctggagacttgaaattaacttgcaaattgagcattctctctaataaaaactgctcccacacatgccagggccaaacccgagtagtctgaggtcccggatccctccagtggcgcagctttcggaagcctgtcttgggggggaaaagttcagcaacgaagtcgcaggctcttaaacctttctccccaattccttctctccgacgttaaagcggtggccggggcaggcccgcggagggcggcctggagagcgatacgcccggggcctccaccagaccccactcctttccgcgtctcccgatgcctgggaatccggggcgggtctgagagggctggggcaaaaggaacagtcaccttcgcggcgagaaagagggtggaggcaggaattcgggccaggctctcccggagctggccaggactggccgagcccgaccccgcactaacccgcgagagaggtagggcagcgagggtccgccgcggccccagcgcctactgctgggggaaggggcgggggctccggagccgagggccgagcggggaggaggcagaggaggaggagagggaggcggggcgggcaggcccggcccaggagctgggcggcgcgactcacctctgctcccggcctgcggggccagagtagccaggatcccgcgcagctccgacgcggagatccgcacacgctccagcccttccgccatcttcgcggctgctgctacagccgtagcggctccgccaccgccgcgcgcagccaggaaaccaccacagacgggcggcgcgcgcgctcgcccacctcccggcctttccccgccccctgccgccctccctttccgaacgacggtggccgcgctgggaggaaaagcgcccgccgccggttccagaggggcgggaccggagcgagagcctgggtggggcgggcgggcgctgcgcgtgcgcagaggtgcggccggggaggcgcgcggaggctggagctggaggcgcggcgccggtgagctgaggtgaggcgaggccgggccgtgccaggccaggcgggcgtttgcggcggtggctgccgttgctgttgtcgtggacaccaaggacactgctagtctgggactcgggttgacagagacacccctcagcctgggctcctctggacaccttaggccaggctctcccgccacaggcccggcctagcgccgcgggccattacttgggaccttgaagatctgctaagagtagttgttactattcccttttttttttagttggagtctcgctctgttggagactcccgggctggagtgcagtggcgcgg

SEQ ID NO: 64143 - DNA, 718 bp, Homo sapiens
agccagtcatactcgtttattcacactgtcattaacaagccctttctcattttatcttttctcttcattccagttcccactaatgttcctttcctccctccttaggtattcactctaatgtgtttgatatatgtctttgaatatacatgtatctttgaataatatgtaatgttttatgtatgtatgtgttttaaatgtacctaattgatactgtgttacagatctcattctgtttctttttcatgtttatgtaaatacttctgactattgcacactgttatcttcagtgacctcataccctggccactggtcctgggccaagatgggccagagtccttacccagaatttttttaactgaaactgagaaagaaaattccccttcagtgtggaagccataaaatgtaaaacatacgagctgtcagcagccacgtgtcagttggttccatatggaaccaactcgcctgtgtgaaaaagaagccgacgtgcagaaagcagcagaggtgagagactaagagtctgggaagctgtcaaatctctggttccagtagttcctgaagctccatattcctccccttaccatggtttgttcatttcttcatggattccatgagctagtaaatctcaacacctccaccttgtgcctactaaggtagtacaaattgaggttctatcacttgcaactaagaggactaactgtttacaacctccaaaatatat

SEQ ID NO: 64144 - DNA, 2739 bp, Homo sapiens
cataaagttctgggtgtttcccaattcattcaagtgtactgttccagtgtccctatcttgaagcagctgcatggcctctggcagggaaattctgctgtgcaggggcaccaccagtacctgatgaggagggccatccttgccacccagctgtctcttctctgccagaacctgaaaatagaaagatatccgagaacatctcagtgtctcagtacttcactccagcattgcatttccactcccacagatgctccccctacccaaaaccagcatctctctagtaaaagaccacaggtatgccagcggggtggcaggaattctgaccaaagcaaagaatgctagacctgcacgctcgacacgtgctctagggctatgctctgtccctggaccctcctcccggtctcattttccacttcgaggcattagccacctagaacaccagagaagccgcattctcccaaatcccgctcctctcaccgcctccttcttctgctttcggagctggctggcgcgatgcctctggtcgactctgctgagttcttttctcaccttcttgcttagggttttcagtgccagacggcctgaatggcagattagaaggggctggtgtgatcggccccacaaggtcaagaaaagggactcctctccgcccaccttagaaagggcctttcgcgtggagcccagacgggagacagaagctcagtctgggcatgaggaaaaagagttaataacggccaaatagcccttattccttctacgttatctccttacccttgccgtcccgctgtgcagatccccgaccccgatgccgtccgcctttatgagctttattctgctgcttgagcgggccggggcggtgggccgccatgccgcagcgcgcgtgtacggagtcagcactgcttccgggccaggacaagcgcttccggtcccctccaagggggcgggccctccagggagcgggactccctgcgccctctcgcgaaggtcttttccagcagctcgtgagagcgccgtgttagcgggttcgccaagccgcgctgggaacttttcccacttcgcagtgtgtggttgggggcttgaaggcgccggatgtagactgtcgaggctcgggctgttggtctagcagggctgtttgtaccccttgcattgtcatttttttgcgctataaagctgcatcacgtagaagcatgttgactggaaggctccattcgtgccgaaaaggcctaagcccttcctgtcacctagattcgggcacgttgctcttccgtttgcaacggcatgttctttatcactctgagcaacctttcttctccctcgattccctagcgaggcttgggaatcgcgtggaagacacttctctcaccttgcccggttccgtaccagctcaagcccgtccctgttactccaacctgcgccccgcctcccacggagcggccgggaaggaccttgtgggacgtggcgacccggcaagggggactggccgcgaccctccggccgtcgggctcgggcggctgcgctcccactaatcttcccagaaacttgacaactgcacggcgacggccggacggggattcagaggggtcacggggccaggctgcaccggcttcgccgtgggcaggctcggaccgcaggggaccccatgcccgagccccggccctttccgtcccgtcgggagagggagcaggcagaagtcaggggagcttcagcgggaccgaggctcgctctcagccgcggggccgcgggctccagggccagcgctcacaatgcggcttcgcgccctccatgcgggagcgggtgcgttgccatgacagcgacccccgtggcgcgcgcccgggtctgccgcccctaggcgcgcacggcctctccccgccccgatcccccgtcgctgtgcgcaacccccctccggctgtgggaaggggccgggcctgccgcctgacgtctgtgcggggctcggaagatggctgcggagccgagcaccgggcagtggctgcggcggcggcggcggcggcgggccgggagcgcggcgggcgggggctccgccttgcgcgtggggcgctgagccgagaggcgcggaggcggcgagggcgcgggggctctgaggaccgctcggcgccgcctcctgccacaccatgggcagcgcagaggacgcagtcaaagagaaactgctgtggaacgtgaagaaggaggtaaagtcgagtcaagaaccccggggggctcgcgccctggcccgcgcggcccagggggcagaaaggtccgcgcccaccccccggcgcgggcacccgggccgaacctgggccgggcggggcgggtcctggacgggctgcgcctccttcccctttctcggatgggggagggcagcgcccctctgcccgggggacccggccggcgctcccggcttgtttgcttcgcagccccgcagctccccgcccagtgacggcagcggcgctgggagcccaaggccgggggaggggtggcggcgatggcggggatggctggatccggagctgcccattcagtgcccgcgccgccaggggagggggcggggccccgcgcgagctcccgcggcgcaggtgggtgtcgtgcgggccgagcttccccacgtcctaagtgggtgtcgtgcgggctgagctcccccttgtccgacgtccgctgtgcctccagctacggagtgatcgctgccggaggggtgcgccgcacacctcagtttctccctccacgcccacctccttagccagggaccag

SEQ ID NO: 64145 - DNA, 550 bp, Homo sapiens
ggtgcataccaccgcccgaggtccatagtgttttatttaccctattccgattgggcactgagtttgcattttaacctttggctggtagagcaggtttcagaggctcacagagaggcttctggccaggcagagcaggttctcaggccaatcatatctcccaggacctcagcctccccaccccccagggattggggcagacaccagcctgcctcctcagtcaccagattccctgccctgctgtgtgcaagtgggtcaacatgagggttgcttcagactgaggatgagctgtaattcgagaagggtggaatctgtggagccgggaataacatcaggctttattaaccagctccctgttgctaggcagctttcattagccaggaaggtctgccctgcagtgagctccttcagggaatggcaaggagatgctaataagctgggagagaagccggtgctagggaaggcttgcctctcccctgggatattgcagccagcgatatttcagcacattctgagatttggactccaggcagtcttcagcctgtctcttttc

SEQ ID NO: 64146 - DNA, 712 bp, Homo sapiens
gaacacggctctttgcccctgacctccagcctcttcttccccttgttcctttcccttagaggacagctttatggactccccggctgacctgttgtaactgcacccccagagcagcccctcaggaagctctcaccctctgtgcccaatccctggggcaactcccctgtaccttttttattggatccgagtctaggactggccccaggtgccacaagggtggcagatgctgggtaagaactctgtacccagttcagaggtctgactgcagctccaacgaagtctccagctagccgtgtggcctcaacaagtcactgggccacctcaatcctgtttccttatctgccaaaatggggctaagtctggcttatttacttcacttggctgttgaaagatgaaacaagataatgcttgtaaaatggtctgaggaaatacgaagctttgcaaaagtttcagaccgaccagaactgccattttcagagcggcggaggcaccgggtcagagccgcttgaggactatgctgggcagacagggtcgagacaggtgatctcaccgctcctgccacatgcttccctacaggcctcagcctccttttgcaataaaatgacccagatgctgcaggctggcagctccatctcaggtttcagtgcaggtttatttcagttttatattttattccaggcaagtgcttattacatggatagtattcatgtct

SEQ ID NO: 64147 - DNA, 1652 bp, Homo sapiens
tgcgactaaactacaaccaagcccaggttctgcaaaacgattccagaaataagccaccggcctgccgcggcctccggagccctctcccgctcggcgccccgaggccccaccccgaagcacgcgcgcacccacgcggccgcggcttccctgcgtcaccctcgccggctgcaccgccctccgcgactcgagagcaccgcccccgcccgctgcagccaatccgcgagcccggccccgcccctcccggctgcccggaagcggcctggaggcgcgccagccccgccccctggccgggagggcgggcggaagggcgcgttggcgggaggctgggagagagctgcccccctggagcagtcgcgaagcagcgcctcagcccctccctcagcaagtcaggctccggttacctcagggctgtgaccccgcggtcgaggccgggggaggggcggcgcccagcggctggctcctcgcgcgctggaccctcctcgccacccctcccacggggcccgtgacgccgcgccgcccccggagcttcctcagaggatggacagggagagtcccggctcgccgcccaccccccccccaacgcgggctgggagccccacgtccctccatcccctacggctccgcgtctccgcggctgccggcccatcccccacagcctccggcccggcgcgcggaagccccgccggtttccagggaaaccgaagctcaggccgccatggcaaccgcctgacgtggcggcgcccccggcccgagcactgcagagggagcgacgcccaaagggaggggacgcgcagccgggagggccccgaaaaaagagacaccccctcttcctagcccaggaggaaggaaagcgtgacgtgtttcaggctcggcggccccggggctgtttgccgcccagtcaaatcggagttttccccgccccaggcgtaaccccacactcgggccgtggcgcctccacgcgcgctccgaaaagaccttcctcctttggggtaaacggggctcggcccgcgccgcagcgtggacggggaccacgcccaaccctccccgcagatagctacagacattcgggcggaatctgggctcccgcccaggctctgcggccggggaggaggcgccgggccgccccatgcccttccctcccgcggctgcaccaacacgcgcgaacgggagccgccatcgggactcgcaccaggcgtcacggcgcgcgcctcacggccccggggacgccgaggctgcaggggctcgggagcggcgcgggaggggagccgcgccctcctctgcgcacgcgcgccctcccgggcagggagccccgctgacgtcagccgggccatgtgctcagcgcccgcgtggaggtgggagggaggcgcgggggagccgccggggcgtgagggcggggcggggcgcggccgggggaggggcggcggagggagggcgggggaagctgcgcgacgccggcctccgggccccatacctggatgtaccgcagcgccgtccgcagcacgctcagattggacgtcttcttgtcatccacgttggggatgttccgcttcagggtctcaaagcactctttcagatgggccctcctgaagagaggggcgagcgccggtcagcggtgcctggggcggggctgggacggggggaggcaggaccgg

SEQ ID NO: 64148 - DNA, 4165 bp, Homo sapiens
agcaggttcacctgccatgcccttccttccattcgtcctgccccagctcagaggacagaacctcaagagggagaagaaaatgaattctggaggagaaactgctgggatcggttccggacacccgtacatgagtttttgagtagatctagctttccgcacccactcatctacaaagacctctgaccggcacacagaagtcgtgaccaggccgctgaactcggcctaaacacagtgcgtactcgaactgcaacgtgttgatggcggcagcaggtgacttaatctctccgaaccttgtgcacggtcttcccctgacccctgtgcccaaacgtaggacattcttggtcaccaggggcactctccactgccagaccctgctctggaccatcaaggcaacagccggggagtgtgggcgatgtccccgcccatcacttctgcaaaacccaggcatctgagcctcacatatctccagtgactcttgaccttgagaggccggtcgccccgactaggccgccggccccgcagctcccccgccccttgcccgctgccgctccccccttcccccacccccgcccgccgcggcggcggcacacggcggcgcgcgcgcacacaacacactactacctcctgcatgactcatcattgaagcaacaataggcagagagaaaggaaaggagggcgaagcactctccaacacaaccaaccctgccgggggattctggggggcggggagggcacaggagtccccgggtcctgcacacacaccgttccagagccgaggccctggcagcaccctggaaaagggaggtctttcccgccagcccctctgcagcaccctgaagccagggaccaccaacagggcgcgtgaagataggagtcattagtctcttccctttcgagggagcgccgaagtttgccctttctcatcctggctcattccagcgtggccccggctgatgccagggggcatagttggaacgttttgggggtcagtggaaaaatgtgagctctaaatgtctcgtcgccctgcgattctgagggtttcccttgcctcgggatcaaacacaggaggttaggggccagagccgacaggtgagctcggctcctccctcgcagggcaaaggctctccctgggaggtgcccagaggccggggcccgggcccaggcccaacccagcgcaaggccccttgccagccccgcccaggccccgcccccggccgagcgcgaggcggtgaggaggggccgggccgcgccgtccccagcaggagtgtccccggtgcacgtggtcgggggcggagcccgtccacgtcaccacccggtgtaaccaacgggctcggaacgcaggcacacgcaacattccaggcgagagcgggtttggaacgcgcagacacgccacattccacactggctaaagcggggcgcagcgaggggggcccgggggctgacccccagcgacccgcgggccatttcgcaaacgcccaattagcccggctttcacccaaaccccggacgcgcagcccagcccagctctgggaggcggggtcaggcggggctggccaggatcataagacacgcgatgtcatttcattctgcaaaggccgcctccgccccaagcggcgcgtagatctgccgggagcgccccccgcaccctccccacggggccagggaagccgaagagctgctccgcgtagagtagtccccacccccactccgttacacacacgcccactcgtgtgctatacacacgcccgtgtacacgtccgttcatctgctcttcccgaggctcacatcacacatcccccgtgcacacacgcacgcacacgcgagcctgccacccccacgcaacaccattcctcaccccaccccccggctcacacatcctcagtgccaccgagggctccgctggcccacgcaaaagcagcccaccacagaaggggcacaggggtgccacgcagccggggtggcgcccgcaggagccaggtccctcgcagcatgttaatgaattcattaattaatttcactgcccacatcacccctccccaggcggcggctctcgcggggagccgtgcgctgccaggctccgcaggccgcccgggagggggccctgtccgcggtttcgcgtgggttcggggaccggggtcactcgcttccccttccccagtgccccaggggcccagcccggccgctcaccacgtgctctctgttgttgctgcgcttgccattccaggaagcgggccgcctccagtagcgtctctatgctcatcgcgccgagagctgccgggggcgcgccggggccgaggctgcggcccgcgagccgggcacaggtcaggctggcgggcaggcaggagggagggatcacctccggggggcgacagggctgggcggcgcagcgcactccgcagggaagaacgggggagcacggggagaaaaatcaatgtctctcaaaatatttgcaaaatataaaattgcaaatttaaaaaaatgggatgcaaaaaaaaaaaaaaggcggcactgcctcccttcttcccctccctctctacctcccttccgatgcctcccgccccgcggcccccgggagtcccgccgacaagaaagggctttgcaacaagatggcgaggaggcaccgacacacacaacaagggaaggagccgcgctgcccccggccgccgcccccgctactacaccggggccacagccaaagcccggaccggagcccccgcccgcagggccgcggcgtctcgcgaagggaggggcgggtcctgcgctgctggccccgccccccggatccggcgcgcgcacacgtggcccgggcagggagggagaggtccgagcggggtgtgcgcgccgcggttccgctttcctgctggccccgccccggctgcaagccacaagttgggccggggcggtgcgtttgggtcgttcacgacgaaatctgtcctgctggagggagggtagggtgaacaattcaagatttaacagagttccaaccaggatattccgggtcagggaaaccttgggaatggcagagactggcctgaccctgggtctccacgctccacccactcgcgacctaaatcccgcaatcgccgggctgtcgcaattcccccgggatccgcccctgggcggagctgccggcgactggagactgtcaagagaaccagcggagggagcggagcggcagtccggctccgcgttttgtctccgttcctccccccgcagtgcgttcgcatcctattaggggacgtcaccgggccgcgagccaatgggcgggcaggacaacacggcatggagcagctccacatggacaccccgcgccgccagccttcggtttaaagggccagtgtctgcaggtcacattcgcgggtgcggatggggccactgggcgaacccagggtgggatgccgtaaggggaatcccgcagtcgtgccctggcctctccattccttttcaccaccttccatttaaaaccaggcctttatctttccttcccctgaactccagtctttgtccacgcgtattcgatgtgggtggagatacggactgtgccaccccatgggccaccctttcctctggggccggggccagggcggggaacacgaagcgcccgcagcccagaccggggggcgtggcccaaatcgggaacaacaacgtggagggcggaagcccggccctccccgcgcctggcgaccggcggtgggcggggcgcgggggcggggtccgctgcggccggctggaaccgcgctccccagagggagggaccccccgtcgcccgcccgcccgcccgcgtcttccgggctcgagtgtttaggggagctcgggtgcaatcggagagttagctctttgaggccggctgcccttaaatcctctcacttcacacataaggaaactgaggccgtgacggccaaggactcgcctaaggtcgttccgtattccacctgctcctctctcccgaagcgggggcactcttccctgaccccagggacgactctgaagccagttctggaggagggcccccaattagaaaaatgccagggaggaatagcaaccctgaccacttaacacactgtgattggggcaacaaaaatcttcacctgagacccaactccgctgttctgcttcctcggtggaagccacacgaaccccactggtacagcggcagcgatagacc

SEQ ID NO: 64149 - DNA, 839 bp, Homo sapiens
agttggggtacttggctactctacttttaaaagtgaaatataaaaatgtttattttgagcactactttgttcaactgaggtatacagaataggtcagaatttttaagaaactgtgacagctggcatgcattcctttattcattcaacaaatagttattaagtgtcaactatgtgccaggtattacgcaaaatgctagggatattgcagtaagcaaacacagacaatccctccctttctgaagcggacggtctggcggaggataggtattatccagaaatcacttaaatacctgtaaaactataactgcgacagatgctataaaagacaggtaaaagatactactgaccccccctaattagtggatctgccttaggaaggtcagaggaggcttccctgcacagacaactaagctaagaactgacaatggaagaaaaattcacaaaggaaggaacgaagggaagggaacgtggcattctagggtcctaggtaaagcaaaccgcaagtacaaagaccctaaggcagaacttctggagcattccaggtactaagagacagtcactgtgcctcaaatgcagagagcaaagtaagcgtatatagttcaaggtgaagctggggaggaaggcaggttccagattacgtagggcattataattagagtgaccatataattttatcatgtccagtctgaaactttctgaaagtgaaagaaaaactattaataatcacaccaggatactactctttttttttttttgagacagagtctcgctctgtcacccaggctggagtgcaatggcgagatctcggctcattgcaacttacgcctcccgggttcaag

SEQ ID NO: 64150 - DNA, 1680 bp, Homo sapiens
ttcttttttttttcttcttgttgagacaaggtcttccattctgttgcccagagtgcaatgatggaatcatagctccctgcagcctccaactcctgagatcaagcaatcctcccgcctgagcctcccaagcagctgggactacaggtacagagcactgcacctggttaatttacttcattttttgtagaaagggagtctggctttgctacccaggctctagcttcaattttctacacagaatttacccatctggcattccatatattttacttactttaaaaaatctcccgtcagtaagtttcaagagggtaaatattttgtctgtcttgttcaccgcatatcccaacgcctaaaatagggcctaagagagtaggcactcaagtatttgttgattgaaaccacgatagaactcttccctgtctggaccaccgacacaaagcaccctcactgagtttcaaaaaaagctcagcccatggactggaacttttcttcccggttacttgagtcagtccagaaagccacagttaatagtagaaccctgagaatgaggctttccctttttttttttttctttctcatctccatgcttctgtttccttggttcctcttgaccattaaccctcttcaactaccactctcttgatacacagcctgtaaaacagtctaaattccaatttcagaacttcaaattctttctgcacagatccctcccacttccacaccaatctacatcttctctcttcgccttctctcataaatccgacgtttcccactagtcctgccactgccgttctttccatgccctcattttatcagctcagtttgtcttcccgcctcagttttggatctctctaaacctcctaaacaccggggagtctttcctacttcagtcctagtctctattctattcgccaactcctcccactcatccactctcaacacccccgcgtgcgcacacacagccacatcaggtctcccctcctagaccccgaagtcggcacctcactagcccaaaactcaagaatgaggaacccgtgtgatccacgggttaagtgacccatgatagtaaatctgcgtgagagatataagtgacccacctctgaggccgaggttcctgccagacgtcgtgtctggcgtgggcctgtacaaccctagaatcttaaagcagccgcatagcgaagctcctagaaacgcagatgatacgctcccagcgcgccgccatcttgtgaagccatctagcctcgtgattggacacatccctctcgcgcgacctgtggctgatcttgaagaaagaagaaaccctcgcgacacctggggtttgctgctcctaacagaaggcgcgggggcgtggtgacgagcggagtcctttgaggtatggcaggaggaggacatgcgttcgaattcgcgagaaaacttatttaaaagaaaaagaaacaagttttccgggccctgctgcagacttacctctcacactcactgggattgggcaggttatgaagatgagggtacgagacttgggtgtgatggcgtgcagtgagccctttttgtgcaacaggtgtgtcctcagccgatgtctcactcactgaattgtaagagatataagcctgtgggttggggaagagtactctcgtttacagcgaaagaactgaggatccggccggacgcggcggctcacgcttg

SEQ ID NO: 64151 - DNA, 656 bp, Homo sapiens
caagcctttttcttccttttgggtaactccagaattcctcactctcctcccccactcattgcctctgcttcttcccacatgcccctcttctcttcccatcaggcttccctagtcaacattcttttcagaagtgaggcttgccctcgtgacacctctcttaagtggctcagcctggaaaatcctctaggagagttgcccttgacgacagacagactcagaggtcacaggccctgtgggctgtggggcctggtgtggatgagggtgtcagccaaagtggcacttctggggcaactaacaatagattacacaaagtccactgccaagtagtcgcttgggctgggccggtaaaaggccctgatcagccgctgggaaaggctggtcttcaacccttggactctaaccgcggcaggactcagcagaattcaaggtcctgatcatgagaatggctttgggtctcacatgtgccagttcctgccctgaagccttaagtttgagagcaagaaggaaacaaatggacaggaagactcccatgaatacaggaagcgcccaaagatctcaggagcaagccccttctttaactgagagcattcactttcccttctgatttactcccccagaaaaacattagagctgacaccttcttggtgactttggat

SEQ ID NO: 64152 - DNA, 2384 bp, Homo sapiens
aaaaaaaaaaggaaaagaaaagaaaaatcataggtatctgtgtggaataaattaactacaaatccccaagacgactcttgtcatcaatatttcaatccataatttagcaaacacacacagacatcccttatagggatacagttccaggcctttctttgggcatccgtttcgagacctggagagactctgatgtctgtgtgtgactaaggagaagaatagctgaatcatatccaaaagcgagtcctcccaattaagaatctataatacaaatcaagacaatgacagcattccatctgccttttaacctcaacagctcctcctcccaagccagccagcctactcccctccctcattcccccccaaactgggaaatcatctcggaggccggaggcagaaaggggcggtaggtggccgggccccgctgcctctcgcgcctcccggggcccgccacacacggtgccaacgggacgccgcggtcggccgcatgagcgcaaaagcagggcagcgaggtgagcagagccagagttcagaaggggccgcaagtcagacgaggggctgggaaaaaagagcctctcccaaggttaacagaagcgtgcggagcgtgagaagcagcacctcgcacgcagactcgcccgccggccgggtggcaccgctcagccgcccgcccgctagaaggcagcgcggccccggcccggcccagcccggcgcatgcgccgcagcccctcctccgctcccggcgcccgcccctccctcttcctggcgggtctggggcggcggcggcggcggcggcggcggcgcggtgacgtcagggcgttggggcagctcctgtgacagacggagctggagcggcggggcggcggcggagtccggcggccgggagagcgagtgagcgagcggaggagcagcgacacgggagtctagggagcgagaaggagaaggaggggagcgctcgggcgcgagcgagagaaaccgcgagcgccgagcttggactcgagccccggaacggctgaggagcccgcccgctcccctcccctccccctccccgggcccgggcccagcgcgccatcctcccccctccttccctccctccctccttcctccctcccctctccctccccctcccccgccggtggatgggagtgaaggacggaagaggccctgcggaggcggcggtgcagcgctccggtaaggcggcgcgggtctgcgccctcccctctgtctcctccaccgcgcccgggcggctgcaggccggacccggcggcctgacgatgtggctgcgccggtcccctccctcccattctcccctccccctgcctccgccgccgcctcctccttcttcttctctcctcgctctcaaaatggcggccgcgacggccgttgagtgagagacccggaggagggggactgtccggggagggcgctgccctcgctcctctcctcccgggcccggctttgggggctgccggcgcctctgcgacccccgccccgcggccctccccaagaagggatcgccctcctccctcggtgacttagcaagaaaagtattcttgggttggaagggcgtggggaccaggtagctctctgatcttggggaaaaggatcggccctgctctccccggccgcggagacgagcaccgcagtccccaccccaccctcagttatcggctcggggaccggctcagccccgcgccgccggggcactcatagggccttccaggcattccgtccccgactggtccttaagatggggttgaccagcggagggtggcccaccgtctccctggcccccggtgcggcggtccagcctcagcacccgccgaggagaggcagcccggcccaccgagcaatccgcagcatccacccaccgaatctggcaggattttctttctgccaccggctcctcggtcgggagttgccttttgatgctgttaacattcagcttcgaggctccctgccattccccttcgtctaatctcatctccctgcccctttgggaaacgcagtgcctctgcatatttaccctctttagcctcccacatgagaaaatgcctttgaggtggtcgacacattttgactctgcacctctaaacgtagcagtagaggggaagaggttttccgtatttagtaggagagagcaaggtaccatagctttatatgttatgctacctttcttcagtgacttagcaagaaactccttgggaagagggcaggaaattttcttttggggtttgggcccaatttatatcagtcttttggttaagaaaatacgcctttgaagaggaggaccagatttgtggtctcgttctcaatgggcgatgtcatgccaaggtcccccctccctctttccttaagtggcagtccggacaaatagagatattactgat

SEQ ID NO: 64153 - DNA, 703 bp, Homo sapiens
gaagttaattgaaaaaatcaaattttatgtgggtatataaaagtaatcccacaatttatagaaatattttctttaaaattattgtgagttctaaccatttttttgtgtgtgtataatgccattctcttcctctgtgaagtgcctgttcggggtgttgctacgtttttgttttgttgtgttttctgttgtagtgtttacatttttcttgtcgattcctaagaggactttagggtactgagtcacccatggtcatgtgttgcagagaagtgtcacagagtgaaaactgtcttttccttgatactacctttagattcatatttgggaagaccttcgctaatcatgactacataagtattcacttttactttcttaagacctttttgttttcatttctttttatagtaatgtctaagccatctggaatttatgtttgttgattatgcaagaaagggatcgaagtgctttttctgagtcattatccacatgccgaaacatttattgaatagccctttccttattgatctgaaaacaccttcttataaaaccttgcattggtttttggacttgctgtgctttcaggagtcagaagaacattcttttgattattgtagctttacattaataatacattttggccgggtgcggtggctcacgtatgtaatcctagcattttgggagactgaggcaggcggaacacctgagg

SEQ ID NO: 64154 - DNA, 3838 bp, Homo sapiens
ggagagccgtgccccaacagcactctgcatacacgcaaactcagatgctagtgaagagacaaagcacacccttgccccggcctggaggcgccgggagctcaaaggcggcagagaggaggaactagaaaagaaacttaggcctcccagaggacctgtgtgctgcccaagccaggcacaatctcactcagaagactgtgccagggccaggccacgccccagccaaggcctcagcaagtgaggctccagcaggaagtagggtccgaaaaggtgcatcacccgtcccgggagcccagggcttcagggaaaggcaatggggcgggcaggcggcctatggaagaacctacagaccaggcacctgtttgcctccttcctgtcccacccaggccagaggcaggcgttcagggcctgaggacagttcagagttcctcaggctgctctccccacatcccatccaagatcctgttgcggagctcccataagcccctagactccttccccagctgccagcctcctcctcctccccctctgggcctcaactccagggagccctcccctgggcagaaggaacctgacgcaccactgtggacctgaaaaacctgcctgttctcttaacccctaaaagccgctgtattcccaggaaggtaaccaacccttgcccccgaccctcaatggcctagatcagctccttcctaagggggctgaagagccttccagagctggatctcagaggtcagaagccttggttctgatgctcaggtgggccccagctggggggtcttcattaaggctccttccttctttcaatagatccgggctggctgtaacgtaagtcctagctagctgtactaccttcccagggacgtaggagcccatgtcctgcccacgagtatgctcccagtttccccaaaacaaatagctgtgcccttccctgactcagtttacccccgacagagcccccccacccccagcagagttaggaaggggcttcactgactccctcacagaaatcctccaacagacgctcgtcagccccctagttctcagcacgggatccaaaccaacacgcctgtcccagcttcctctgggccaggccacggcagccttggcttgctggccatgagctggaatccaaacacttcccttaacagctaaatcgctgtgtgaccttgggcaagtcacttcgactcttcgggtctctgctagaggggaaatcagccaacctcctctcatccagcctgcccccactgattcagagccacatcagcacaaagcctggtaggttggggcgatgagcatctgctcttctgcccaaaccttggccttgtctagacaatcagcagtactgccccagcacctgtccctcaccccaaggcaactccgctatgatgggaacagggtcagagggctgaacgctgtccccatcctgattcccaagtcagccctggcgcactcactgaagctaggaagggagatgatgaggcgttaagaccacaagtcccaactgaggacagtcgacggaggagggagggactgggggacaggagtagctctgcacctccactgccacccagagcaaagagggcctgaggaagatgacgactgagggcctgggaaggggattccagccccaaggctggagtctgagacacggtggagggaacagaaggaagagaaggggctcaggagaaagggaaagcaggccccacccgagacaagctgcagccactgccacagtcaccaccatacagcccccatgggggatcgctgggagcttgactccacactaacgacctttgccttaaaaacagcaactctggtctgacccacttttcgcaataaggcaggttaatgatcaagttctggcacaaacacttccccctgccaaggagtttggctctgccccatgcaaaggcagacgccccctacaccaggtcggccgagcaggccaacacacctgagagtctccgccacagcctgaagacctgcggttatagcctggcctcagggcatgaaccagggacgcccctcacaacgcacaccccgcacctcgtgctcttcccacaaaccaagcctgggaagcctcgagcggagcttcactcccagggctgcagccctgcgcacaggggatgcctgggaggccgccgcggagcaggtgccgaagggggctgtcccgcaaacgtcggagcgaccccagctcagagagctcccatgctcgggcgcagagggggtggggccgccgattctttcggtctgcggcggcggcgcaccccgaaaccgcgtgtgcgcgcacgtgtccccgcgatgaggcgcgcgtgtgcccgccgagggtgccagccgaggctgccctccacgggaccgcacgtgcgaaacccgggccgcagccgggggcgactgtgaaggtgaccttcagcgcgggggcgacccggtgaaggccccagcgagatacaaccgggcccgacgcggagggaaggcggcgatccccgcggagtcccgaacccgcccgccctggtccggcgccccccgcccagcggcccgctggccctggccccgctcaccggccgcgcccggccgccccttgcccccggcctgcgagccgtgttcccgggcgctgtcggccggggcggccgccggcaactcgtccgtcttgataaccatggtggcgggagcgggcgtccgcctcggctgtccgcgccgcccgccgcgccactaacccaagtgccctgcgcgccgcggctgctgagggaaggacggagtcaccggcccacgtggtgcgcgccgtggcctttgaccccgccgccgtttccctgccccaccctcgcgcccggcccagcccacggcggcccgcgagggacaaaacgcgccgcgcctggttccccgcccacggacgcggtgactttccagaacgtcttaaaggcaacgcactctgactcaaggcccagggaggctgggcgccctcgcggggcggggcctcggggagactccctgctgctcgctgcccgtcgggcgggcactgtgaccttgggtggagactggtctggttctgccatggctaatcctcccctctccaaggatcccctgttttctcttgcagatttgctaaatgaccgcgcagtctgtcatctgcggtgttcgcgtgaccctcagcgccctccccacccggcaggccctttcccgccgaatgggtgcggctggattattgagggagtggagggtcgcttagggcacgggcacgagaggcgagggcgagacgtggctaatggggatcaagagtcagaatggacccgccaaactttgccccgagccagaacgggctccctacccgcgtcctcgacccatgggtcctcacctccaggctggtgtcctcattttacagtggaggaggccgagaccaaggtcacacagagagcaaggggtagagccgggtctgactccatccacagccaggacgctttaactcgtatttttcacttggcaggggcttggcggggacggaacggtgaggtcagagaatgctgcagaggggacattgggaccaggtcttgcagtgagttgaagtgctccaggcagagagcgccggtgggtctttcctggccaggccgcagggggcctttgggaagcacccgaggcctataaccttcggagcgtttgtcaagctctaatgagaactggaaagcttcagcttcccgaggtgggctgggagggccttaggtagggcctcgcacaaattgcgaaggaaagccgaccttgttctggagagcacgtggtgaggaaagccagcgacttgatgtgagcatttaaacgggaggaaggaagatgagaactggtaagattcttctcg

SEQ ID NO: 64155 - DNA, 1223 bp, Homo sapiens
acttgaggatgtgtctgaagccacttacacggtcggcacagaccactctaatgcaggctggaggaggagggggagtggggtgggaagggcagagctggggctgccctctggcctctgtcccaggtgcccacggtctgcagtctccccatagccttcccacacccccacccctgattctggctctgtgactgaattcttgacctgggccaccggtgcctggtgggtggtggtagggaaccgggttcagctgctggagcccagccagaaatcacgtcagccgaacgcgcaccatttcctgactcggggcactgcagtttgggctgggcagacagcctggagcttgagaagagaaagcccgtattgaccagctctctcccgctccgtttcccctccggactctggcagggcctttccttggctcggtgcccagctgcctgctcacccggcctggcagactctgcatctgctccacttcacaggccggggaggctggcagcacgccagggctgggctcacgtcagcggctgtgtagggaagggagggcagtctcccgagagcctcacagcctcgtgggctgagaataggtgaagtcagggcacctctgtgcagagggaaggcggggtgtggggcccgtcccacgcctgggcgacccccatgcagcgaacctcgaggccgtcactctaaagctcagtctcactcagggtgccagaggtgcgcgccccaccctcagttcctagcctgggcctaggactggctgaccccgtgtgtggggccagggctcccgaacacgggtccaccggctgcacgagagtttccggggggccctacccttccgattcggcaggtttaggccagagcccatgaacccagtctgtatttttaaacacctgaagcaattttgaagcaattctgatttatggccgagctgaggagtcaggcttgggaagagaaccccagagacgggtcgggagaggtctggatgctctgttcctctgcggctaatcacctgtgggacttgggggcttctctgtgtgtctctgggcatctgtttcctcatcagggagaacagttctccctgtgccttctcagtaggattagcgtcacggtcgaatgaggtcacgagatgccatctcccgggcacttgtatggcattaaaattagggtcccagccctgtccagtcatcttgccaaacctgcttctggcctccaggaatgcagatgag

SEQ ID NO: 64156 - DNA, 1053 bp, Homo sapiens
ctggaagttatgcttactcttttaagtacttcagaatattatatattcaacttaataatgagatagtgacaattcgaaagggtttcacttcgtatactatcagttcgctgagaactaataaaaaagtgtggttttttgggtcatcccaaaaatcaagtacactttgggaaacagggagttaaaaatctttcggaagttaacttggtataagagtatgaaaagcctctgttgctctacttctgaggaaatgctctcctttttcctaataaagctttccacagaagacaaactctgtacacaaaaaacaaggtaagtatgggaaataattgctgcaattcattaactctcaaaaaagttattcattttgacatgtaagagaaactttatttatgaatgtgaaatgtgcttcaaagtgctgatctgttaaaattccataaaacaagcttcaaaatgcaagtcatttgtgccagctacgagtaaataactgaagcagcatttccagagagactagggcaaaggacagaacaaactacaaatcagcagaaaagaaaccaagcatagtagagtgttaataattcaccatggttactgctcttaaaaccaaagcaactaaacaactgtcatctgtttacttttacgtgtgttttcatcatctctacaccgtctgaagtgttcagtgtacatggatgtggacagacagtcaaagcctacaggagctttttttttctattagaacagtcattttaatgcatagatttgatgtggttattttgctttctctatctctgcattataagctcttaaaggaagaacattcagtgggtttattaaatattaggaagcattcatattttatttttccaccatgtatttggtttgtatgcatgtttgtttcctgagcacactgtaatggctgtttatgtgaattctgaaagagcaaaactagaactgtgaagaagaccaaaaataacagagaggcaccctattgtcctgtgaaaaacactagacttgggatgagaaacatgggtctcaggcctaggttctcctacatcc

SEQ ID NO: 64157 - DNA, 1442 bp, Homo sapiens
ttcacatgatgtggttagcacatgcagtgtgtcccaagacattttcaggcatcacaaaaacttgaaaagtactaacagttgtctttcctttggtatttaggcaaaaaatgaggaagattcataagtaagttaacacagaattaccaaaaacctcatgagaaagaaatgaagggatgtttcagggtagcttttcgagtcccaagtgatcattgatttggcccttctgtttctgattgtgaaaaagcattctgaaagaatgggcgccggttcaagaggaggtctctgagggtcagcctttggctgtttatagaggtgagattcaaatgccctcagatcatgaaaagtgcttgaactcatttcagagaagaaatgttttgaaatgcccgtggaaatactgagtgggccacttttttattttgtgaaattagaaacgtataaactatttttattattacagataattgtgaaagcctcactggatgacatcctagctgaggaaaagaatggaatttttgtattagtatgaaatgctaatttattactgtatttagatctactgaccatctgagggagttagaagttaaagtaaacagctgtatctctagttgatctttgcatattttaatccaaatatggcaaagggcagggctaaagaagggagtgtccataaacggggctcagaacttgtaacagaaaattaaaatatactccactcaagggaattctgtactttgccctttgggtaaagtctcatttacatttctaaacctttcttaagaaaatcgaatttcctttgatctctcttctgaattgcagaaatcagataaaaactacttggtgaaatgacttcttgtcacattgctgaagaacatatacaaaaggttgctatctttggaggaacccatgggaatgagctaaccggagtatttctggttaagcattggctagagaatggcgctgagattcagagaacagggctggaggtaaaaccatttattactaaccccagagcagtgaagaagtgtaccagatatattgactgtgacctgaatcgcatttttgaccttgaaaatcttgggtaagactatgctttgtattgtatatgtatgtatgttgtgtgaaaagtggtaggtgtgtgaaagagaacacatatatgtatatgcagatgataattcatgtccgtacatgcagtcgtatgttgaataagatcactttcacttttaattatactgcattgtgaattgcacaattatctaaactgggcattcacatgctcttttataaaccttcttaagcaccagattattaagttttcttttcaaatgtatacagactgagacaataaatagaaaagggttttgttttaaaatcatacctttaaagaaacagatttaatactcctttgcattgagttagtgtttggccactatgcttgcatataa

SEQ ID NO: 64158 - DNA, 1923 bp, Homo sapiens
cacttcctttcagaccaagatgtctgttcaggcttaatgcgggtagctaactccagatgtggaatgctgatttgtacaatctccaggctaaaagggaccttaaacttcttccaatgaccattttcaacaacattcctcattaagtgcgcaaccagcttctgcttaaacatctccaacatctggagcagttgctggattctgttgagccaaaatctttctcaatttcctaattctgcccattctgaaacacatctgctcctcctgcctctaggacagttctcctcaaatcttctcttctccagaggcccatgcccagccccgaccactgtggcttagagcacgcgattactccctgggtcagctgggagggcaggggctgctgtggattgtgaagcctcacacaccccagcccacctctccccaatcggccccatcaggggcacaaagtctctatctgtccagctagtctggcacacagagtggcccagggcagagaaactggcccagagtgcactgctaggccccgactcttcagtttgcctcaagccagatgaacttatctatcgccatgttatctgaaggccaaatttctatttctgccatttaagattaacatttatggttactatttttataattccacctcgaacatttttacatgaatcctttcaccagataacggcggcagagtggattttctggtggtttcggccccagtcacctggaaaatccttccgtctccacttcacctctgccccccagactgactccgtgtcatttcagaaagagaacatcagaggacgaggacctaaaaataagctcaaagtcttggcaaatgcttttctctcacaagcttccccttcagcttcaaaattcacagttaaaattaaaaaaaaaatacttcgtaccaaagcagttgaggcattttgttaaattcccccactgagacatactgaggtatgcgactaactgctgagttccaagatgatatcgatcgagcagctgctatttctgcttcagcgaaagccacgatcccagcacacaggcacgcgctactgtgaggtcaggacgaggaaaagagccaggacctttcacccagatcgcggcggcccagcaggacttgcccggagtgtctcatgcagacttttgtgtgtgtgaagaaaagctttttgtcttgctctgggcaccctgaggccaaatatataatacttacatccagccccaaagcccccagtctgtctccacttttaaaatcacaaacttcattgtagtaattttcattctcaactgaaatgtcttttccgtattgcaagttaaaaccctgtgttaattctgctactaaaaacatctctcagcttgagacagtttgaaccttggggtgtcaggggacgttcactccaaggatggtctccttttccccgaagggttccggaagggtgtttccagagcgcattcccctcctcccccaggatatccagcttacctccgtcccccgcacactctgggatgggatcacgggtctcccacaaattcaggcaacccagtcacagcagaagagatggtacaatgtgtgggctggggttggggctgacgggggaagctggcaggaggaaagactcctctccctgctcctcaagactgctgcccctttcccgccatccatctctcccagccaagccgacctgcaattggtaaaaccagaggcttcacccgggacttcaggaggctcccaggctccagactgctgctggctgtaggtttacaccagctgtttgccaagtaacaaaatccaggatgtttcccactcagacaaattgacaactgcccctcagttcagacacccactgagcactgagcacgagggtgcactctgcttctaggccagcagagccggactccaccatccctcaaagcctctctgca

SEQ ID NO: 64159 - DNA, 1023 bp, Homo sapiens
ctgagtaaatttgaaagctgatccaggctgggcacggtggctcacacctgtaatcccagtactttgggaaaccaaggcagctggatcacttgaggtcaggagttcaagaccagccccgccaacatggtgaaaccccatttctactaaaactacaaaaattagccaggcgtggtggcaggcacctgtcatccagctactaaagaggctgaggcaggggaatcccttgaacccagaaggcagaggttgcagtgagctgagatcatgccactgcactccagcctgggtgacagagcaagactctgtctcaaaaaacaaaacaaaacaaaaagctgatccaatttgcagaagtttgcagctgtctgacacccacacattttctaagaaaggcctacaggtaaagcatggagccccaggcccacagcaggaagcgagaagccctcccacctccctctggcccaggataggctggcatgccccagcacattctctgccaggcagcctgacacagcagttaagagccaggctttggagtcagactgcctggggtcaaacctaggcaacgtgtttactggctgtgcaaccttactcactgttggaaccttgattttctcatctataaaagggaactaataatagcttcttcacgagctgttaggagacttaaagggagatgcacatggagcaccttcataaacactccccacatcccggctgtcggcctccctcctccaggctccaggctcacttgccatagtcacatgcaggcaactggggctcctccgtggcgcctcctatgtggaggcagacatgatgctagagaacagggaggagggatcccagtattttctcccaaaacacctctcctggtagggcccaagcctcagcctcagccaaagttcatcctttcatgaaccaacatccaataattccacaactgaacaactcattctacactccgcagatactaacacaacctgcccagtctggaacagatctctctttcagagtatctgtttctttttt

SEQ ID NO: 64160 - DNA, 638 bp, Homo sapiens
ggtgacagagcgagaccctgtctcaaaaaaaaaaaaaaaaaaaaaagaagtgctctatttcaggagaaactggcactttctgagcctactctcccctaatgccagctctcctgctcaccccaccagggtcagagccaactttgcctccaattcatagtcctttaagtaagaatccttttaatatgccctaatgtcccaaccaaactaatcttgaaagcttctatgtagatacaaagtgctcctgaaatccctatcctcagaaatgcttctgagccaaatgggctctgaaccctaaacaaccgtgtccatgtatgtggcaagagcttgtgaaaaacaaagctgggccaggcgcagtgactcacaactgtaatcctagcactttgggaggctgaagtgggcagatcacttgaggtcaggagttcaagaccagtctggcgaacatggcgaaaccctgtctctactaaaaatacaaaaagtagccgggcgcggtggctcacacctgtagtcccagctactcgggaggctgaagcaggagaatcacttgaatccagttggcggaggttgcagtgagcccagatcacgccactgtactccagcctgggcaacagagcgagacttggtaagaaagagaaagaaag

SEQ ID NO: 64161 - DNA, 2137 bp, Homo sapiens
gcaacggagcgatctcgactcactgcaagctccgcctcccgggttcgcgccattctcctgcctcagcctcccgagtagctgggactacaggcgcccgccaccacgccccgctaattttttgtatttttagtacagacggggtttcaccgtgttagccaggatggtctcgatctcctgacctcgtgatccgcccgcctcggcctcccaaagcgctgggattacaggcgtgagccaccgcgcccggctgaccaaaggtttcttggtccgcattctgcttctgtggaatgagccaggagccagttaggcctgatttgacatctgatttccggaggaaaacccagactctgccctgggcaacaaactgaatcctgaacttgaggtcacagggcaggtgtgaggagcggagagcagcaagagtgaaagggaggcctgtggtcattccatacacacaagagatcagttcctccaaggtcaggggacagagagcacagggatccagcgccaagcgcaaggcccccagaagaagccagagagtcggggagggggcgggggggaatcggtcccagcaggtgggaaggattctgggaccagacctaagggatcatgagcacagctgctgcaggcagacgggcccctggagaagctggggacaagctggaatagagacttcattgcgggaagggctgtcagggaggcctcctggggtggaaaagggtggtcaggaggctcctggaggcggcgcggccccgggggtccaactcacctggggcccggccaccgcgctctcgaccgccgcctctgcccgcgcagcacgggcacagctcgccagcactgcgaacccggatgggtcgtcgggcgcggccctcagcagagctgccttcacagatgtggtgcccaggtcaatgccgagggtgatcggccgcgcagccattatctccctgacccgcgcagctccagtctgcagccagcggccccacaagtccgcgctcttcgcccaggggggcggggcaggggcggggagtcgcctgccaatctttcagccacacccaacatggaggcttctcgtcttcccactggccggggaaggcgagcttccacgcaacctctcggcgggccccggctataggcggagaggcggcggaaggcgggacctaaagggggccccgccccacgggctctgatttccgcccaatggagggcggtctgagcttcgctcacgaaaggagccgggaggcgctggcggctccaagagtctctgtgtccctggcagcggacctcatcttccctcacgccggagccccgatctctgcgccccggcccgacccagctgcgctctgtccgtctaagacgcgcggaaactacaactcccagagctcatctcgccgagatccggccccacgagtcaggtggcggaggtcaggtgacagcggacccgcctctcccaaagtctagccgggcaggggaacgcggtgcattcctgaccggcacctggcgaggctcatgcgtcccgtgagggcggttcctcgagcctgggggcgctcaggtgagagcggacgcggcctcccctgtttcccaggcggaccccttgaggcacagcaggtcagcggggcagcctgccgggggtccagcgccctcagccgcggcgggctcctttccccgccaccagtgctggcctcgcgacacgggacaacccccgggtggaagggcccgagcggtggtcagccgaggcaggggcagcgggctgccggggtgggtgccgttcccagccccttaccttctgctcagttgccgcctgggtctcggttggggaatttgcagattgctttggagacgctgagagaacctttgcgagagcgccggttgacgtgcggagtgcggggctccgggggactgagcagcacgagaccccatcctcccctccgggttttcacactgggcgaagggaggactcctgagctctgcctcttccagtaacattgaggattactgtgttttgtgagagctcgctaggcgccctaagcaacagaggtaaccactttatatccttgtttctcaacctcgttattcctacctacccccttcccataaaatttaataccactagtacgctgtgtatttgtttctgtggccacaaacc

SEQ ID NO: 64162 - DNA, 1257 bp, Homo sapiens
gtctctctgagagtgcaggaaaggggctggcccagttcttcaggaccattttgacttcatgaacagaggagacccctgtgctttcatctgaagaggtggttcacggctgccttttacgctcccaggtcacgctggaattcccctgtaatgatttttgggctccatggttctctaacaatctctggttaactcagccgcagactctcagagcctgtcatcgcagcgggaggaggacgctccggcgtttcctgctcaggcctgttttcctccatctctgtctctggcagcaggtggggaaggaagctaaccagggcctgtgtttgcagtcccatcacagaatagggctcgtcagagagtcagagctcaggagttcagatgtcaggggtttcggcccagttttctgtcacaggcctgaactctgacccagtgcctcatgtcattgatttgggtccttccagagtcaagcgtcagcctcactgttcctcctgtcgtaaagctggagaacggcagctcgaccaacgtcagcctcaccctgcggtaagttcctgggcctggcgctgtgctcagctccgctcaggccccgcagctgggtcagggctgacccctggctcagtctgttcagatttcagatgcgctattcttgcctcttacctgtaagacaagccctagaaaaagggatggtgctagccccgggctgcaggatgggatcgcaaaggctgacccccaccctgagtcctcactttccctggcaggagaaggaaggggtgcttctcccagagacgtgcgtcttttccccgcatgggaagagtcctgtgtgaccggtgttgaggccagatttcaaagcgattctttctaagactaagtatttgaagagagccctgaaggtcaaggggcagggagctgagctgctggttggcacttctgaggttgctttcagaagcaggagtggccacgtcgggtgaatgccgctcatgctgggccttgtctgggagtctcacttgctgccacctgctggcttaggcacaaacgtcgcgacctagtccagtctgtgccagggaggctgcctctgccttctctgctcttagctgctttgtccttcccttgcctcccagccgtgaggattccctgatgaagaagacctagaaccctctccttctctctttatgcctttcccccttcctcgcctctcctgcgagatctggcctgaaagcaaagctttggttccgaggcccctagcaggcctgccattccgctccc

SEQ ID NO: 64163 - DNA, 1077 bp, Homo sapiens
ctgtacatgcagatgagacgcctacccccaggaccacccaaactgttccttggctgaggcctgtcatagcccaaaggtcaccgtgtccttggagccaaggccccagtgggaggaatgagaaccgcttttgtttggaggggcagtcacgaggcgcatgaggcagccgcccagccctcaccgccctccgtctgtctgtccgtctgtctggcccaggcctacatgaacttttactacaaaagcactgagggctggagcattggcaacgtgctcctggacttcaccgggggcagcttcagcctcctgcagatgttcctccagtcctacaacaacggtgagtcagccagcgggctgctggccaccctgcggctggggcatcgggcggggccagccttcccgggaccttccagccagggctccacccccacctgggatccaagccaatccagcccccaaggagagacccacctaggggccttcgtagctggaggctttgtggttttctgggacccccaccgcccaccaccccacaagctccagctgcctcaggagctgccaacctaacaccagcttctgtcccccggctgctaacagaccagtggacgctgatcttcggagacccaaccaagtttggactcggggtcttctccatcgtcttcgacgtcgtcttcttcatccagcacttctgtttgtacagaaagagaccggggtatgaccagctgaactagcacccagggacccagtgtacccagcctctggcctcgtgccctgctggggaaggcctcacccagcgaaggccggagaagcggttgggccctggcacacagggctggctcagtgtgcggacagaggagaccactctgctcctggggccagaggccattcaatagcctgccttcgtccgggcccctcctgggcctccccggccaggcacgtggcaccgtcgccttgacaccgccatctcttttctttaaggcttcaggcagcgcgcacaggctctggcagccgtctcaggcaggactgggcaccaagcttgcagccgaaggccttgccccaaactaccagcgtttctgcaagcag

SEQ ID NO: 64164 - DNA, 2743 bp, Homo sapiens
aagccaggctgggccgggtgtggtgcctcacgcctgtaatcccagcactttgggaggctgaggcaggtggatcaccagaggtcaggagttcaagacaagcctggccaacatggtgaaaccccgttctactaaaaatacaaaaattagctgggcatgctggtgcatgcctgtaatcccagctactcgggaggctgaggcaggagaatcgcttgaacccaggaggcggaggttgcaatgaaccgagatcgcgccactgtactccagcctgggcgacagagcaagactgtctcaaaaaaaaaaaaaaaaaaaaagtcaagctggtgcagggagggtgaagcttaggacagctgtcagctggtccagcaatgtttcctcctggcccaggcctgagccagtgctctaagctcagcctcacttgtcgcctttatcagtggcttctctgcctccacccacctgattgctggagcttctccagcacacccaactgagataacacacccagtccctatggctccagggcggggactttcgcttgacctactgcccaccgggcaggcatttcttctcattctctgaacgctgtcgggaggtaggcaggagacctgagtctttcctgaggtggtcttttctggctgagcacttctctctgggactccccacctctgtcatagggttgtgtccctctgtgacaccggcgtctgagtctaacgtcccagccttccttcctccctctgcctagtctaatagcacccagcacctaaaacaagccagagggcggccaggggcctaggctagcccccggagggtctactcaggactcaagtgccaggagggaggcctggacttttttgccttaagggctggagacccaggaaaagttcgaagaggaaacgctcatcgcagctatacgagcgtccaccctggaccaggcggcgagtgggttggaggagcaaggctggacaggaagggggcaggggctgccacggcaggctcgggagagccccacccccagatctccctccgggcggcggcgcaggctgcagcggaggaagcatttcctcattccagaggctgcgactcatggacgtcgggatcggcgcccgcccccagcagctccccgtctggggacacggaggcccgggaagggggcgcttttccaggctcctgcagccaggcctttccccgtggccctccccgccctgcgcacgcagtctgggctctgtccagggtctcgggaggctctcgggtcccggccatccctgtttcgtggctgggggaactgcggcccgctccggcaaagcggggacccgagcccttgccgccggttcgcaggagccccgggttcgatgctctgtcaacctgcttggggtgtccgtttcccgctctgcgaggtggggtcaggccaagacgaggaggagcccgcgcaagcgcactcaccaccacggcggtgaccggctggcccgggatgtaggacatctcgaccctgctctggtcgcccagcgccgctccgagaagccggcagcagagtacccgcggtcgcgccctcgctgcttaacaaaggccgccccgctcggcccgccccctcatgaatagttaacaaacctccagccaatcactggccggagcgccactccgctttcggaagtccctgcgcgtgcgcagaaaagcgggcagagggcggagcgtgtccggggcgcccacggcgcaggcgcggagggcggggcgggatctgggcgcgtgcgcagcccgagacctcccggcagtcttccgagcaagatggcgccgcgggcatttcttccactgcccgtctgagggaacgctaagtagtgtgtccggcgccgtgttccaggtaactgggccaccgtggccggggaacgcagacgcgccaccacctcccggccggcccggaccctcaatctcctcggcgtctttggaagatccgaggcccaggactggtgccaggtctcggaagctccagggggagggggcggcgtgaacccaactcaccgagctccgggcgccacttgtaacttggttttctccgcagctccgcgttgttccgcgagaaagcgagaggccgagcccgggctggtgcgatggccgcggtggtggccaagcgggaagggccgccgttcatcagcgaggcggccgtgcggggcaacgccgccgtcctggattattgccggacctcggtgtcagcgctgtcgggggccacggccggcatcctcggcctcaccggcctctacggcttcatcttctacctgctcgcctccgtcctgctctccctgctcctcattctcaaggcgggaaggaggtggaacaaatatttcaaatcacggagacctctctttacaggaggcctcatcgggggcctcttcacctacgtcctgttctggacgttcctctacggcatggtgcacgtctactgaaatgggggcccgggggacttttttaaaaaaccagatcgggaggactgtggccagcaattaacaccatgtagacttccttagttcttaagtggttgaattcgctgcttgttctgtaacgttataaataatttatatctgaagacggagagcctgtaatattcttcagattaaatgaagcgtgagacactttgtggagttctttcctgctgtaacgcttaggctgccactgatgcaaaatcgccgagatttgactcctggagagcaaggaatgggccatagccttgtgttaagtccttgtatttacacataggcca

SEQ ID NO: 64165 - DNA, 1495 bp, Homo sapiens
cgaaggttattgcaacagccctggcaagaaagggtagcttgaattacaacggcagtggaaatggagagaagtgaatgggtttaggatatattttggccctgaaatggcagggcttgctgctggaatagacgtggggatgtaggaaagaggagtcacaggtaatccctcgagttccttgtactgtaactggagtatatctccctcctgagggtagctaaggaacgggttgggacagagggttggttttttgcaccaaaagatctattttggacatggacatgttatgcaaagatgctattatctcttctaggggcgatgcccgtgagcaactggataatcaaatctggagcatttcagtctcaaacacctcctcagagtgatcccaggagatctctgcagccacggtgacattttctttatctgaagcgatgacacagctcactgaatgccattcttccacatgctggaaaagcgaggtctagtgaacacaattcctttccgtgcggaaagtctgaaatctttttaacacttcggacacagagcatcgtaaggtcccagaatagagggtgtgagcaatttcagcgctcacctcggcccaagcgaagctccagcgggagcaattgagacccagggacgaagctagggagggcctggcagcccccggcactggccggcaggggtaacccaggaaaaacagtctcctggcctctcgttacccgcttcaggccctccgccctcccctggcctctcgggacggccgcgcttacctgaaccgaactgtacgcacaagcgcgctcctgactccaggtgcacaccgtggaggcctgaaacgagagccatgaccgcgacgcgctgaacaaaccaagccgccagttttccgtcccgtcccggccccggccctggcgaggtgcgcatgcgcagggccgggagctaggaccccgcggcaggcgggcgcgtccgcgtcgcacggaagtctcgcgatgtttgcgtttgaacctcttggcgggtgccggccatggcggcttcgctcccgggacctgggagccggcttttccgcacatatggggctgcggacggcaggagacagcggcggccgggccgggaagccgcgcagtggttcccgccgcaggaccggaggcgtttcttcaacagcagcggcagcagcgacgccagcatcggcgacccctcgcagtccgacgatcctgacgatcccgacgaccccgacttccccggcagcccggtgaggcggcggcggaggcgtcccggcggccgagtgcccaaggaccggcccagcctgaccgtgaccccaaagcgctggaagctgcgagctcgcccaagcctaaccgtgaccccaagacgcctggggctgcgagctcggcccccgcagaagtgcagcacaccctgcggcccgctccgacttccgcccttccccagccgcgactccggccgcctcagcccggacctcagcgtgtgcggccagcccagggacggcgac

SEQ ID NO: 64166 - DNA, 3463 bp, Homo sapiens
ttcggctgcgttcattctctttaaaaccaggacagcaacctgacgtggaaactgactgaacaggactctgagttaccagaataacagaagtaaaattctatacatcttccagcatacctgtgatgcatcccagcattccacagaacacgccgttgacagctggcagtcgtgtttaagtgctgatctgagatctgtactgtgtgaccaagtctgtgacacagaaggaactctcctgcacccctgctccccaggctgctggaagtgcagagtggcgccgtcaaacagaactctgcgcggggatggaactgctctaggtcgacgctgtccaggatggtactcatgagccacatatggtactaaacccttaaaatgccactagaacaactgatgaactgaattttgtatattttatttaattttaattaaacgtaaaaaggcaggacattccaaggctctctaacacgagtgtctgcagccccattcgctttgagatgtgaatgtgttaacccagggtggacaatggtgttgacttcattactagataaaaatccatgttattttgtttctcgcattgaaaggctgcttggctaaggttctgtgaagatccgatgacatttccaacactttgccttgtctgctttgctctgacaaagtgcttatgactactagatcttgctcggttatgtgagattacaattcaccggtttccatcctgtatgaaacagaagttaaacagttgtaaaagcaaaattccaggtctggtggttttcctgccaggtcatgatgaaaccatcctacttctgttgaacctcgtcccaggcaggatcggggcctgcggcctacagcctgtcttcccagcgctccagggctcgtgaccctcctcctcccctcacttcattctgcgctccaagggcactggggagagtcacagtggtctcctctcccccgcattggcctaaagcaggaagagagcagcccagtcactgagcagatccctgctagggcagggctagaacccagactgcagctcactcgagattcctgagagaagactttgtgtttggagtgtgaacgtcagggtgcctcgggaagccagggaaagctgatgactgggtgctggacagggagcagggccacttctgtacctctgcacacttctagaatgcggactcatcctgcatccatccagtatgtatttatccaagcgtcactgcctctagtcatgagacacacaggggtccgtaaagcccacctggcggtagctgctttccccacaaacccaaactacatccccaaggtcagggccaggctctgttgagtaatgctccccatcacagcacgcagcacaaggctggctgtttgacaaatacacacataaccaaaagacatgtgaatgtggtttcccaactcactttaaacaaatattccgggaccaacttcaaggacgttctacaacagaaactggactgtactcttcacaaacatcaatgtcatgaaagacagaaaggctgaggacctgctccaaacgaaaggaggctgcagagaggacaactaaaggcagcgcttgatcctggattggatcctggaccagaaaaacaacggctttcaaaatcattattgggacagttggcaaatttgaaacaggaactacaaattagcaactcctgggctgatcagagaatattacacatttcctgaatttgagaactgtaccatgggcatgtgagaggctgtccctgttcttgggaaatgttcactaaaacatcttacggataaacgagcatgatgtatacaaataatcctcaaatggttcatggttcagagaggataggaagaaacaggggtgagggagaagaggagggaacgaatgaaagagaaaatgtggcaaaatgttctttgttgtacccttcaaactgctgtgattttgaaattatttcaaaataaagttttaaatattttaaaaaatttttttctttctccccttgataccaggaagaataaagtttttaaaaaatgggcaggtgggccaggcgcggtggctcacgcctgtaatcccagcactttgggaggccgaggcgggcggatcacaaagtcaggagatcgagaccatcctggctaacacggtgaaacccggtctctactaaaaatacaaaaaaaattagccaggcgtggtggcgggtgcctgtagtcccagctactcaggagggtgaggcaggagaatggcgtgaacccaggaggcggagctcgcagtgggcggagatcatgccactgcactccacttgggtgacagagcgagactccgtctcagaaaaagtggccaggtgcacttgtagtcacagttacttaagaggttcaagctacttgggaaagcttgagcccaggagtttgagtccaatctagacaacatagtatgaacctgtctctttaaaaaaaagttgcaaaatgttcatggatggaggagacgtgctcggcgtgaggtgaaagggctgcctgtgggtcgggcgtggtagctgacacctgtaatcccagcactttgggaagccgaggtaggcggatcgcctgagttcaggagtttgagaccagcctgggcaacatggtgaaaccctgtctttactaaaaacacaaaaaattagccaggcgtggcagcgtgtgcctgtagccccagcttcgggaggctatggtgggagaattgcttgaacctgggaggcggagggtgcagtgagccgagactgcgccattgcactccagcctgggcgacaagagcaagacttcatctccaaaaaaaacagaaagggctgcctgctgtcttcagagtgagtcaaaagcactgaggcacagccttcagacacaggaaatggttctattctcccacttgccttctgactcttaggaagccagaaagagtgacggcattgctgagaccagagcccagggctgcagagcagtggtactcacgacctttgaacactcggtaggagtgccctgctcagtgccaaggcctcacatgcgagccctcatctgagcctctcagccacctacaaggtcaacccgatttctcagataaggatgctgcctctgagaggccacatagctagtaaggagcagagctgggactccaaacaggcctgtttcctccagaatcaggactctgaaccaccacaaactctcctgccttcagctcttttggtgtgtagactttttttatttttgtttttgagatggagtcttgctctttcatccagactggagtgcagtggcacaatctcagcttactgcaacctctgcctcctgggttcaagcgattctcctgcctcagcctcccgagtagctgggactacaggtgcccgccaccacacccggctaatttttgtatttttagtagagacggggtttcaccatgttggccaggctggtctcgaactcctgacatcaggtgatccccgcctcggcctcccaaagtgct

SEQ ID NO: 64167 - DNA, 1208 bp, Homo sapiens
cagctctgagaactggatatacagccaccaagtcacaagcaaaacacctctcaccatccccagcgcggtaaaggagggaccaaggatgtctattggtcgtctgctagtttgctttcattaagagtcagatgctggggccacggtgtaggtgtcactggagctgcggggggggcaagatgaccccgaagtcacgacagaaacagtgagtttctgctgctgacaagtgcagccctctcaagacaaagagcgagtgccatgtttcccagatacaaattcctccggggcaagacccacaaggagacctggttgctggcgccacccaacagctccttctgggctgcccctggttctgttcccgcccagggctccccctttatctcatccttccagcccctcctcactcacctccttgcacagcgcggctcagagggggcagcggaggggggtcctcaactccctcccagctctccgccaccaccccccagccccctcaacacccatttccggcgccccggcgtcctttctcccgctccgcgtccctcctccagcccggcgttcccgttcccaggacgctggctccctcctctcccgctcccttgacttccccggctggggctccggccaccgccccttccggccccctccggcgctagacactagccccgcgacctcttccttaccccccgacccccgcccgtaccgggatcagttccttgagcgagcgccgcacaggcacgatttccagctcgccctcctccacctccatgggctccggctcgccacggtcaacaccggactccgcctcaggggacgggagccccagggccggccccgccggggcctccgccttcaccgacacccgcaggccccgtacggccgccatcgctgcctgccggccgcaccactgagagcccgcccctcacggccgccggctagagcgccgctgccactggccacagaggagccgccgcagctacctagagcgtcgccggcttcggcccagaaggccgcccttagcgccgccgccccctggtggcgggagaaaaccgggccggctgcgcgggcgggacctggggaggagaaggcgggactgagcggggacgggggcggggcctgcgggaactacggagcttggaggagaccggggtagtcaagggttacaatgtagctacgccttgaggctaaagctgtactaaaagccaactttc

SEQ ID NO: 64168 - DNA, 770 bp, Homo sapiens
ggttagggtggctgggcaagtcctcacgctgggctgggttctcccgggtaccaccctagctgtgggagtctgggaacaccccttcccctctgaacgcagggtcgctgtgaagtgggggtgggacagcgtctggaggttgcagggtccccggccgcgaggataaagcggcaggagaccggggccctggccttggctctcaggctctatttgtaggtgcacagcgttccctgcccccactgcctgtagtcctggtttccataacaaccctggactgttcttgacccctgaggctcagctgttctgactttccctcctggatgcccttctgggtcttctcgttcggcagtgccaggtctccgccctggtgttccctgcgtgggcagccagcccagctccctggggatatcctgtcactgtggcccagagcctaggcccggcgtctgccaggtcaggcctaagcgctctgggttctttccaggtcctcagatggggcccgggaacccagagaggtggaggaagttggcagcggcacccagatccccagcgtggcagggctgggcactatgtccaaaccacctgacgcctgggctgcagccaacctctgcggcagacgcacaggtggggctctcggatccatagctgggcctgtgggtgaccttggcatgccctctatctctctacgctgactccctgaagccataacttacggcacacccagcgcaggcccagtggacccaggggatctgcagggcaggtgagcgtggtcattc

SEQ ID NO: 64169 - DNA, 3198 bp, Homo sapiens
caagagatctagttgatagtctgttttactaatgattcactgggtaaccctggatcagtcttcttaactcgaagtgaagcgcccagtaaataaactcccaaaatgccttccaaggaaaatattttgttgccaaatcaatttgctctcttaatgacttagcagacatgatcttggtgattatatgaagaactgcataattacaagtattcacaggaaacctggtatttgcctatcagtttcggatcctatgaaggtttaaatgagtctaatatatggttctttaaggatctacaaaccagtatgtattttagaaaagctagtttttgcatgaggaggataggttttagaatgtgagcctttccagcatgttactactgtctttccacacttattcggcgcccacactgaattgggaaggtgctgtgtaaaaacctggacaggacaatacaaaaaatggttctcagcgccactcctcctatccttacatctcttttctctccaaactgttcgagaatctgatagaagatctccagagtagcgtcaatcaactgcacaaaggtctgcattacaacatacagagagagacatatgggcttgtccagctcttcagagcaaggacggcctgatgcagactttccagacctctaacataggttaaagagaaacgaagcaaacgcctggtgaaaagctggaaacacctcatatgggtccccgcctggcctctccaaagcaaatgcccacctcttccttcagtcccctgggggcgaccgccctgccccatccccgcagtcgcctgccggccctgacctcctcgaactgctcgctagagcagccggcgccgcgagcctccagcagctcccggaactgctccagagtgacagactcttcgccgcggcccagccgctcttccagccagcgaaacaacgcgccgcgatgcctcgacaccagcgactcgcaggggggtgtgggcagcaacgctgcagcagcctctcgcagcctggccggctccagcagcgccgcggcgggtggtagcgctggagccgcgacgcccgggccgggggtcgtgcccgagaccgcggcccagtcctggtgtgggccccagccctcgccaccggcagctgccgcttcgtcttcactgctgtgactcggagcgttccccatggggtctccgtcttgggcgcctggctctgcagccgccgccgccgcctccccgcctcgacctgtcaacctccgacagcagctggcgggcggggacgcggaggagacgacggcggcccctgcggcttccggcttcctggccgtcaagcgacgaccgctgtcgcaaaggcgccgtcacgtagataggcggcctctaccaactcacgacagctaggcggggagcgccgcctcaaagggtgcaaccttgatttcccagaggacgagtctgtctcagtatctacgtcattccgtagcctccgctgccgccatctttgttggggctgacaacctgcaagccaagaagtacgagaagggccaggcgcggtggctcacgcctgtaatcccagcactttgggaggccgagacgggtggatcacctgaggtcaggagttcgagaccagcctgaccaacgtggtgaaaccctgtctctactaaatacaaaatattagccggacgtgggggcgcgtgcctgtaatcccagctacttgggaggctgaggcaggagaatcgcttgaacccgggaggcggaggttgcagtgagccgagattccgccagtgcactccagcctggacaacaagagctaaaactctgtctcagaaaaaaaaaaaaaaagtacctggaaaaagtcgcagacagcgagcttttcgccagtgccaggaatacagataaaacgagagagactaagggagggagcgcgagcactagcgcgcgagagagagagcgagagcgcgcgcgccgatgacgtcacgctcggcgtctcggccatcttagctgtagatagaggcggcaacctcggaagtgcggagcgggtgggcctatatagatgttgaggtgcggaggccgtgggcttttgttgggcctggctgtagccgcagcagcggtaatggcagcacggcttatgggctggtggggtccccgcgctggctttcgccttttcataccggaggagctgtctcgctaccgcggcggcccaggggacccgggcctgtacttggcgttgctcggccgtgtctacgatgtgtcctccggccggaggcactacgagcctgggtcccactatagcggcttcgcaggtatcagcgaggctgctcacgcctttctctccgctggcgcgagccagtagccacctgcgcgtcgttcgttggttcattattcatctatttccccccccatccccaccccacatccatcaaacccgtgcggtgggcgggacgagctgcatgcactatccttctaggctctctggctctggcgggactgtgggccagctctgtcatccaccaccgccctgcgtgacttacattggagaaacatgtcttctgtctcttgttacccattacccagcgtcggaagccctaggatacgggctgtgtgccggacttttgtgggggctcttagggcacagataaacgagatcccgccccgcccctaccctcacagtttccttaataattccaaccatctcttcattatgccctggtcccaaataatctttcttccccccacccctaagcatagtgttttcaaggttcatccatggtttatgagcatgcatcaatactttattcctttatggcccgtcatatagtacatttggtctgagtcattcctgcttctagtacaagatgcacctgtttgccttccttagaaggttagggcagaggaaaggggtccagtcacctttacagtccttgatacgtagaccaaagttgtgcatatgttaggcctcaagaaacatttgtcaaattaagtttatgctggtgtccctgtgttacagctgagggggttaaaggatgcgatttgcctgaaaccctcacacctgaatactgacagaatatggactcggaccaccagtctagtgctttttttttaaagatggaatctcgctgtgtcgcccaggctggagtgcagtggcctgatctcggctcactgcaagctctgcctcccgggttcacgccattctcctgtctcagcctcccgaatagctgggactacaggcg

SEQ ID NO: 64170 - DNA, 422 bp, Homo sapiens
aaattagccgggcatggtggcgcatgcctgtaatcccagctactcaggagactgaggcaggagaattgcttgaacctgggaggcagaggttgcggtgagccgagattgtgccattgcactccagcctgggcaacaagagcgaaactctgtctcaaaaacaaacaaacagaaatttggcaaggcagcgttggtggcagctggtgcaggacaatgaatgacgtgttaaggaatttggacattctcatagaacagagggaagcctctgaggattctttggcaggagaatgatgtgatcagtttgtgtttaaagtatcagttgagtgtggtatgaagagcagattggtggggcaagaatgaatgcagggagggcttccttgaggtttgctgtaggagttcaggtgagaaaggatggcagcctgggc

SEQ ID NO: 64171 - DNA, 476 bp, Homo sapiens
ggcgtgagccaccgcgcctggccagacctgagctatcttttgtcctttggctccgaaatcacagaactaccagaatttgagttgaaaagagtctcatagatcatctaatcaaactatttattcttcaattgtgtaacaagagaaaaccaggtgccagagaggtcactttccatggaactacgtccccagcggcggtctcctgactgccagctagagtgctttgttgacaccctcaacctcactcacccaatgacttgcaataatttctgcacagtagttcatcagtgtgctggcattcagctcctctgccgtctggtagaagcgaatacagttcctgacattcactagagacataacacccttctcacatctgtaagagagtattcatcatgaggagtattactggacaaataattcacaaacgaacaaaccaaagcgatcatctttgtactggctggctatgtcctattaataac

SEQ ID NO: 64172 - DNA, 913 bp, Homo sapiens
attcactttgtgactcagacgaagcagccagtggtataagggtaggcagagaacaaggatcaggaaggacagtgtgtgctgcaactgggtacttgtgggtaaatcgtccacactgtctgcttccaatctacttaagcaagtggttgtaaaagtcagatgactgcataaagcacgagttctctctaaaaggagtagactcagaagagaaagcagttggcctccgagtcctgcgtgagggaggtaatcatctctcagaaggccctgcatgcaagccagaaaaatctctgacttcaaggatgaaaagtaaaataacactgaaacttctgacttcgtttcactgcaggccaggatgcatgtaaatacactttggagactttaggattttctatgtggcctagttttttgttttggtttgaattttaaataaatgttttccaagacatctgaaatggatgggaataaactgatctgtatgcaattaaccattaaatgaaacatactgagtaaactgactttgttttttactttatttatttagggacagagccactgttgcccaggctggagtacaatggtgcaatcacagcttactacagcctcgacctcccaggctcaatcaattctcccacctgagcctgccgagtaaacgggactatagacacataccactgtgcctggctaatttttgcatttttaggagagaaagagtttcgtcatgttgcccaggctggccttgaactcttggccttaagcaattctcctgccttggcctcccaaagtgctggtattacaggcataaaccacagcacctggctgactttgttttttaaatcctctatttttaatctgtaaaaagctgagaaaggtgtcttgaatctcctattatgactctggtttaattaaattctctgag

SEQ ID NO: 64173 - DNA, 1457 bp, Homo sapiens
tacacacgccaggcctccttcacgaggttatctgaagtctaatgcaaatgagaaaagccgaccaactgtcaggtgctgcccaaatctaagatccatcaagtgatgggttcagtcaaagctcaaaaccaacaggaaaggtcgtggccaagcacactgcagtcactcaataaacaaaggtcaaataaggaatactgttctccaataatggggtgaagaggagaaccaggctgcccagatccaacaatgtccctgcacgattcctgacaggtaactccccgtctctgggccttctttccccctacgtgtacaataaggctttgacaatgaaggcttctaattactgctacattaagacaggcagactctgagagaccagagtgccttaagctgcaatgtcatgaaaagtgcacgagaccagagggtaggcactggacggggaggcaaaggcacagaggtctggtttgagcagccctcttgtgagcagtgtgaccttggccaactcccttcccgcaaaccccttcctcccgtcttcatctgtacgcctggcctgaaggctggggttgcagcagagccggagccgccagtgcgcccgcctgaagcgtgggccagctcgctgctgcctcgcccccaccccaccccacctcaccccaacccagcccgaggagacccacgctcttccgcaagcgagggatggaccccttccggatgcagaacgtgccaggacagcagtttcgatttcctaaggagaaggcttacttcccccggcgtcccggcaccgccggcaatcaagagcctcccgtgctgccctcggggccccgcggctgcacgcagcaccggcgcgggacctgccagcccggctccgcagccggccgcagtcccgcggggtcggcatcgcgggagggacgttgtcataggaaccgcgctccggaccccggcccgagaagctccggagaggctagacaggaaggctcgcgagacccgcggagcccccatgcaaccacgcccggccttcccctcccacggcagcttcgcacggccagcagcgcccccacagctccgtgtcttcccgcgcggctccacaaaaaaaccctaccttccgccatgtctggcccggcactgcctgcaacctcgcgagaagtgcgcggctcaaccggggcggtgcggaacggaatcaccaagtctcgcgagaatcgcgggaggcgcggcaaaaggcggagccgagggtaggaaagtgggtgaatgaaagcggagggggttgctggactctgggggaagcggagagccgggtttctttttaccgggtatttttgaggctcgagatttattaagcactgactgagccctgtcatattccacgtccttggcagggcaccgaaaaggatgacacaacgaatgcagactactctggagaagcttggcaatgagagggtcgagagagggggtttgttggtccttag

SEQ ID NO: 64174 - DNA, 544 bp, Homo sapiens
cttgaccaacatcggctcctgatccccagagaagtaaacaggcaattacaatgtgctccaacaacagtacaagaatttgagggcacacaaaaaagaagggcacataacataatcatgaagaataagaaaaggcttctaaaaagaaaagaaataaaggatttgggtgagggaattcaaggtttagaatctgaaccctactttaggtagaggagcatgtacaaaaacttgaaatagggcaatcagtatgtgactggaacggcggggggcaggggagcagctgaaactaaacagaatgtcaaaagctggacagcaaagggcctttgtaagccctgcatgcttggactttatccagagggcaatgataagcctttgaagggtggttctttttttctttttcttttaaacaatggagtgacctcatgagatttacatttgcaaaaaccaatcttgtagtatgtagaagattgtttaaaaaggcatgatgagaacaaagaaacaaaaagcaagcaattcaagtaatcttgaaaagtgtacctcgagtata

SEQ ID NO: 64175 - DNA, 2276 bp, Homo sapiens
tccaaacctgcttgctcatggtctaataataaacccaattatacaatctgtaagaacccctgacaaccttttccttaagaagccataaaggtgatttaacgaacacctcaaactcttagtaaatgtatttcaaaaacagatttcatcactccagtctttggcttctgctgagggctagaggctactggttttagagtgggtagggggaagatcgcttgaactgagaatgacacacgccgggtgttgtacagcaggggtaagtgctggttcatttctctttaaatctggcagcacgtggggctgcattgtgaagccaccaacccgcctccccccttccactccgcacacggacgtctccactgcgcatgctccgcgcacacagtcctagcagagtaggagccaaccccctaaaaagtcaacctggaagccgcaaacggccggaggccgggacaatgggggaggggggccgcaggctcctcggggaggccgacccggccgccgccccgggccagagcctgcgggcgcagctccggggtttgcaggcctgcgcagcagccggaatcgcggcgagcacaaagcccggagccggccagcgagcggctctccccgcggcccgctcctaccctcccccagccgggcggcgcagccggagcccgtgccaggcggaggcaggcgaggcggcgatccgcactccgccagggtctccggcaccctcgcgcccgcgtggaggccgccgaggccagcgcttttgttgtcggccccaactccgcggacccagcgccgcccggggagaagttttgtgcgcctcacctatcccgccagggccggtcccttccgcccgccctcagacaccgagccggggactcgcagccgcactgggtccggacgctccagccggccccgaaggtccggcggccccggcagcacctgaacccgggacccgcccctccaagctggcggccccggcctggggacccgcacacagcccctcccccgcaacgtcctacagaacggtgggggaggggacctcctcctctccgaccccccgggcgccaggcccagtccctgggccggagctgggtcgcgtccccgcccccagtgccctccaagagccgggcgagaacggctgggcccggccgggaccggagcctcgaggtccccaccctcgcaggcccgggccccttcggcagtacggccgctggcccgggaggagaagagggactgggctgcggctgtccgcgatcgcggccgggcccggcgccccgccgcccgcctgctcacctgccagctgtcttcgcagtagcagtgccgactgcagctccgtcatcctccctgccgagggcccgggctggcgccggggcttccgaagggctggggacaggctctgggggcggctggagcggggtgtgccgaggaacccgggccccgcgaccggagcgccggagccgaggaaggccgggctgaggcggcgggagcggcgcctcgctgccggtgcgagtccgctcgcttcagctcttttcacagcgactcacgcccggaaggggagggtgcccgggctgccgcggcgcgcactgggacttcgctcgcccgcttccctccttcaacccgcccgtcggccccaccggtgccttcccccgccactgcctcactgcgcgcagggccgctcggcgcaggcgcgctgagactgccgacttgggaagcgtcccgcccgctagcccgacccctcggcctcccgccccgcccccggcggcggaaccccgccccttgagcgcagttgtcccgtccgccgccattttgggaaggtcgacgcccggctgccagcccaagcctccgctggtagacgccccgcggacgccatgacaaagaggtcgcagagggtcaaatacagcctctggattgaagcagtggatataggagcgaagaggccagaagaagtggtagatgtctagtccttggcgagcgcccaaaagccatctaacactgccacatggtgtgcgaagtaggaattgttagaaagccgaagttagtactggtgtgccccattttaaccaaacatcaaaatagaggcaatatatgatgataactcactttacatgaagagtgcacaaaaaaagccaccgcgtccggccctattattattgagccaccgagaccggccctgttattattatcatttatggacggcaattctctctgtcgcccaggctggagtgcagtgatcatagctcactgcagcttggaactcctgggcttaagggatcctcccatctgagtct

SEQ ID NO: 64176 - DNA, 477 bp, Homo sapiens
agacagggagcccaaagggcaggaccagagccagagggtccctgtgtgcagccgtgtccctggctccccaaagccccagccctgcctgtcccccaacatgggaaagggctactgcttctgggaagatgacgccagcccagccacaagcagaggggctagacctctcctcctttcccagctccatggccctgggccctgtggctgcagacacagatgcgcttgcacatgttaaccaggtttactgagcagactggactttggaaaagtaaaccagccacaactttattgtcctcacactagtttggctgcatctcctacccatggccagagcccattgcttctctagtcacacacatgaactaaacagtctggtcccactgaaatcaaaacaactttagccctgcttccaaataaagcttttttttttttttttttttttttgagacagagtcttgctctgtcgcccaggctggagtg

SEQ ID NO: 64177 - DNA, 1879 bp, Homo sapiens
gacctgcatttctgatgaacttcccaagtgatcctgccgtagcattccgtagagcacgctttgagaacactggtctcacgccgcaagctccccagtccataaatgctttgccaaattctagccatccccttgttgacatacgcctccaatggggagctcgttctgcatacctcgggcagcccctgcctctcggggggtttctgttgatgaaaatgatttggttcagtcacagccaagacccacctctgccagcctccccttggccccgctgggccatagaggggccctgctccctggagactgagatcgtgtcccctgaacccgcatctccccaggcagagctccctgcctcccgaaacctagtcatgaggtcttcagctccctcccagccctgctgtctgtccccgccccactcaggatggcccagagccagctcaccccaatccccctccaggcaggggacagtgtaagcaaaggtgtggagggaggatcccaggggcacgatctctggatcccaaccagttggggggctagagcagaaggggagctcattccctctttctcagccctgtcctctggggtcctggaatccagccacaggctcatctcccacccctcagcagacgtccccacagttccccggagagttgtcacctctgcgttctccccctgccccaggtctccatgcttccctgctcagcctctgccccccaggtagctgtctgctcactggcctgtctcaccctctcaggggcgtctgggggcgaggcctgggtgggggtgcaggaggcaggctgcctggtggctgctgctccgacttgctgcaagcccttgggtggccctggtttcgccctcggctataaagggaacggcccttctaagaagggagagccagaaacagaggtgtttttgtctcagaatagagtgagcctggatttttgggaacccaaagcctcttatttctgaaattaccccctgggctctccagcttctgtgggcccagccttggctgctggctgcacggagacaatgaggacttggaacaggctgggggagacccacctctctcgccactggcagcagtgactgagctgggcccagcaggttggggttcctgggagaggaggaaggggccagcctacctggacctaactgtgggggtcccagcagccccagcctccatgtggacctttctgaacattcaggttcctccctccaggaagcctcacctgccttcccagagccaccagtgagtaatcacataattatggggtgagaaggaagtccttggggaaggtgcaaagctgttggtcagttccttctcaggcctgttgacagatcctggtgatggcaagaggcccggtttctcttgccacctgtacatggtggctcagtcccagtgaccctgggaccagcgagtcactacagtgcctcctgccactctgccctgcccaccaccaaaccccctgcatctgtcccctgggattctggaatccagagatcgtgtccctgggatcctccctccacaccgtcgcttacactgtcccctgcctggaatgcctttccccgtctctttgccagttactctgccatccgtttacagggctagtgatgaacttgtcctcctcatctttctcagatttctgaatgttctattacaaatgcataaatattgctagaaacaccggctcctccttgcccatcacagcagagtggtcaaaaggccagatcctagagggagaaggcctgcaatcctctctcagccctgttatttcaggctgggtgatgttgggcaagtcacttgccctccctgtggaggttttcctcatctgtaaaaatgcaggtgatcatcatctccctctcatgggttgttcaagtt

SEQ ID NO: 64178 - DNA, 2836 bp, Homo sapiens
acctaatgaatgaatatcagaaggtcctttagccacggagttcagcctcctgttatactgatgaagaaacagaatcccgcccagtctgagggcagcgtgcagtggaggaagtgctggattagagggtaaacacacctgggtttagtccatgcactgtcatttaccaggtgttcgaccttgggcaaattacttcttttccctgggcctcagtttcttcattggcgagatggaggaaagaaccctaccagtcctctgtctgacagccccaggttactgccagagcttctcagaaggctgtagggatttgtcctgggctgcacaaccagaaagggcttcttgtcctccctgtccctctgcccttggtggccccttatcccacacaaggacttattctagaggctgcctttgagttgaaaccccagtgaaacacagtgggaagggctggcttgcttggtggcagctcagaggtcccccaggtttgaaaggctcatgccaccctcttcccctgctctgggaccttcccagtggtgaaaagggaaggcagcagaaagagaatgctcccctttctgtcaaggccgaaagtgtccacctggacaggactgtggccaaagggatgaggagttttggggcacgggaaggggaccctgggcttgggtctagagttgtggttgtgcctccttcaccactagacacagttccacagctgggcagcctcccacagctggactctgtccacctgctggcaccatcacacacttacgagatcattgctggggccgggttctagccccacggagctcctagctctctgtccttgtttgttaatcacccgtcatgccaggccaccatggggaactccccccatccgcctttgcaggcctgagctcagcgagctggaaagaggcagcaggcaactttgagaatgaaatctgttttcctaaccctcccgtcacagtcattcatacccagcacgctgaagcatatttttagtcactttgcagaatttaaaatacacctcgaaggcgccaagaaacaccagcttggggattaactctgctcacaagagacagtggaggggggcggggggggtgcctcgtgctgtgtcacccgttggctatgccatgactcactgtggccgaaagcttcaccagatgcacctgcctgtggacgtggggtccggaaaagcctctagcggggagtgagctccagccctcggggatgatgccagagcctggggcagctccagccctgccacagcttcactgcctgttcgtaatgggtcacgtccgtgccctgggacttgtctgtgaaacacagggaatgattaactggtttccgagggtttgtccagttctaacattctgtcctctgcactttatacaggattttaatttcgattttaattccccaaacaggtgaatgggggagggaagggggagatcgtcacagagccacagcacctctaaggaggggtgaaaccgtgatgggatgtcaggaacacagaagcaccccaaccactctccataggaggcagacccccgccccgtcccaccaaggggaggtgaccacccgtggatttccagactgaatcccatcctgccatctgcccccagatacagaaatggaggcccagagagtgggtgtcatgttcaggatcatgccacacaccagggcagagctgagctaggacccagcctcctgtctgccactgggggctttgtaccctctctagcacatacctggaagtctgaagcttggagatgtggtccctcaggagggaaagccccttctgaatatcctgtttctgttgggccccaatcacagcccttgctctccccgccaggggctgcgggccactctgtggggcaagggtagggtccgggtgcccacacaggaatgggcccggggtaggttgggggctggatctgggttgccctggggaggtgggagacacagcccaccatgactggtggaggtctaggttctgggccctccctgaactggttaaatccgggcgtgtgagtatcggaggagccaccggctctccaactggcgcccctgactttagccatctgagactcctctctccagttctcccagatacgctaggctcaagccctcagcccggctcccagagcctccgccgggagtccacgcccgaggcaggggttgggtgaagggtactgagtaggtgctgggagccccgtcaccagcaccctgctcccagctccgtagccagagcaaaccctctcccgctccccgcgggcgttcgcggccggtcggccccggcgtgactgcgcccccattggcaggaggggctctgccgcccgggcccccagtccccgggccccccacccccagggcagcacgtgcggggcggggctgtggcccgagcccggagctgattgggcgcgggcctggtgggcggggccgggccgcagctgtcagagccgcggcggcgaacgaggcgcagcgagctgagcggtggcagcgccgcagccggggccggagcgcaggagccgacggggcccgaccaggatggtgcagtggcggctccgcggcgcacgcacgcgctgagcgggcccagcctgggccccgcgccccccgcgccccccgccgccccgatccgggccggcatgatgtgcctggaatgcgcctcggcggcggcgggcggcgcggaggaggaggaggcggacgcggagcggcggcgccggcgccggggggcgcagcgaggggctggcggtagcggttgctgcggggcgcggggcgcgggcggcgctggagtctcggccgcgggcgatgaggtgcagacgctgtcgggcagcgtaaggcgggc

SEQ ID NO: 64179 - DNA, 513 bp, Homo sapiens
ttagcggtaaactcctatgcatgcttcagtgcccagctttgtcaccaccgcctccgggaagcctctcttcattatcctggcaggatctggagctccttggtggttccccaacataggttgtcctttaaacagagcaacctatgaacaagatctgcccctggccagacagggggaaacttctcttctgattccttctgtccacttgccacctagcacagacaggcacagggagaacaattcctcctcctcccccaacatgtgtcagtcctgatgcaactggaaatctccctcctgccacattctgatctgatctcaggcaggtccttggaggcaggcccagcaggaaaaattctttttctaaatgtgaggaaataatttctgccttgactaatttaaacaagggcccagtgttgaccaaggccggcctgctctgggcagggtgtggcattaagcaccttgcacgtgctatccagcacccagacccaccctggagagctgctatttttatcttca

SEQ ID NO: 64180 - DNA, 957 bp, Homo sapiens
gggagggcgggtgaaggggcgggagagctggtaggaaggcaggcctgccaggaacgtgaacccagaggcagggaggggatcagagagtttggggtctgcctctggccagggctggaaaacagggttgggcaggcagacagagcaccatgtggagactgagggggagggggcatctcgaggctcaggttagtggctgggaggctggcggtgccaggctggcactgaggtggcgctgcctgcccgccctcctccccccgctgggtctgagcatccataggctctgccctctctactcagcctggctcccaggcgtgcctgcggctggggctgggcggacagaggctgtcttcacagggccaacaatgggctctagcccagccagctggggacaaagggctgtcttgagcggccagcaggggcttgtgtccctgggtggggatgggagcaccctgggaggagccaggagtggagctaggagttcatggccctctgggcgtggcaggggtgagtgtgacacttggtcctgtgcccaagggtcagcctggccagggtcaggaggggacaggagagagtgtctgggaggtgtcagggcaggctctggggcagagaggaaggactcgggtggattctcagggtgcccgggtttgggtgccccagcatgggacagcccgggagatgagtgtgccaggcactgcggcccctgcacttcgggaagcctgccttaccccaccctgagcctccgggcgtatccgcttccccctggggtggctctgtgtcctcccgagtccatgggctgcggtggtggtggggaggcctggcgcagttcagagcctcagcacggagccaggcggtggcaggggtgcgccagggtcactgcacaggcccagagtgaagggaggagtccgtgcagattaagtgctcttggtgctgggcaggaccccctctcctgcctccacc

SEQ ID NO: 64181 - DNA, 2174 bp, Homo sapiens
attccaggcacaggcatgaggggccctggaactccccattccccaagcctcccacccctggggctgctgacctccctggccccactctcaccttcttcacctgatgcaggtcatatttttcttgtatctgctgcaggatgctgcacaaggggaggtcttcaaaagactgtaacagctgccaggagttgtgtggcaggaggaagagggttcaggagagtggcccaactacgtcttcacaaaccttaacctcccttcccccttcaacttctcccaagaagcctcaggtccctagtcccaccttctatgtaccttctatggcccctagattactagtctgaaatgctcagccactgggtcttctctccgcacgtggtctgagctcccctcaggctgatcctgcaggcctgggtctttattgctctgccccttgtcaaggcgcctcagagagtggtctactccaatcagctgaatgcctctgcaggcctaagggagcccacccagcgctcactgctcccagaaagtgtacctaagaggccgggcaacccaagcaccaaatagaaaacctggccaggccttgctcacaccttctccactttcatgaagaggcctccctcaggttggcctccagtctgctctgccactcccgacctctctctcgggctgcccctccgccacagctgagacaccacacccgccctcctcataccccaccattttgacctggatggctgggaccctgccaggagcaccacctcacctgtgccagggccaaactgtagcagggccgggctgtttctcgcccgaccccgagtcccgtgattagacgcttcagggcatatttcatctcggacccctgcggaaccaagcacaccctcgtgttcaatggtgacaacaaggtgcacgcccccgcgcaccctggcatccaggttcgcgaccacgtgcccccagtctcaactccctgggcccgccgccgcttccttgccgggatatgcgcagcctctgccccagaccccgccactccaccttcggcctgccacgcagatactccagcagcttctccgtggccgcaagtcgcgtctcctgctcaggcttcgcaatgtcccagaagaagtccaagaactcgcgactgtgcttcaataggccatagcggtcggcaggccgggcgccactctgcgtcgcttctccaggcgacatcggctgggcgggatcccggctctccatctccgccacactcaccgaaacacgaaacacgtgtgctccggccccagccgcttccaggtcagggcacggcgcatgcgcaccggtttgtgtcggctcggaggcggaagaacccggaggggcgggggaaccaagagagaccggcccagagttaaaagagcggcatttccgccgtagctctgagcggaagtccctcgcctagcggcgtcccatctttcccagccttctgctcacacccgctccgccctggcggctgtggcatctgcccctttggagccccaggggggcatttctaagggcccatctcggaaacaaacctaggtgtagcacttcgatccgactcgtcccagagcggcccctgcgctccgaacattgagccattcaacaattactgggctcctgctggcgtgccgtgctaggcggttggaacaaagcctctgctctcgtggaggaacacggagccaaatgcatttaaaaagatcataattatgaagagaattaggaatgcaagggtcaggaggaggcttttaagtgctggaacgtgaatacatcacccgttaaaaacacggctaattactattcaatagggtctccaataatgatttgaggggttggtcagggaaggcctctgtgaggaagtggcatttgggatgagagctgagtgacaagaagggcccccctcccccgtactcctgcaaggatctaaggggacgaaatcccaagccttgcaactacagagacccagggctggaggggctgaggctggcgagaagcaaggctgcatggggccccgggctgggatttcattctgagggtgatgggaagtcactggtgagtttaatgcaggggcaagcctggatccgatttacattttaacaagatgatgctggctgctgtgtgggggatggactgtaggtctgcgcaggtggaagcacgggaagaccatttagagatag

SEQ ID NO: 64182 - DNA, 674 bp, Homo sapiens
aggtgttgttattgttgttattgttctttttagacagagtctcactcttgtcactcaggctggaatgcattggcgccatcccggctcactgcaacctccgcctcctgggttcaagcgattctcctgcctcagcctcctggttgtgaggttgtctggagagtctgtaaaaaccaaggccatctgttggtggcctcagcttggttcatattgggctgggctccagacagaggtttcctcagaagtgtctactatggggctccacctcatgtgagtgatgcatttctgggaaagtccctgtgagcttggtggctctgctgagccacaggcacgtggcgtggtctttgccatgaccttggagaggaggcgtaggcactctggctcatgctcactaactggcagcgtgggtcccagtgccagccaggctcaggccccagtcctgctcggcatctacaccgtggcccatcccctccaacttcagctctgctgtcttccccgcccccagagactgccagcaccagctcctgtctcccctgcctgctcctgtctcctttctcttaaggagaaatctccatttttggtctacaaaactgtctgtcttttgttattgatcatgtttgtgtcattattactttttaaaagatctcatgtctatatgtttgaagcagaaggagatg

SEQ ID NO: 64183 - DNA, 733 bp, Homo sapiens
tggagcagcatcttggataatatgcatttccccaatgcctggtgccctggcttgtgcaccataagtattcaataaatgcttgtttaaatctttcttcctttccctttcccaaccccaaactactcctatcttggctacaggcccttcatttgggggatgatctttagtttccagctacctactctcccaaagccccgtctctagggaagcagaagcaacaaggatactgagtgtgacgagagaaggctaaaggccggggctaggcagccggttctttcaggggaaaagcatgaagactgagagactgttcagtcctgccagcctttggcaagagtaccagaaaccgaagcactcctatgtggcagccaagcccgggacgacaggccaaagggcactctgacagggcagcaccacctccccatccctgcccttgggtcctaaccgaagccagactgcaccagcctccacgtggacctgtgtaaatctcctctctgctctcccaggtccaactctcctccacagcctgccaaagctggtcaaaaagaggagtcacttccctcaaggatgaactgtaaaggaatgcctgccacttagaacacggcccaagttcctgagcacagctttcgaggctctcaccacctgacccccgtaaacctggccagccacatcctcatgcctcctttcctgcatcacctgctccagcgaactaaagcagcaaggtgccctgaaggtc

SEQ ID NO: 64184 - DNA, 693 bp, Homo sapiens
actgaaaataaaaaagcaacagcagaagaacacttagcattctagtctccttaactcttactattcacacttctatcctgttaagtaacactcaatttcccctccactttcatgggggatgcaggtagataaagataatacctaacagagctgaatcaaaatacacttttgcagtaaaaccaaacctttgttcagggacaaactgctggcctgtgtcatttgagaggttaacttacagaacatttgacaagataaccagtttttactaaacttagtaaaacctcagtaaataacctctgctaatctttaataaaatcgatgagtcactccaaataccttcttgacaaaatgtcctgccctgcctacccaaagattctattagctgtgattagaggcattcacatgaaaagaaggaaccagcaaggacacaacccctcgctcactcagaactagcatctgctcaggcacttttcagatactgcgagtaaccagttactaacgacactgcaggcatcactccctgatcacagcgctcaggccgatggaactctgactcacagtccttcccaggccagcgagctacacagccactaacaattgactagagctgctacctgccctggttttacaattaccagataatataacctttggttacgtcacttaagtccctctcagctggttttctcctct

SEQ ID NO: 64185 - DNA, 1410 bp, Homo sapiens
aaggttagagacccctgatattcaattctcatcttgtttcgcagcattttgtgtatcgccaccacgtctgtaaccggagcgcctagtacagtatctgaccctcaataagagctcggtaaatgtttattgttgaatgcgtcattcagtcagtcgaaacaatccccgaaacagatattgccagaggaaaaagagacttttagattatacaactagtgagtgaccgggcctggaacctaatcgattcctgtgtgccgaccaatagcctaacaacagaaaaataaggcccatttttcccctggagaaactcatggccgataaaggagaaatacgtgcatcccgtccggactgatacctggatcccctttctgcccgcagctctccttccttcaacctccctatcgcacttgcactgcaccgtaatcccggcgcacaggtgccgcgccatcctccccacagggccgcgggcacgcgggccacggactcacctgggccccgcccaccgacccatgcagccgcaataggcacatgagcccgggcaaatgtggggccgagcggtttgggggatgcaccggagcaacggcagaccccgttcgaggttgcagcaaaccagaaacactctccagcagcagcaggcggagccgcgggcccgagctcactgccgagagacccccggtcccgccaggaaccccagccgcggagcccgcagagggcccactcagaacggctgccgccatcttcccccgggttccagtggtggcgtggcgcgatgacgcaaacacaccgcgacggccgcctactggggagggggcgtggggagggggctgcggtcttgcgcactgagtgaaggcaggctggactcgcgggctcaagctgggaaggagcatgcgcggagagagcagcctgggcgccgaggcagcggggtgctcggttcccggagtgatggcggatgaggctgcctgtgagcgtgtccgaggcggtcctgtgatgttaaaggtacacgtggtccggacaaaaggcgccaaagtcggaacgatttccatttagcggacggagtcttgggacatcttcgctgtaggaatcaataactctcattttttttttttgagacggagtctcgctctgtggcccaggctggagtgcagtggcgcgatctcggctcaccgcaacctccaccttccaggttcaagcgatttccctgcctcagcctcccgagtagatgggattacagtcgcgcgccaccacgcccggctaattttttttgtatttttgtagagatggggtttcaccatgttggccaggatggtcttgaactcctgacctcaggtgttccgcccgccttggcctcccaaagtgctgagattacaggcatgagccaccgcaccctgcctaggaatcagtaacgtgtgtgtg

SEQ ID NO: 64186 - DNA, 1848 bp, Homo sapiens
ctgtcacctctcaccactgcactccagcctcggcgacagagtgagactctgtctcaaaaaaaaaaaaaaaaacaagaaaaagaaaaaaaacttctgcgcatccttcagaaagactgtcctcatctgttccccgctctggacagcctgcactccctccacccccgcccgggccaattgctgttagcggctgtgtcttctgactcagacctctgtaatagcattcctgggtaatacctgtgtatgtgtctcctcaactattctaggaaggcaggggccatggtaattcgtatgtgtccccatcgattggcatagtgaatagcataacataggcacggatggatgggtccatagatggaccgatggatgggagcgggtgagtgagtggatgttagctgggatgggtgggtgaaggagatggatagtcagagacattggaaaagggaaccctgcgaagatcaaatgcaaacaccaggaggagctgacacgctgcagtgaagaagcgggagggctggccacagaaggcggcacgctccgagtggagcaggtgagcggcgcgcactgaagcaagcatcacgcaattgaaccgctcacccacgtgttcccccccaccatcctccttcccagacggcgcttcagctcattccaccgcccccagcagcccggtcgcccccaccgccactgagaaagcaaacaaaggggaggagacccctgcaggttctggatgccgaaggccaatcgaaagacttagatcccctggaaggcgggcgccttggtttaggggggtccaatcggtttcaaggggttgcagcggggcggggagatgggcgggaggagtgggagctggccccgcgcgcgggggagggctaccaggctgggaaggagcgcgaagggctgggggcggagccaatggccccgcgtgtctgctaggagagggcgggcagcgccgcggcgcgcgcgatccggctgacgcatctggccccggttccccaagaccagagcggggccgggagggagggggaagaggcgagagcgcggagggcgcgcgtgcgcattggcgcggggaggagcagggatcttggcagcgggcgaggaggctgcgagcgagccgcgaaccgagcgggcggcgggcgcgcgcaccatgggggagaaacccgggaccaggtaagggaggtggggccacgcggcggggcatgggcggcggctcggggcgggggctgggacggtcccagacgagggcgcagcggagaggatctgggggccggacgcctgggtccctagggacagccatccggggccgcacgcgcaggtcctcgaggataatgagggtgggggggaaatgcccgggcccctgcagaaagcgaggcctgagggggatcagaaaaaccggtgtcggggttctcgcagggatgtggggccagactactgggctctcccgtgcaggctgcgatgcagggatggaggaaggaggagcaggtggctggccccgaggggtcgtgtacggggaggctggatgccgggacgggggggatccactccagactcgcgccaagccaatggaaagcctcctatccaatatcccccaggtagtcgcgctgcccacacctgtcccgagggccgggtggctcctcacccaaacttctaccttcccttgggttgccaggagcaacagcttcatcttgggggagccgagtgcgtggcgaccctccctgaaactagatcgtatccctctctctgggggtgggggaggcagtattcaccctgggcgcgcgtccactccccggatgttttctgtgcaatcgaggctctttccttccactgataccccgagttctcttttttggtctctag

SEQ ID NO: 64187 - DNA, 1363 bp, Homo sapiens
gagaaaggggaagttgctgacttgtgggaggcccctgatttccgtcatgtggttcagggagtgggacggatggaccaaaggagactgctaacttggcacaatttccctcacccccatgaaattctgggccacaggaaatggagcgaatagcaggaagtgtgaaaggacatctgcttcagctacccctgctcccactgggcacctccctggtcatccccacactctgcctccttggccagcctagtatatgcacgctgctcctccccagcctggcaggaggtggctgggttaggatccaaagggcaagtgccttgcagctgctccagggcaattgccccagaaccacactccagttggcccactgattgtggctgtcacagccctgtgccagggctcctaatgggaggacaccctgggacaaagaggaaaaccagaagcaaaggggagggagagcctggatgatgccacggcactcagctcccaagttgggatgaaagatagggtgtttattctagcggctaccatatcgatgtgtattctcttttattggttaggaatacctggggccctccataccctttgccttacaacctttggacagcttggctttctgggaagaaggggcaagtgaagttgtagcagaaactgggcctatggtagaaaccatgtagggccaaaggccagggtcattgctctcctatatgctccagctgtcagagctggagaccagatggaaagatggttaggtcttacccagacactgtggtaacctgcccattggggtcctctgggaatggggtggtagacttggaagagggatgggctagttggcaggatttcacgtttctgctatctatctgaggatcctttccagggatcactgctgaggcagagtggattggaaggagtaaggtggtgcttcaaagaacaggcccacaattggccagatcactggggttgccaaacacttccttaccctcccagcaatgggtggagtccaggcttaaattgtttcagcaactggaaagcaaataaccttcaattcaacaaactatttatgccaactgcagagacagatagtgtaatattgatcgagaggatggactcggagccagactgccttggtttctattaattcccaccatttactccctctgtgaccttgaaacacttgacctctctctgcctcagtttcctcacctgtaaaacagagatattaggagctccatcactgggtggttttatttaatttaattaatttatttatttatttattttttgagacaaagtcttgctctgtcacccaggctggagtgcagtggctcaatctcagctcactgcaacctaaggccgggcacggtgg

SEQ ID NO: 64188 - DNA, 3242 bp, Homo sapiens
gatgggaaactcaagcacgaggacaccaacctggcttccagcaccatgtgagggtggggctggggcgggtcccctgcaggccaggggccagacgtcggttcagtgctctatcctagtgtgccagggatgtatcagtgaacagaagagacaaaaagaactcttacattctaggggagggaggatagccaaatctgatcagtggtcactgtacagcaggtttagtgacaagtatgaaggagaaaaagccaggcagagaaggaagggatggggggcagtgaggtgcgaaggtgaattcggagtaaggacccagcggaagtaagcaatgtgggtgagcaggaaaggagggttctgggcagagagaaaacaaagactcagaggtggggcagcctggggtgttggaggaatggggaggtgccatcgtgccctcgggcaggagcagccctggaggtccccagcttcacaaagggctggatttcacctctccggatgcctttgttcagggttctcactgcacagccacacacagcaggcccggagggcaacttagggagaagaactaagtaccaggagaggaggaggaggtgaggtcaggggctaatggagagccagacggtgcaaggctgttagcggagaaggacgtcagcttttcctggagaggagccaaggaggctctgagcagggagtgcagtgcgcactgtaccataaccgcacggcctgggctgctggggccctgggggcctgtgcgagtttgtggtcctgcccagagtccccgtgggaaccccacggtgggccaggtgacagggtgataggccctggtctgactccaacaccctcaattgcagcgtgaaggagggtgccaacaaggaggtgctgggaatcctggtgtcctacagggtcaaggtgaagctggtggtgtctcgaggcgggtgagtgtcatgggggagcctgggtgggggtcacactggctctctctagtcccatgtcgtcgtcctcttcacgatgcctctccccttccccagggatgtctctgtggagctgccttttgttcttatgcaccccaagccccacgaccacatccccctccccagaccccagtcaggtgagcacactacccaccccaagccctcagagggagggcctgaagcagggccagtggaggaaaactggcccttccagcacccacccccacaccccctcttcccgtccccccagccgctccggagacagatgtccctgtggacaccaacctcattgaatttgataccaagtaagaaactcattcccctacttgaccctcttgggacaaagattcctataacattcaaatctgccctcatacctcttccttgcttttggtggggagaagcggattgtagcatcaaatcaagatgccttagccttgtgaggctgcctcttgctgccttttctttgtcccttcctgtaaatacctctggtcccactgctgttcgaacgcctctgtcccagaggcctagcttcggggagggcagggagtgggaggctgggacaagagtcagaagccctcacctcacaaccctctttcccaccaccaagctatgccacagatgatgacattgtgtttgaggactttgcccggcttcggctgaaggggatgaaggatgacgactatgatgatcaactctgctaggaagcggggtgggaagaagggaggggatggggttgggagaggtgagggcaggattaagatccccactgtcaatgggggattgtcccagcccctcttcccttcccctcacctggaagcttcttcaaccaatcccttcacactctctcccccatccccccaagatacacactggaccctctcttgctgaatgtgggcattaattttttgactgcagctctgcttctccagccccgccgtgggtggcaagctgtgttcatacctaaattttctggaaggggacagtgaaaagaggagtgacaggagggaaagggggagacaaaactcctactctcaacctcacaccaacacctcccattatcactctctctgcccccattccttcaagaggagaccctttggggacaaggccgtttctttgtttctgagcataaagaagaaaataaatcttttactaagcatgagtgtgtgttttctctgtagtgtttagagagtgtatggtgtgcttatccatgattctgttagcttgtgggggaggacccagtctctcttctgcacccaaaagccacctgacacggaggctatcagcaaatgtttattggatgactgtgctgtggctgtgttccagggtaaacatcaaaacttgacttagtccaaactcaagggtgaggcttgataaggccacaaagtgaacttagtcatttctagaggtcacagtaactaaactaactcgcctgcacacagatgctcacgggagctagccagggcaggcccttccctgttgcggccgacgcacatgaccacctgtgacctgttgtgaccgagtcgcgttcatttccactgctccttatggctgctcgagccatctgctcctgtggctcagcggtgccacaaccgcaggcctcaccagacaagccacgtgacgtctctggagtctggtacctacattctaacacagaagctgaggcttgggcagcaagaacgtcatgctgccgtgggcccctgtcctagggaccacatcttagtgctgttcatgggatattcatcagggactccctgaggcttgaccgaagccccaggctgggctggagggaggtagcatcactccacgaacatttctcacctccatcatctgcttccactcctgaagcccaatctttctcctaaagctccttcatgcattccacaaacaatctggatttgagtccctacaaagtaccaggcatagtatagcagtacaacaacaacaacaacaacaaaaacacattaattcattcccttttttttttttttcttttgagacagagtcttgctctgtcgtccaggctggagtgcaatggtgccatctcggctcactgtaacctccgcctcccaggtacaagtgattctcctgcctcagcctccggagtagctgggattacaggcgcccgccacaactcccggctaatttttgtatttttagtggagatggggtttcgccatgttggtcaggctgttctcaaactcctcacctcaagtggtccacccgcctcggcctcccaaagtgctgggattacaggtgtgagccaccgcgccaggc

SEQ ID NO: 64189 - DNA, 1904 bp, Homo sapiens
gaactcctgacctcaggtgatccacccgcctcggcctcccaaagtgctgggattacaggtgtgagccaccaaacccagcctttattttttaaatataggagatggggtctcactatattgcccaggctggtctcgaagtccttagttcaagtgatcctcccacctcagcctcccaaagagctgaaattacaggagtgagccaccatgcccagcccccaaatttttttataaagacagtatctcactatgttccccaggctagaccattcagtttaactgagtctaaccttcatgtgctaaccttgggcaaactagtttcattcttgataatctactataaactgttacaaacgatctttccaaaaaaggtaattctggtcataacacacttcttaaaaaccctttaaaggctcaaatgtcttcagactcaagtccaaagtacatagcttgcaagccttttcctgattccgctcctctctccagcctcaccattgtcatacctaacccccaccacgctccgttcactccaggcaggcagaatcccttgctggactccacatgcgctgttcccgtcacagcaccatgctgttgcctatgccgtctcccttttccactacaagctttcatccacgtagttcacctttaagattcagctcacgcctgtaatcccagcactttgggaggccgaagagggtggatcgcttgaggtcgagttcgagaccaacctggccaacatggtgaaaccccgtctctactaaaaatacaaaaatcagccgggcgtggtggcgggcgcctataatcccaggcacccgggaagctgaagcaggagaatcgcttgaacctgggaggtggaggttgcagggagggagatcttgcgactgcactccaacctggacgacagagtaagactgtctcataaataaataaacttgtgtagaataaactagaggccacagacagtgtcaagaagatggacaggtctgaatggcctcgggctaggggatattccactgtcgcctctgactacgggtggtcctgtggctgaggcgcagcgggccctgggagttgtagttcatcaagcggaccgaggaggcgaggctgcgctgagcatcctgggaatcgtagtgctcgctacacggtgccctctgcgcaggcgcacaccgagagccacttccggaacaagcgtcgcgtttctgaggagaaactcttggtgagaattcccagagtgataatggctacctacagcctggcgaacgagagactacgcgctctggaagacattgaacgggaaatcggcgccatccttcagaatgcaggttcgggatgcgacaacctggacagcggggagcgaaagcgtgaccgggctgcactggcagcctgacctgggacttggagcagggttggggagggaatcctacgtgcgtgcgcagcgaaagggcgggactgagaggggctggcctagggagaggctacactggcagtctccgtgtgtccccgccctctctccgccctggcaggtactgtgatcctagaattgtccaaggaaaaaactaacgagcggctcctagaccggcaggcggcggccttcaccgcttcagtgcaacacgtggaggcggagctgtcagctcagatccgctacctcacccaggtcggtgtgtctggggggttctgcgagcgaaccccagctctgggtcaaagcctcaggcttgggtgatccagggtggagcattaactgggcaggaccagacctccccagccggccatccagagcgggtttcttcctctaaaaggaaagaatgggccgggcgcagtggcttgacagagttcgagaccagcctggccaacacggtgaaacctcgtctctactaaaaatataaaaattaggccaggctcggtggctcact

SEQ ID NO: 64190 - DNA, 999 bp, Homo sapiens
aacccagtctctactaaaaatacaaaattagccaggcatggtgtcatgtgcctgtaatcccagctacatgggaggctgaggcagaatcgcctgaacccaggaggtggaggttgcagtgagccaagattgcacaactgcattccagcctgggcaacaagagcgaaactccatctcaaaaaaaaaaaagaagtatgattggacaaaaagggtatgatctaatggcaataaatggggggtgggggaccagcaaggcctgtccagattcttcttggcctccaagtatagggcaggacccatctgaaatgagagcctatgacctacttccacgtgaagttagagaattcctttatggccagctctcacagaaaaacagagcagagtgagctacttacttctgctgttttcgtaattaccaaggtgccatgttttggagtgtcatgttctgagctccaacagagggaagagtgagtcagggaggttatcacgctgaaggccagaagaggaaggcagatgacagacggaaaaggtaggggacaaggaagtgagcgaaccacgagacaagtgggtgtcatgaactgggaaatcagaagaccagggttggattccaagctctgctgtaaagtagctgtgtaacctcaagtagctgtgtaacctcaccccttgtccctaacctctccggaagtgatatcttccagctgtaaaatgaggataattgtagtaccaagggccagggttcctgggaggatgaaaggaaatcatagaggtctaggcagacttaaaggcagtatggatgacacagatcctacaaaactttagctaggacatggaagaaccttttgtattttaatggttgtatatttattttaagagaaaaatataaccaatgcatcaaacttgtgacttcacagatattattgcttaggataatttactatttaagttttctttctttttttttgttgcccaggctggagtgcaatggcctgatctcggctcact

SEQ ID NO: 64191 - DNA, 1414 bp, Homo sapiens
cacctgcaaggaggggccgcccaggcgctgccctcgcagaggcaggtaaaattacctcgtgtagtatagacaccgatggtaagctctcaggtgtttccggagacgattcatgaactgaaccgatggcggggagtcggaagaaattcttttaccacaataacaacttccagtgacgctgccctcgttgccattgcctgcgcgggacggaggtggtcggcacccattcccaggcccagggtccccactccgctgttccctggcatccaatccacagccccatgacagcctctcggtggacccagggtcagagcgccaggctcaacccacacatcatcacgcccccgacaacatccataatcccgcccggagccaggcgtccccgggcctctgtccccaaccccaggcggctggctggctttcctcttgtccccgctgccttcatccactcaactccgtgggcctcgtgtcccctccccaactcacccccttcccgtgacaggggaatctgggtcccctgccccgcccccggctaacctggctgagtcaggtacaccagcaggagcagaagcaggagcaggagcacgcgggacccgggccgcaagtcccgtcccatctcggggctccgcggactctgcggggatggagccacctcgctctgactcccagacatgctccggcgcgtgacgtccagctggtgtctcaatggctttcgccggggaccggaggagacggcggccggagaggaggcgcgagccagctgcaccccccggccctgctgtgccccgaccgtgcgctcagtactcggcccgcgccatgccagcctctggacgcagggaaagccgaggaggtggagctcccgcgccctgcgcccccgcactgggcccggctccgtcgagggaaggccaggaatcttggaagaaaccgaaagaaaactccggcggcgggcgaggaggggcgggaggacgacggcccgaggagccgattcggttcggttcaggaggccgcccgcctggcccgtccgccgacctgtgaggcggctgcactgccggaccggccctcctcctccgaggcactttcacttccccgatccgggcgccgcgggacccagccgcgctgcatgagcctcccgggcggcccggtggagagagtcgccgccagccccggccgcgcgcacctgcggggcagccacccgcggacgcaccgagcccggggggcgtggccgcccgctgagccggcgagggctcgggcagccctgacgtcacaaccgcacccgcgcaccctccaccgcgaggtatttaccttcgaaaagtggtggcggctgcaggtaccggaggagtggggcggccgggaggggctaggtctaccggggctgcccgccacgcagatccgagcccagggaaccccctcgctccca

SEQ ID NO: 64192 - DNA, 915 bp, Homo sapiens
ttacaggcatgagccaccgcacccggctgaatagcctttattttttaaaagcagttttaggttcacagcaaaattgagcagaaagtacagagttttcttttcttcttcttctttttttttttttttttttttttttgtagttttagtagagatggggtttcaccatgttgcccaggctggccttgaactcctgacctgaagtgatccgcccgcctcggcctctcaaagtgctgggattacaggcatgagccactgtgcctagccgaaagtatagtgttttcttatactcctacccccacacatgcacagcctcccccactatcaacatccggcaccagagtgatagatttgttccaatcagtgaactacattgacacgtcattatcagccaaagtccatcgcatagtgtacattaggattcgctcttggtgttgcacgttccatgggtttagacaaatatataatgacgcaccagtatatatatagtatcatacaaagaagtttcactgccctaaaatcctctgtgctctgtttattcctccttcccctccctaccaacccctggctgccactgaccttttcactgtcttcagagttctgtttttttccagaaagtcatatacttgtagccttttacttttttttttttttctcccttaagatggagtttctttcgctcttgttgcccaggctggagtgcaatggcaagatcttggctcaccacaacctccgcctcccaggttcaagtgattctcctgccccagcctcccaagtatctgggattacaggcatgcaccaccatgcccagctaattttgtatttttagtagagtctgggtttctccatgttgaggctggtctcgaactcctgacctcaggtgatccaccaccctcagcctcccaaagtgctgggatt

SEQ ID NO: 64193 - DNA, 1534 bp, Homo sapiens
ttgtcacccaggctggagtgcaatggcacaatctcagctcactgcaacctccaccttccaggttcaagtgatcctcctgcttcagcctctcgaatagctgggattacaggtgcccgccaccatgcacagataacttttgcatttttagtagtgacggggtttcaccacgttggccaggctggtctcaaactcctgacctcaggtgatccaccctcctcggcctcccaaagtgctgggattacaggtgtgagccaccgtgcccagacacaagtggcaactgagacttaagagacatgaaggggcttggctaagttgcaaagcaggtatggaaccaacagaggggctgtggagctgtgcagaaaaaacaggaaggcactaacccagggtaatgtgtccatagcccccaccttgtccagcaccacatcctcccttcacctcagggctgcagctcctccgcctctgcctcctcagggcccacatcctgtgcctctctcccttatcattctgatcctgccagtttctgccacgcctctgtctgaactttgctccgtgctccaggcttgttttcctctggacctgggaaccactggcttactttcactcaccgcctgtccttcctgacacctcaccatgtgtacgggaaaatgtgcccgctgtgtggggctctccctcattaccctctgcctcgtctgcattgtggccaacgccctcctgctggtacctaatggggagacctcctggaccaacaccaaccatctcagcttgcaagtctggctcatgggcggcttcattggcgggggcctaatggtgagaaggctggcaggggagcccgggccagctggctgggtgccacctaaggggttctgaacaggagggagagggagagaggaataagaatggttgcttgggagaggatggcaatggcttcgtgggggctagcagccctctggagtcagtcctggaggagccccagggtcccaagctgaatgtctgtggggcacagaaaggacgagagcctcactgctctaaagagctcccctaccgggtagggagcatgtcctgcctgtcctccctgtccccactgttgagcagatgctgggaaaacctcactacaatggtcgaggcagaaggagcagctggttgtcagagacgtcatcggggcaggataataacaggcatgagggtggggcgcagtgaaattacccagagccagggactgccctcacggatcagtcaccctcgcttgcctccacgtccattcactctcaccccacatttctggaagcccaatctgtgcggactgctaaggataaactcagaacttaggtcagtatggcagggaggatgccctcaagtcgtcttccgggagatgagaatctatttgccaggggcggaggtgggggttggtttttgtgtttgttttttgtttttttttttttttgagacagggtctctctctgttgcccaggctggagtgtggtggtgcgaacatggctcactgtagccccaacctcctgggcccaagcagtcctcc

SEQ ID NO: 64194 - DNA, 3558 bp, Homo sapiens
agtagagaccgggtttcaccgtgttggccaggatggtctctatctcttgaccttgtgatccgcctgcctcggcctcccaaagtgctgggattacaggcatgagccaccgcgcccggtccaacaggaataactctaagaagtttggggacaggagactaagaacccctaagaaaagatcatgctgtttcttccattgctttctgtatccttatatcctttcctggaatgcctttccccctgtgaccaccagatggactcctaatttgcaaaacaaaaagcgagaaaatctggctaagtatgttttttgtttgtttgtttgtttgtttgttttgagacgaagtctcactctgttgcccaggttggagtgcagtgacgccatctcggctcactgcaacctctgcctcccgggttcaagcgattctcttcccttaacctcccgagtagctgggattataggcgttcgccaccacgcccggctaatttgtatatttttagtagagacggggtgttgccatgttagccaggctgacctcaggtgatccgcccacctcggcctcccaaagtgctgggattacaggcgtgagccaccgtgcctggcctaaaaatgcctggctaaatttgttaggggccacaaccccagatttacctgcccctcatacacactcctttgtttattcaatacctatttagcaataatatgttttggcttaagcaatattccacttgctgtaagcaagaataacaaggcccctgtcatcagaggtcacattccagtgggggagacagaggataaattctcccccagtggaccttgagctctgtgaaggcacttttgtattcttgaagcctagtacgtgcggaagtacttaataaaagttggtgcaatgaatgattgaagagccaatctggagttttgaaaattaaaccacaaaaatgcaaaaggataaagcctgacgtacgtatatgattgcaagaggtcatgtatccaggtcaagacaaagtcccctgggaataagatagagaatttagaagtgggtgttcccggctgggcgcggtggtttacgcctgtaatcccagcactttgggaggccaagttgggcggatcacaaggtcaggagttcgagaccagcctgtccagtatggtgaaaccctgtctctactaaaaatgtaaaaattagccggcactttccagcctgggcgacagagcgagactttgtctcaaaaaacaaaaaaacaaaaaacaaacaaaaaaaaaaagagagcgagagagaagtgggtgttccctggatcccagagccggacaatgcttgaacttaataagatttatagggcaattgtggtcagcttttccatttagtgttttcacatacgttatcatttaatcctcacatgaggcttgcaaagtacctattattatcctcaatttacagtggagggaactcaagcccagagtgaatttagggcccacaccactgctcagtaggggagctgttctgggccctgcctctcttcccaatactcagagtgcctcttgctacagctggccctacagggaagggaaatgcactgatctgtcactgctgtcgaatcccccaaattcccttcacccagttcctcgcacccagggtagctgccctttggggcgaagggcacaggggaaggggccttagtaggttaattattaatcctttgcgcctcagggcaccacgggcttctgtcccctcctggaggcggagggacacggactggctaggcgctggtgagggggcggcggtcccagcagcaggcatgggagtggcggcgcggcccccagccctgcggcactggttcagccactcaattcctctcgctatcttcgcgctgctgctgctttatctcagtgttcggagcctaggtgagctgccccttccctcacttgctccgggaggaagcccggaatccaggccctcacgactcaagcctctttctcgagccctcaccgctccgcttctcctctacccaggcgcccgctcgggctgcggacccagggcgcagccctgcgttccaggggaaacggcgcccttccaggtacgctaggcgcaggattgggcgcgggcgctccaggagggaccagaacagggggacgtggagccaggctgagggtccggcaaagggcgggtcctcccccggtctaccctctcccgtcggaagctgagcgcacagcagaagagccgccagctaaaccttcggaacaatttcttcagggcagaatctgctcccacctcttcccatcgtgtctccccaccaggtccggcaggagtcgggaaccctggaggccccggagaggaaacagcctccgtgtctgggccctcgggggatgctgggccgcatgatgaggcggttccacgccagtctgaaacccgaaggggatgtggggctgtcgccgtacctggcgggatggagggcactcgtcgagtgagtggcctcccgccccccagccggtccccgcctccttggcggctccatctccattctctcaaatcgtctcgcccgcaggttcctgactcccctcggctccgtcttcgccttcgccactagggaggccttcaccaaggtgacagacctggaggctcgggtgcacggcccggacgcggagcactactggtcgctggtggccatggcggcgtgggagcggagggcgggactgctggagcagccgggggcggccccccgggacccgacccggagctcgggctctcgcacgctgctcctgctgcaccgcgcgctgcgctggtcccagctctgcctccaccgggtggcgaccggcgcgctgggaggcccggacgcgggcgtgcagtgcagcgacgcctaccgtgcggccctgggtccgcatcacccctggctggtccgacagaccgcccgcctcgccttcctcgccttcccgggtcgccgccgcctgctggagctggcgtgtcccggagccaccgaggcggaggcgcgggccgcgctggtccgggccgccggcaccttggaggatgtctacaaccgcacccagagcctgctggccgagcgcggcctgctccagctggcctaagacggcggctgcggggaccggcgggaacggagcggaccgcccggggtggggccgcgcagcccggggtcagtcctgcagcccgcgccgcggccgcctccgtatcccgcctcttccgtgacgtcgccgcggcgagggccgcccccggcagggaatggcgttgagctccctctgtccgcagtctcggaaagacgggaggagctgtgaggaataaaaaagcaatatttggcagcgtcgacgtagggcgttttgtgtgatgacgacaggcgcttaagggaaataaaaaacgaaggtgagaagatgtgtcatctctgttctcggcagccgagagactcacgctcccccggcctatcgtagtcactcccgtggcttcggttgccaaacacacgctgagtctccagcccagacttgtccctgagcttcacccctgtgcagccaagtgactccacggccactcccacaatgaacatgaaagatcttgccatttc

SEQ ID NO: 64195 - DNA, 1659 bp, Homo sapiens
actggaatggctataactaaaaaaatgcacaataacaagtgttggtgaggatgtggagaaattggaaccctcacacatggcttgtagggatgtaaaatggtgcagtttctgtggaaaacagtttgtcggttgctcaaaatgttaaacatacagttatcatagaacccataaattcctctgccagcatatactcctaagtatataactaaaagaaatgaaaacatggtgtggtcactttagcccaaagactctcaggtttattttgtgggccctttggactgtaactccataagatcggtacggcgcaagccactaggactgttttttgttttgttttgtttttgcttttgttttgagacagtcttgctctgtcgctcaggctggagtgcagtggcgtgatctcggctcactgtaacctccgcctcccaggctcaagcgattctcctgcctcagcctccccagtagccgggattacaggcgcgccccaccacgcccggctaatttttgtattttttagtagagaaggagtttcaccatgttggccaggctggtcttgaactcctaacctcatgatccgcccgcctcagcctcccaaagtgccgaacggtttttgggttttttttggttttttggggggggggttttgctgactttcttgttttgtttgttgcttgccacgctgccatcaagtgctcactgtcgcaaaagaaccgtccccatgcagtactgtacttttcttttcccttctgccgtcaacctcggagtagcttcgctcccagaaggcctcaaagcgcgaccaaagagcgtgacagagcgctttacgacagttgctttgaggcagtaccggaggagaaagatggcggctaccttactagctgctcggggagccgggccagcaccggcttgggggccggaggcgttcactccagactgggaaagccgagaagtttccactggggtgaggaaggaatcggggttcataggacgtgcacaaggcctgacgcgatgggaagataaagcctgagtggggttgagagatctggcaggggtggagaggaggtggaatgtgttgtgctccaggaatggggagaggtaccccgaagatggtggagtggtgcggtagcttcgtagtgggaggtggagggtgggctgaagtttgaaattctgaaatcctgcgaggctagtgaggatcttgggcttaagtacgggatgagtcttttgagatttgagggttggcattctggtattctgcggggtgctgaggcccctataagatttgaaaatggttcagcgacggacagattttgtatttttggaactaggtagagagatcattgaggtttgtgtctgctggagaatgtagacttactcctttttcccttttcccagaccactatcatggccgtgcagtttgacgggggcgtggttctgggggcggactccagaacaaccactgggtgagctcaggacagatttgtgaaaggtcttcccatcttccttttcctttcctgcctgccagcccaccctgcctgcctccacagaccactgtgggaagagaggtttcttctctctctggagataaagatttgtcccaacttttgttactttcagttcccctcactcgttagtggaatccttacaaaagtctgttctccagcc

SEQ ID NO: 64196 - DNA, 1438 bp, Homo sapiens
taaaaaagattgaaatatcttgtattttaatacccgaaaaaattttatttccccctagactgccaattccagctgagcaggctctctaaccatcttatttactaccatactctcaatttctggcacggagtaagcgcgcaataaatgtttggtgaatgaatgaaagaatgcccgctttcatacactaatgggtttgtagccaccacccctcaggccttttacgccctcattccttccaggtacaaacgctatctgggctaggccaaatgtggctcgcagcgggtccgggagcggggcacctaccggcagctcccgcagcggaggcgcgtcccccgggcgccgaggcagcgcccgcggctggaggggcccggggcgggcgccgagcccgagggatgcgcgcagcgcggggtgccccgggaggcagcggccgggcacgctgggaccgacggcgcgggacgccccgacgccgggcagcacttacccgccgcaccgagagagctacgcggccccgcggccctgcagggcacagggcggccccctgcccggggctctcggtggcgcactgggcggcggggcgggccgagggcagcgggggcgggacaggacagacgagaatcccgcggaggtgaggccgggggccgccccgcccccgagggcaggccctgagccccggccccgcctcggccggccccgcctcggccggggcgtgggctccggctgcagctccggtctgctctcttggctccggaacccccgcgggcgctggctccgtctgccagggtgagggggccgggaaggggcgcgcgggggtcccgggtctcggaaatcgggcggggacggaacgggctcgggctgcggggcctccagactcagtcgcacgctcagatttcgggatttctacccccggctgggatcgcgtaacttcctcattcccgcctggacccctgcccccggcccgcctggcctggcgtgagccccgtagccgcgcgctctccggaccacccagggccgcttccccgcgcagctgctgcgccgccccaggtcggagccttccgggcctggctgggtgttccccggggctctggttacgggacggggcggggggcggggggcgggactgggattgtggatgaaggactaaggtaggggatgggggctcgaaggggtcggtggggcgttgcaaactggtcaggcgtcatccgcgggcggtcaggaggccgtgggggaagaggaggatctggaagagatggaggacctgcgggagttaggatggggggcgggttctgcaggacagctcgcctccctgaggcttcccaatgttcctaggatgacggcgacccctgagagcctcttccccactggggacgaactggactccagccagctccagatggagtccgatgaggtggacaccctgaaggagggagaggacccaggt

SEQ ID NO: 64197 - DNA, 1422 bp, Homo sapiens
ggggttgggtaccgcccccttcccccgcaaatggaaaggtgggtggcttgattggcagctgggcacacgaaagaaggagggaaagggaaggaaaggcgtcaaaggagatctgagaaggaaataagggagagaaagggcaaaaaaaatagggaaagaaaaggaaacgcgtgtgcgcacgcgcaccagctggtgggcgcgctccgcggccgcctcggccgccgcccacttctttcacgccaggctcgcgcggtcgctccgtcctcgcgcgcgcctttcgcctgctcgcctgcgcctgcgcgcaggtgtcggcgcctagggggagggggccccggcgcgctcgcgtcacgctcgcgcttccaccctcccagtgcgcggtcgctccgcgcctgcgcaggagaggtggtaggctcgggtggctggctccggggagatagcgcctgtcagtcggtgggtcggtcctcgcgccggccctccccctccccggtctccgggggaggcgcggtggagtccgcccccggggttctccgatgggggagaagcggcgacggcggcagtggagtaaccgagccggagcgtgagcggccccggtgccccgttccccacggaggccatgggcgacccagcccccgcccgcagcctggacgacatcgacctgtccgccctgcgggtgagcgcgccgtcccccagcctcgccctggttcctgtccccgccgcaggggagggagcggggtggctgcacgcctcacgtgctcccgggcgccccctccaccagcttgggtccccttggcgacccgtgcccctttcccggactcccgccgcggctgggcccccgccctctgctcccttctctctccactggctgcagatgctgggagccagttcggtccccaccctgtggtgccccgcccccacacttccgtgccaccctacctttactctggggttcgggacccactggttcgcctaaacttagcctcccccatcacctggagaacctttattgtggttccttacctcctttcggcccttttccacctttgcccttacttctatcttcttccttcccctcctcttcctcagctcctggaattttgactttgcaactgtctcgacagcctctctctcatccctctttctctgcctcgcccacccttgaattgcatcctttccctggtcggaatttcagctaccccacccctcgtgccgtcaccctcaatcccatgttcagttttccctatcccttctctcctgtttcaagtgcagcagttcagaaccaggcatttccggtctcagggtccctgaatattacatgaccaactctgcagcagcgtggggctgggagccctcggggaggaggggaggcatttcttctctttggaaactgtagcacgggctgggaagaggatgtttacacacacacac

SEQ ID NO: 64198 - DNA, 1958 bp, Homo sapiens
ctacagcctccctgtgtgcaagtcctgcaaaggggtctcctgtttggctatgaaatgaatatagatagatagctcacaagctggcagccaccagagtcccgtggggctgagccttagaaaggctgggaggtcagcaaggctgaatgaagggcagtccttgctttctggaagactggcacctgagagcctatgtgaaccctttcctcctgctgacccctggactgcggccaggcctacacacgccagggaacgggcacacaccattcttgtgaagttcacaaactgcagattgatcagcagggggaagggatcataatgccgtggtggcggcagcctactttttcaaaatcaatttcctactggagatgggtgggaaattgaagtcggtgcgagctaaggctggatacacggcgcgtaggggagatcaggcactcggttgaagtaggccccgaggaagatgaggctggagcccacgctgaagagcaccagagcggcccagaagcagatgttgtcaagggcattccccatgcgcacccagtcggacacttcctggggaagggtcggcacagtcagtaaagaggcagctgcaggagccagcggcatgggagacagtggtgggcctctgcctcgctccacccgcctctggctcctgtcccacctcgccggtggcctcctgatctctcgtgctctcggccacgaagttcacggcatccacacagcagcggacctcgggggcggcggcgcccaggctctggcagaaggcagctggcggggaaaacaccggggtgggccttaggagcctcccccctggcaggcaccccgcgcggccccccgggccagggccactgtgctcacccgtccaggtcccctgccggtgcctctgcccctcaaacacgagctcgctccgtggctttttcagtatcagctcctccgcgcggagcaataagcccaccgacgacgcccgccttgggggcgaggcggcccggggggcctcgggcggcggcggggagcccaggaggcgcggcagcagctccaggagaacctggggcaggggcggggcttaggggacgaggttagtacgaagccccaccccgacccgggctgcaccgccccctccgcgcttacgtggcgcagccgcggggacatggcgtgggtggtgggcgtccgctgggacacgttgagcacgatgacgcaattcatgacaatgagcgtggcgaccaccatgacgaaaataaggaacctgaggagcccggaaggcatgacatcaccgttcctcctcccagctaccgaaggcgccgcgcgctgacctcacaaacacggcttctcctggtacgggctggttacgccctccagctgcgccccctacacgacgacagacgcgtcccccagcccttctcctgtcctaccacttgtggcggccatgaaggggacccccagctccctggacaccctgatgtggatctaccacttccacagctccaccgaggtgaggctacgcccgccaagggctgcacctcgagaccttctgggtaggtctcctgttcgcccctgtgacccctgccctgctactctactgctctgctccttctccaggtggccctccagcccccgcttctgtcttccctggaactctccgtggccgcagcccatgaatatctggagcagaggttcagagagctgaagtccctggagccacccgaaccgaagatgcaggggatgctgcctgccccgaagcccaccctggggctggtgttgagagaagccacagccagcctcgtgagcttcggcaccaccttgttagaggtggggtactggggggcttaggatacgcggcgatcgggtagcgggaacaaggacctctgcctccccgctaacccctgtgcccccaatgcagatctcagccctgtggctgcagcaggaggcgcggcgactagacggcagcgcgggcccagccccag

SEQ ID NO: 64199 - DNA, 1454 bp, Homo sapiens
gggcctcacacatagaccgcattcacctgagagccaggggctggagctgcaacttgtgagtgaccagtgcatcccaggggcttgccttgctcctcatgctggaggagtttccggaaggggctcttgccacttcccacatcacagcagtgcgttcctgccagtgctgggagcaaagctcagccaccgttcctgccagcgctgggagcaacgctcagccaccgtctttgtctaggtttggtttgctcacagtgaggactgcctcgggggctgagacttcctgccgagttagtggagtcaggcacaggcctgctagccagggctgatggttcgtattttcataatgaaaattccccagaacctgaatgggctgcctgacaattcccctacacacacagacacacagacacacagacacacacacacacacacacagagacacacacatacacagatacacagacacacacacagacacacagagacacagacacaaagacacacacacacacagacacagacacacaaacacacacagaaacacagacacacacacagccacacacacagccacggacacacacacacacacacattcacagacacacgcagatacacacagacacacgcagacacagacacatagacacgcaaacacagacacacacacacacccagacacacacacacacacccagacacacacacacacacacagacccagatacacacatacacacagacacaggcatggacccacacacacacacagacacacacacagacacacacaccccgggatgctttgacttccaagtaagacccaaaagaactagctcaacaggaagccactcccgtcgcctgccggcttctggctagcagcgcagaacagctgcagctgactccagcggccaggctgccaggccgcggcctctctgccttcagtgccctcacagcacaaatatccccaggctggccagaggagggccccctctccactccacacaaagacctgctcttgatttgtggacagaagtaggttcagctgaaccagagcagggaggtgtagtagacccggatttctattttctttttttcgagacggagtctccctctctggccaggctggaatgcagtggcgcaatctcagctcactgcaacctcccgcgttcaagcgattaccctgcctcagcctcccgagtagctgggactacaggccgcaccaccacacccagctaatttttgtatatttagtacagacggggtttcaccatgttggccaggctggtctcgaactcctaacctcaggcgacccacccgcctcggcctcccaaagtgctggaattacaggcacgagcccgtatgagggaaatacatgaagtcacgggtgctttatcttccagcaccttcccttcttctgagaactgtccgtctccaatcctgtgggcccagaggat

SEQ ID NO: 64200 - DNA, 804 bp, Homo sapiens
gaggtcaggagttcaagaccagcctagccaacatggtgaaaccccatctctactaaaaatacaaaaattagctgggcatggtggcaggtgtctgtaatcccagttactcaggaggctgaggcaggagaatcgcttgaagccaggaggtggaggttgctgtgagccaagatcatgccactgaactttagcctgggcgacaaaacaagactgtctcaaaaaaaaaaaaaaagaaagacatcagaggacgcttataaaagtgagacatgagacagagagaaaagcccaaggaggttccttatttaatgttttcaatcttctcccaatgcatggagcagctcctgcctcttagaacatgggccatgcttctgagtgcctgctgttccaaagtctgccatccagagggacagacagacattaaaacaaagtagcagaacagctttggcaaggtgccctaggaatttataatacagtaactaatccagtctagaaagctcaaaatacactttctctcctggaattgacccagagctaaagccaccaattgaccaaatgcctgctaacagtgcccatgtttaaagtccaagatcccccaggtgacagattaattagtgactctctcatgcaaaccttggatagaaacattctacttcaactatccaggctccttatcggactcaggatccttatcggactcaggatcacttccacggaaacccacttttgattccaacttttgttttgttttaggtggactcttttggttacaaagaaaaaggaataaacttaaatcacttatttatgtat

SEQ ID NO: 64201 - DNA, 2020 bp, Homo sapiens
taaaaggtataatataccaagaagctatcatggttgtagcgggctgaatgatggcccccctcaaaagatacatccatatcctaatccctgacatctgtgaatgttaccttatttggaaaaaggaactttgagatgtaaatgaattaaggacctgagataaggagatgattctagattatccaagagggcccgaaaatcaatgacaagtgtccttataagagacaggagaggagaagacacagacacacagaagcgaaagtgatataaagacactagcagagattagaatgataaagctccaaaagcaaggaaagcgttggaatgctggcagctgccagacactggaaaaggcaggggagcattctctcctagagcctccgggggaagtgtggccatggggacacctcgatttcagacttctggcctccagaactgtgagaggatacattttattttcgcaagccactcgatttgtggtaatatgttacagcagccagcaagttgactagctaatagtcataggcatttgtctatctaaaaacatagctttaaaataaagtaaaattgtatggaaataaagaataaagtgaacaatccacaattggggtgcttgattttaacatacctcgcccagaaatggacagatcaagtacacaaaaaataagaaaaagtatacaggatttgagagtatatattatctcaacagggaatacatattattttaaaatgcacatagaacataaagagaataacaaattccagaggccgggcttggtggctcgctaatgtaatcccagcattttgagaggccaaggcaagagtgttccagaccagcctgggcaatatggcgaaaccccatttccactaaaaatacaaaaatcagcttggtgtggtggtatgtgcctgcagtcccagctactgggcaggctgaggtgggaggattgctcaagcctggtaggcggaggttgtagtgagccgtgattgcaccactgcactctagcctgggtgacagagacagatcctgtctcaaaaaaaaaaaaattccagaaagtgaaaatcatgggtactagtcagggcactctacaaaaacagaaccataaccagacatggtagcacgcgcctgtagtcccagctacccgggtggctgaggcaggaggatggcttgagcccaggaggttgcagtgaaccatgatcacgccactacactccaccctgggcaacagagtgagacccaatacaaccaataggatgtatacatacacacacaaacacacacaaacacacgacaaatatttattttaaggaattggctgacatgattcatgattatgtgcgctagcaagtccaaaaccttgactagggagtcagcaagctagagaccaagggaacagtttacgtaatcctgggtccagaggtagtcagtctggaggcagaattccttccttctcaagggaacctcagcctttcctcctaagccattcaactggttggatgaggcccacccacattatgaaagataatctgctttactccaagcatactgatttaaaggttaatcacatctgaaaataccttcacagcaacatctagaatagtgggttgttttttcatttttcatttttgttttcttttcttttctgttttttgagacagactcttgctctgttgccctggctggagaacagtggtgcaatctcagctcactgcaacctctacctcccaggttcaatcgattctcctgcctcagcctcctgaatagctgagattacaggaacctgccaccgtgtttagcttttgtgttttatgtataatatccagggttttgttgtatttagcaggtggaataggtaaaagaaagtgtactccatcttcccataagcagaagtctctcagatggatttttttttaatataaactttttttctttcttttttttttttagaggtgggatcttgctctgttgcccaggctggtctgggattcctgggctcaagccgtcctcccaccatacctggcctat

SEQ ID NO: 64202 - DNA, 3020 bp, Homo sapiens
gcggataagagccacttcggctggtgttcccacaaaggcaccagtggcacctgcggtcatgccaatcacagccttcagcagaaagccagggggagtaccatcagccccagtcaggcgctcaaacagcacggtatagatgccaaggcgggtagtggtgtaggtggcctgacgcagcaggccagccgacagcctgaggagcagaggggtcagcatatcaggccaaggtctagagctgccaacccacagtctaccctccatcctgaggccccaatacccagtgtaaatgcccctcaggccttctgccttcaggatactggtgagggcatggaagctggttttgtactctcgagtcttggccccttccccgctcaactgcatccggttcttcaccaggtccaggggctggacaaaaactgtagctcccatcctgggggaagacagaggtggagtgaagggccaggcattccagatctaccagtgcccactggagcctggcagcaagaggttacaaaggtcagggcctgccatgcgattcaagaatcaggatgctggtgagcatgtgtataagagtctatatgtacaccaagtgcaacgggtctgaaaagtctagttgtccagtaggggccatgcaatgaaagtgctccaagcagcttcatgacagtcaagcagtgacctggggctgcacgcagtccgacacagggaggggaggaaggggcatccaagatttaggactccaggtagtcctgcaggagccatttaatggcctggaaccccctgccgcccggccgagcttagcaatgcgctgggaaactcagctggcccggcgggggttgtgcaacgaccctgcatgcagtccataagggtcctgcaatggggccctagcagcccatcggggaactcgcaatacgctggagatcgcgctgaccccgtgccggcacagttcactgcaacagacccagagatgaaccgggcccggttccttttgcccttcccttcctcctcttttcccatccctggggcctgagcttacccggccaggcccccaaacaggaacttgacggacttaggggaggtacggggcttcccgtctatcccgccggccccggcactcgccgtcgccgccatcgccactcaatggccctcggctccgggtcccgtgcgcgcgcggccccgctcgcgcccaaggtgacaccgcgcgcgcaacagagcgagggcgcgcgcacgcccctccagctctcaggtccgacacccgctggaagccggcgcgggcgcaggcgcgcagcgcaaaggcggccgggagtaaggcggagctgaaggaggagcttgatggaagcgtgcgagaaggggcgtaactgatttggaaaccagaggaaaggcgctgttttcaccgaattagaatcgcgggaaaatagagaagagtttgtttgaaggtctcgcgagatcgagtgagtacggctcgccaagttggagcgctctcgcgatagacacagcaactattcagctgcgaggggacgggagaggtggtgagcactctcgcgagatttgaaggagcggcggaggccagagggaggagaggtttgtaaactaggaggctccgggtttccgggcacttttattaggtcgtcttctgggccaccagtgccccttccatctccacaggcagtccctccatcgctaacctttttttaaccggccttttaggaccggaagtccttcatctcaagcatccaatgctgaaagcggcctgattttctctaccggaagcccttttccagaggctgggaacacggcccacctagcaggaagtcccacctccttgagctccgccacccttcccgaagtttttctgtcacctgtgttaggctccgtcccctttccgcgttttatccccgtaccagaaaaggatacatttagtgcctcccacccagctccactaaacgggttggatatctcattctttgagttggtgttccttccccggcgcccccatgtagctgggaagtgggacctgggggtggttggacccctgggatcctaaaggaggggcagggagggcgcagaactccgcttctgctccttgctaccaggacgcgcggcctcctcagcctctttcctcccgctgccatgcaccctgcagccttcccgcttcctgtggttgtggccgctgtgctgtggggagcggccccgacccgggggctcattcgagcggtgagtctgagggacggatggggaaagggcgctgaaaggaagggttgcaggctgaaggggaacatcgccttttttgtccgcagacctcggaccacaatgccagcatggactttgcagaccttccagctctgtttggggctaccttgagccaggagggcctccaggtgattttctttcttttcttttcctccttccctcccttccttccttttctgtcttttttctttttttagtatttcgcaagatcctccatcctaggctggggttggggaggtttgtcctgggtgaaactggaggtaggaaaatgaagttaggaactgagcacgtctagtgtagaacccagaatctagagggagaagacagagtgtccacccctggaactccgaggttatcagggagactgaaagtggacgaagacagaaggcaggatcaacggtccttatcaggaaggtctcaggtgctagttattgcttatatgactttgggcaagttaatctctctgagccttagtttgttttactgtaaaatgggatattagaagttttcctagggttattgtgaagatcaaagtagatacgcaattttggtagtatttcatcccaaagactgccacatagcaagaactcagttgggccttagtagcagtcgagttgtttgtgagatgggtaattagaaaattgaagaggccgggcgcggtggctcacatctgtaatcccagttcaagaccagcctggccaacatggagaaaccctatctctactaaaatggcaaaaattagctgggcgtgatggtgcacgcatgtagtcccaact

SEQ ID NO: 64203 - DNA, 7201 bp, Homo sapiens
gtataaggctgtggcagaagccctgcccatttccgttccttccactccctatctccaccctcacacctccccaaaaacccacttcccttcttacctctgcttctctttgcttgtcccttctagccctaaattcttccatgttctgccctgaccttatcctgcctacctgtcttatctcttccactggctttgtaggtgaggggaaatttttgcaaggctttaaaagccttagccctgggtcattgtggctcagtgaaggactagattattttctttctgtcccaggagaccagtatgatgtctgtgccatttgcctggatgaatatgaggatggggacaagctgcgggtactcccctgtgctcatggtgaggccctcactgcctgcccatgcccctctgccaccagcagccaccaggtgcttcaccttgttcctctctgcagcctaccacagccgctgcgtggacccctggctcactcagacccggaagacctgccccatttgcaagcagcctgttcatcggggtcctggggacgaagaccaagaggaagaaactcaagggcaagaggagggtgatgaaggggagccaagggaccaccctgcctcagaaaggaccccacttttgggttctagccccactcttcccacctcctttggttccttagccccagctccccttgtttttcctgggccttcaacagatcccccactgtcccctccctcttcccctgttatcctggtctaataaccccccacacatacacctctggtgacctatttgcacagaccgtcgtcttccctccagtcttctgagggataggggacattccatcccaagcttctcccttacccacacctatccttttgaggggctttggggtggagctggggcaagcagagggactgggtcttcacttcttgggctaataaaattgtttctttgtggactaaggaagggtaagatcattctcacacaggtgaacttaaccctttggtggaatcacccctttagccataaggagcaagggaatgctgagagacactaacctatagtcatggggacagccccagccggcatttgctatgactcagaagggggagccccacccacaaggatgactcaactagccctgccttgcctgcaggcctgcacccattctctggtccagatggctctattccatcatccaccaatttgaccagcacactgaggacttaggcctggaaatgccactgtggaggggcagggccacctggccagaagctcaaattcctgcaccttgtagtacctcaacctccctgctcccaagccacgataaaggaggcaagtcacagtgcctatcccccattctgacacccaagctcaaatcacacagcaccttgttagtagaatcttttttattcagaaaaaaaaaaccccaaaaaacaaaagttttccaaccacacacgggagggatatgggtagggggaggtgtctgtccatccagccctggcccccagcccatgtggttttggcagcaataaggggtatggggtaatggcccaaaaaataaaatggtttgtgtgtgtatggggaggaaaggggtgcaaagctgtggggagcggtgaaggggaagggacagacgaggtcagtactgggaacgccgaaggtgggaggccatttcataacatttcttgttgatcaaaccaccgtggacaccttctttgcccatcagcaggactagcgctggaggaggaggaaagagaaaggaggctaggatccaggtgtcacaattccaccccctgccagctgttcagcagctgtccagccctgggggctgtaacccaacctcatctctcccaacccgcccccccaccacacacaggcaggctgtcagtcaccctgaaacaataaggcttttcaaaagaggaaaatcaagcttaaacgctggagaggaacagactaaaaacttaggggtcaaaggctcatagactgttgattcatgtgttcaggctagaaagggctgtggatgtgcatgccacctccaggttctaacaaaagaactcaaacgatgaactcgatgattcaagaccccaacaatctacctatactcctagaaaacagtttctaatccgagctcaaggcagtaagtaatttaagaggtaatgcagttcagcaacttcgaattacaagatgaggaactgagacagaatggagggactatcccgtgttccagcatccagcagacaaggaacacaatactggtctgactcccttcatgttggggaatcacacaaaaaagcaccctcaagattaccagaaggcggtacattagagatcttggagctaaaggaagggtaagactcaggaactcactcttgtcagtcttggtgacagtgacattgaaggtgggggccccaccggtgctcttggtacgaagatccatgctaaattccccatcctgcagcagtgagtcccggatcaccgaacatttctggcccccaagtgtcagcccattcacgtaaaaacttgaccggtctttgccaaccaggacacccacctcagctggctggaagaggaaccaagcgcccatcaagttagtcagtgcaccaagattcccaccgtgttctccaaagacccacctgtcttccacttctgagaaccaccccgccgtgggggctaagtataaattatatactcagtacacatcaatgaactgtgagaaactctgaggactgtgggacgttagtgcagaaaaagatcatgattctgaaacttagaatatggaaccagggaggaagggatgacatactcctctagagatttagatgtcagtgttaatggggaaagtaaacccaggaaataaagggagtcagtgaggtaagtgaggagcctttggatgctcagaactctccttcaggaaaagcagaagcggagaggggaagggaggggggcgggcgaggcaagagaagcaactttgcccttatttggtcaaaggttctgcaggagctgttagggcccggacgcctgggtctccaagtaacctagagtttagctccaggtatctctgctctgagatgaggaagcagacccctgggggctttccgggaaagttggaaaacttttgaaggtggacaggggccagacccggcaggccagctctcgggtctaggtaccccgggaacctttcccccctccccctttcaccccaagcccccacatccggtcccctcccgcccggaaacccccttccccccccttttgaacttccgctccccctccccacttccgggcagtgtggacagggagatggtggtgggagcagcggtagtaaaccaatatactttcgcttatgctgtctcagaacttctcacaaagttcccctgctccaggccccgccggatggcgggaagggagggcgaggggacttccgggattggcctcgcaggaatgttgaatccaacgtgctgagctgggggggcgtgtggtggcctcgccctctctaacggagttaggaggggccagaagcccacagagggtgggcaagggaccaagaccacgcgcctggggctcccttccgcaccaggagaaacaatggtagagggacgcgggctggcagccggacggggagctgggggtccaaggatccccgggtcccctctcaatcccaatccccagtaaaaactgaggcgcgtccccgccccgccctgggagaggcggaagtgggccgccgcaccgggcgccgcgcccctccccgccctgtgccccggatgtaacgccccgtcgcggaaagcggggtagcgggcgggatgggcgccgccgcctggggcataggacctacgggcaactgagggacccactcacgtgcagccgccattcgcgccgcttccagggcaagcacccagtcagggcctctcgctgcgcgccctagaccgcgcccgcccccacccaagtccctccctcagggtccaaaccggagcagtgccccggaccgcgcaggcctcgcagtaccgtgatgttgacgaacgttttcccggggacggcggcccagacggagggcgagtccttgtagcccacgatggccgcgtcctgacaggtcccgtccgccatgaggttgtcgatgtaggcgttccacccggccatggcgctgctactggggctgctctcggcgctgctgctggggccgcggactgggctcgagctgcctcggctggcgggcggggggaggcggagagctcggggcacgcgctgccgtccggaccgcggctccgctcgctgtgcagcagccctcgcaccgccacttcctgctcctccccccccccgccccgctagatttttatttgcaaaggacggtaggggcggggcctactccccattccctccctcccccactcgccagcccagacaccgaactttgcaaatgcaattttaaaaatccctccccctattgcaaaatttgcagagttcgatggaaagcaatgcagaaggatggggggtggcgggagagaggtgaagggtagggtttgctccaatttgcactgaatataaaccagactttggtatcggggcagggagtgagccagaagaaggaaggaaggagaaagcaggaggaattagcaagctgcaaatttagcaaattaaggagagttcggggagcccagggttaaacgggatgactcctccttcccccacctccgccgaagggaaggaccggcgggcggcggcgcgtgtgcccgcgcctgcgcctgcgccggggccgggagtgcatggggcggtcggggccggagccggctgcacgggagcgcgcccggcccgacccgtgtggaccctgcgggaaaggaaggcgggctggggacgtgtctcccgcctggcggaaggggcgggggcgaagccgtgcgcgctgccgcctcaccacccttgattttacttattcaagtaataagaaagcaaagaagagtttggccaaatcctctagtcgctctcatagctgaaggcacccaccggggccacttctgtccccagcgtcttctcgggtcgtgcaggttgggttcaccagggcccattctcagtctagaggattgtcccttctctggatcggctctagcccagggcctcaccccacatcccagccccgcccgccccaggcaggcaatgtctggatcaccggccgtgccccttggcctgtgtctgcagaggtcacagagcgcggacacccgcggggcttaacaggcggggctatttttcgaggcggaagaatactcaagttgcaagagtggcaactttttcaagaaggggaaagtcccacttcgggccctttgggtttcttcgcagtcagatgtgcgctcacagccacctggggagggcgggacgggcgggacggccgtgcggcggccgcggtgaaaccgcctcctccgacccgccgccgagggctgggcggcttccggagcctgggctaggggcaaggggtcaccgagcgcggcccgggcggaaagggggttggttttctctctcctcccgagcgcggcgcgcatccctggcgtccacgccgaatcccacagtccccgacgcccctcgagtccgtgttcctcgacagccgcgcggctgagtcactggcgggctcgggcggggccgcacccgggcacgtggcggcgctccccgcccgccatctcctgacccctggcccaccgcacccctaccccagggtggaaaaatcccgggaggagcggcctgagatgagggggcggggcgagaggggagactggacgggtggcggggcaggtggcctggggtgggggctgggaggccgcgcgggccggcggggcggggagcaggggtggggagagggcggcgggggtgagtcaccgggcgcgcgctgccccggcgccgacgggaagggcctccgagtcgggccgaggcgccgtgtgtcccccgccggtcggctggtatggctgcagaggagctcggggcagaccccgcactggccccagagccggcaaagtggagatctctaccgagggcagagacctacctccccgcagtgctacaagtggggcgccggaagagccccaggcgtgcagaagctcacaaaaggccacccgtcctcggtccattcatttttgttcactgttgattcagccccattcattgatgggctggggccgtgcgctgagcgcccacagtcgatggggaaaggggctctgaccgacagtccccacgccgggcgacaagtgctgtcccagcgttatcagtcgggcgccttgccagccgaaagggcctgtctaaattcgtttcctgtcccctaactcatcccggcgctggctggcctggagagggtaggatggggcggcgccgagaatggccgttatgaggaccctaagaggtgagaccctctcgccttctggggtggggggtcccgtcctttcccccactgaggacagaggcccgcccagcgatctgagcatgtgtggacgtcaatcttgcagcccctcttccaggccccctccccagccttgcagggctcaggttacccctggcctttcctaaaggtcactcattcctcttgacgtttgcaaaaggggaatgtaatcctggggtggggggagacccctcatctgtagcccctcccttgctcctcccaaagggtggaattagaacagggactgttattgggagacagaaagtgggggatagtagttgacctttggtaagggggcaggtgcccagggccagaggcttctgcttcaggctgtagtgggcacttggctgccagcccagtgtgaaggggggaggatggagagaaagagaggcggggctggctggggaccgagtggctcagggataaatgcgcagcctgagagggggtgagctgacactgtcccagctgccacctagactcggagctccatccaaacctccagcgaagacatcccaggtcgggtgaatcttccagccctgggggtggaggtagtaaagggtgagcatggtattggcttggaggaagtgggggacatttctgctttttttcctcctgggactggagatgcttgaaaaagctgggggaaggggcggctggagcaagcagatgggacaaactctgggaacaccgaaggatctagggaaaggaggctgtgaggagggcagcagggatggatagaaaagggcagctagagctggaacctgatagggaattgggggcccaaggagatttcggagcaggaaaatg

SEQ ID NO: 64204 - DNA, 4848 bp, Homo sapiens
tgaactcctgggctcaagcgatccgtccgccgcggcctcccaaagtggtggtattaaaggtgtgagctacaaggccgggccccactgactgttctttaactggttttcgagtcttctctgcatctagagaagtggcacaagattatggtcaagaacataggcttcgagcccagtcatacctgggtttgaaaccctgccacttaccaaactaaccatgtgacctcaggcgagtgactcatttaagcttcccagtctgtcaatgccgggtgatcccccacttagacagtcatcggagcattagagaattccagttccccattcccatcatgcttcctcctttctcagagatttcaaatagactcttctgcctgtaacgctttgcttctctctctcatttacggaattacctgttctgatctcggctcactgcagattgggggagaacctcaggtggccgctctcacagttatttttctctcagagcacttatcaagttggttattaaacttacgtgtgatcactgcatcaatgagcgccccagccccggactgtggcctccctgaggggtacccctggtccctaacggttgttcaagaaacaaggggacgaagcgtaggcaaccagcggcccttgaatacttggaaggcgtcctgcctgctctggtccccctggggcacgtggggagctgggacagggctcgtccgtggtcaaggtccgcaggtttgggagttggggtcctgcgttccgccagtatcatcccaagctgcaacacgagcagccccggggaggctcccaccgccctgcagggccgcgccctacgccggccgccgaactccagcccacccgcagggaagctactccgagaacgcaggcggagacagtggccaatcggacccggcgggtattctcatccctccaatcaacactacgatccgcccgggcagctcgggaatttaaggctacggatgggaaaaaggttgtcggagggaggcagaagggactgggttaaattaagcaggaggggcaagaacacacagaggaccctgcaaccaatgggaattcgcaggctggggtggtttcgaaggaaggtcgaacaggcctgaggaggcagagctttaagttgagatagccaatagagatgaaggcacagtagatggcgtgtcctaaatccaatcgaaatagagctagaggtgagcggggcaggaatgcggcaggttggaggcaccctaccaatcagaccaggtcagcagcggacaggcgggacggccggctaatgggaaacaaggactgcggaaggccagggtcgggagaagaggcaggaggctggcgctatctttcaggtagccaatcactgtccgctaagaacagcgggcgtgtcagcagcccttttagggactctgagggtctcggaaggggcctgtgaggggtctttcaaggttgaggaggcggcatcgtccaaagagggagaagtatggtcccgagaaccgggcgaaggaaggcggttgtgaatttgggatcctcacctcgggccttgcgccgagtctcctggtcaccgaggctgggtggcttctccatggagctcaggatggagcccagtaggtccgccatcttgggagtgactgagagggggcggtgcgtcttaaagggaagggcggaatgcctttaaggccggaaacacgtcggaggcggaaaaccctgggcccgcctggcctgggcgcagatcccaggcccgcggtgcatggcggcctccagctggcctaggccccgccccgcccccgcagacagaggccggaggctggctggtgcagcgatgtttaatggcaattcgtataaaccaagcccatgcacaagtagaaagtgcccgtggagccggcaggaggcccccgccgcgctagagaaccacaagcccggccgtgcagccctccccgcggcgccttaaatagattcttcactatactctgtatgttacagtatgtacaagacccctcccctcgggggacggggcggactccgcaacgcgttcctatgtacaccacctccccttcggccctgaggtcagtggccagagtcgggtgatggggtaagacagggccagagagggaggaaacagacgcaaacatgcggagtcgggtggggacacggtcagccctgaaacacgaggggcgtgcgcagcgaaggcagtggtgggaaccgaggcggatacattcagagacgcgtcgaacaaataaataaggcaagtcaggagggggccgagtcgggtgcaggcaggaggagctggggagcaggggcaggcagggctccggaggtcacagcggaagatgcaggtatgtggggcgcgggttttctggagccaggaccaaaagagacggggcacgaccaggagggacgaggagaggggtgtgggagcaaggcgtggggaggagggaggaggcctacagagggctccaacaaaggtgaacaggaaagctgccgacaggggctccccctgccccagaaagccctctccctgttaagactgcacgaggcgcccccagggtggtgagaaaggcggtggccaggtcatgtggccagtcccggctggggaagcccttccagctcctggttctgcttcagttccctcatcctgcagagagaaagataggagtcagaggagactggcggatcacgacgggtggcaacgcaaaagcccagggggagaagggatgagtacctgtgtcggcagcgccgcaggaatctcatgatcttccgggctgcctggtcctgcttcttggtgagaaaggagcctctggtgaaagaaacaaaagatggacctcacagaaggcatcgcatgccttcggcccccccaggaaccctaggcagggaatggcagtgaggcatgatgatcaagaggatgagtaagggggaatggcgtggatgcagtgggtgggcacagagggctggggctgggccctacttgttgcgggcaggcagggtggccgaagtccggtggggagggccgggcctgcggcggtaggagcggtagtgctgctggatgagcacagccgctcggcggctctgctgaaatcgcttctgttcatagtagcttcggaacttgctctggatcaggatggccgcctgggtcatcttcttatagagtgcaaactgcaggggtggggaggagggacaggggctgaaatagagggacggagacccaaagccctgaggctcacccaagttaggctgatgcaagactctctgtaacccacacactcaaggaaagactgaatcatcacagacctcacactcagagctcatgcctaataccttaagtgcaatccaggtcagcttgtggagagagaaggggagttagggctctggcaacattctggaatggttaggcgtgggtgtgggttggtgggttgctggttacacttttgagggagaagggtctcacctgcttgtacttccggtaacagcgctggattacagctgctgctacctcctgctgctccttcagccgccggccctgaagggagagaagtctcaccacctcatgacccacataatggcatatctgacttgtcccttcaactttcctggggttcccctgaccctttaccccatccaaggcctgtctgcacgactactcatcctccaaaagccctgggagcccagtctcccctgactggagattgtgtaattcatcctgagacccctgcccctgaccttgtactttcggaaggccgtctggatgactcgggcagcctcatacagttcccgctgctcgtgatctgatagtgtcagcagggcaaaatcactttccatcttgccactggtggatgcagagagaaactctgcccaggagggtgctgaagggacagccaggcgacctcgctcaaagggcagttcgctgtaggcggtagggaaagagggtgtcatgaagcatctgaagtccctcctctgccacctatggatggctacgaaggaaaaccaccagcaactgagtctggagagtgacttcagagttcatcagccagttcagttcgcttctccaaggccctggggcctcagccagaatggagctttggctgtgggaaagccagctttctcccttcctcccatcttcctttgaagaatctggaggctttgtcctgagctagtcacctgggaggggttgagctggggaaatggtccacattctccaggtagctggccagccaggacatggtctcactgagccccacagcccctgtccgctcccgcattgaggctccagcctcgggcagccccacgaagtcctctcgtttaatccgctccggtgtggcttcgatgatctgcttggctagtgagatcatgtccacctggaagaagggagaagctgagtgagtccttaggggccccagctgccagctgtaacctcagtccattcctatcttgttccttctctccctgccaggtgctgctaaccctgtctttctgggccactgttccagactcattcatttatactgatggggctcccacttgggggtccctctgtgctgagatgctatggagaatataggataaaaaggagatactccaagtggggattcaaagctgaacaaatggaggacttgacaccctttcaggccaaccatccactgtcctacctgggcctgccccatgccagctgaccagcacatgctccccataggcttggctgtgcccacccccagctccctttcaactctccaagaaccattccaacacttgccaactactacccggatgaatggctccagtctggcctttgctccagccctgaagcctatactccagcacttcctgctggacacactcaacacaacctacttgtggagttcccta

SEQ ID NO: 64205 - DNA, 2149 bp, Homo sapiens
aacaacacacagtgcccggagccaatatgagtgagcagactggacaggaagagtgagcaggaagaaatgggttggggtgggggagcggggagaagactggcagggcttgggcctcagaggccctaaaccttgagcttttgcacagactggggctatggttgggtcaggtcctgggggttgggactcaggccatccggtccttggaggatggtttggcaagagagcctggatcctgggggcagggcaggagattctacctccggtagaagctaggcctttagaagacacgccctgagttccttctctgtttgatttttccaaggggaagggcagatctgataactgaacctaacctattctctcctccaggttggttaggacctgatagaatctgggccagacacccagattcccaccctcaggacaacccaccctccggctgacagccctctctacgtagctccctctccccaaacgcctctgcctcccctggcctccaggcctagcctaccccatctaccgctctggctccagcctgagccccccgccctcctcggggaacagatgggagctggcggaggctctcagcacgggctccgccaggtgtccaggatggagatgggaggaggcccgtcgggctcggctatgtgcagtgaagctggggttggggtaaggactccgccccagggcgcaggtgcgcagtcctggctaggcagcctgccagggtgcggagcgggagcgggtccttgggctgcacttgggcggcgccggatcggacgcttggcactctgggcggccccccggcggagtggtggtcccaggagaacctccgaggtgggagggtcccgcccgcatagagggatgttctggagaagccgggagcagagtccgcgggcacgcggtgggcgagggacagtgcaggtgccgggtgcgggggtctccgggacagtccccggcacgcgctggtccgccgtggggccctgcggtgagcggcgccccctggcgcgggggaggaggacggaagcgggaggtgagggcgaaccgggaagagggacggtggtccctggcgcggcgctccgcgtcgggacctggaggagctgcgccctctggcgcgggggcggagaggcgggcgagaggccctggctcttacctcccggggtcccgcgggtgacggcggcagcggccattctaccccacaccgaccccccccagcgccggctgacagcggcgtctaacgtcactgcgcacggggcggggcctcccaattaaggggatgagggtcaggaagggaacctggggtcagcacacgtggagttctgggtggggcgctgggcagagggactcggcttctagggctctgagccaggccgagggacagactgctgggaagtccccaaaagggcagcagcactgaggggcaggattccagggtcctggaggcggaagctcggccgactgactcccagttcgagagaacggggcgggggcagcccaccagtgctggaacccgaggggccgggcgaggaacgctggactgggagcaggacccttctcgcctcggacaagactccttgtctggggacccagcccgacttcattgtagctgggtcctcgagaaagcgaaaggagccctccttccccattggcctctccatcgctgcatcccaagaagaaagacaactcgggctccacttgcttgctttttaataacagagcagagagaatacaaggccaggagcggggcctggaggaaaacaggacttggggtgctcctgtgagagcggtgggttgagatgggagcccacgggggctgttaatgcctagttcagaggatgggaaaggcagttggagagacgaaggaaggggaaacgccttcatgtcagcaatgagggtgactctagtgacggaactagtcttgggtccctggggcaccactagcctctcggcatcggtggtttctccttactcttcagacgctgccaactccatcccccagggattgtgaagggggttccttctggctgtgacagtgctgaacgaggccagagagtgcagctgcctggaggcacaagcctcctcctgatccagggggctccagggagaccaaagcagctgtcaagatgagagaaattgaaaaagaaaatggaaa

SEQ ID NO: 64206 - DNA, 2792 bp, Homo sapiens
agtataccgtgcggaagcggcagatggggctagttggagttgggctgaaagggcctaaagtggggtctaaaggggatgtcctgactcggaggggggtcagcagaacgcgagggagcagcgggagctgcggggcattcgggcctcagatagttgggtccaagcgggtgacctagatccaagggcaggatggagctgaaggaagccaggaaggatcctccacagttgacttcggggtagccacggcctgcgcctgcgagggtggatgaggacccgagggtccggctggggctgaggggctgcctggagccccgctggagggaagcgccgggccggagggcgcggcctgcgcctgaaagggcgacggggaccctcgacaggtggaccgggcgtggccggaccttccgggcagccccgcccgagggcacgactgggggctgcttccctcgagaggggccctgaggtggtgggcccaggctgaagggcaggctggggcctgagggacgccccgggtctgagagggcagctccggccttaggcggcacccgggcctgaaggggttgtttgggcctcaggcggcgtccagggcggccgaacttgagggccaggcggggacagagcgcccgagtagccgcgccacggccggccgcatttggccccagcacctgaagcagctgcgcggcgaattctagaactcggcggggcggggaggagagagacggcgattcgagccgcgggaggagccggcgggcggtgctcgtctgagggcggggcctgagcggagccaccttctgggcgggcctcggcaggaggctccgccccctggacgcgcctccaacggcggcgacgggaactgggccggggcctgggtgcccccgcgggtcagcccccgacgtttccctgttcttcaggcgtctgcaaccctcctgggttgcggcgtctgctcgcccttctgcgtccgcagctcggtccccacgttcccgctcgctgggccccacaggccaggagcgttgcccctttaacaagagtagcccgggtcgctcccggctccttcccgggaccgcgcgtacccgcccctccgcgcgcgctcgcgcgtcccccgcccctcgctcccgccccagctcgcgctgcccgggcgggcgccggccgctggcgccgctactgctgccgcccccggggcgcgagtccgccgcccgccgcccgggcacccggcgaggggcgggggcagctccgaaccggccccagatccttcccgcttccgcctcacgcttcccggaaagcttgtccctctccgccgagctgctccgggagccccgccgcgccgaggtgagggctggggaagggggagggaagggacgcccgcggaggaatgtgccgggttggggggcggggagccggggtccggcggcgcgatctaggctcaagagtcgggatcatgtgctgtttgttccgcggaggcgcagagaggtgccaggcccgggcggccgccggctggctggacaggaggacgggtccgcatggccgccctgagaggccgggcggggacctgtgtgagaaccgccgggtgggcaaggtgcaggtggcccaagaccccctttcgggccggtcggccccaccccagccgcccagtatcctccttgtaccccacggctccttcacagctgcaccggccgacccctgtccctacctctattcccttaccccgctggcccccagccgtgccaccccatccctgtcccattagctgcagcaacggcgtcaccatcgcttgtccccaccagtgtccttccctcccctggtcagggtctagggggtcagggctgttcttcctgagccagcttctgtgattccagctactcccttcctgtcctgggacagaccagcccctcaccctcccatgctctgcccaggaagactggtgaggggaggcccagcgtgacaggagtttggggtccactggggccacaggagggggctccgcatcccttatccttcgtggtcctcctccctgttgtccgtgggcgtgggctgctcagcctctcctcccagggtgtgggcacccgatcacccacattcctgggctccagcctggcaccttccccagggcagtggacgccatagcactagccccaggttggggctggcaccagccagccggcttccttttctttctcccttttagggaggccccagggaccctctaccctcaaacacaggtatttctgggcgccccaagggtggagccctgagggttggtctgatggctacaggatgaccccaccctcccctgctcattgtcccggatcctgaggaggaagtgctgggggctgggcaaggggcttagagcccacacagctggccctgtggatcccagtcctgggccctacctacagtccttggactttgcccatctgcactactggcctggtgcatggaggttgtgggcctcaggtggaaactagattctcccttgccgacactgtgggggaatttgaggacaggttttgcatttgcagtttcctctctggtctctcttctgggctcccagtttgtgctttggcgccggagttccccaccctgtctctttaacaccgtgtgtttgctgtgctgtgtctcttcctcctttcctctcccattctttccttcatagcatgacctcaggcttgccttttgtcttatttctctaattttcttggtgtctgtgactctctgcccctcctctctctcttcccacccccctcacgtctctgcccatgtgcccctctctctgaattgccctctgtccagcctctttc

SEQ ID NO: 64207 - DNA, 628 bp, Homo sapiens
agactccgtctcaagcaagcaagcaagcaaacaaacaaaataaaaaacgaggtcaagtttcaaaagatgtcacccccaacctggcaaaacttctcctcaagccctgtcgttccactcttgtccgccaggaggagaaaaggttccctcgaaggacgtctttgcttgcgcgttcacggagccttgagaacgagtggccgaggggacccctgcggccctgcgcgcctgtgagtctcccgggcgggcgggcggtgggggtgcgaggccggggggtgggtgcgaggcgtgggggaggtgcgaggcgggcggggcggggggcgcgaggcgggagggcgcacgcgcagaaggctggctggggtgacgcggcgccgggcttgggcttctgtattccgcgtgtctggaggaaggtccggaggtgggcgggagccctgcggggatttcctcttcccccaggactagctgtcatcttcgtttttcagaagggaggacctgactcctttcagaattagcatttcttccccttcgtgggtgctcttgagttccaaagaaaaggaagagaagccttcattgagcagcttcttctgccttagggactgtgctagggggtagatcgaccttaggggaaacaatc

SEQ ID NO: 64208 - DNA, 1636 bp, Homo sapiens
taaggtagacatacagtagaggaagaagtcaaatatgctttgtctctgggtgggtggaggaacgatttctagtcttgtccggtgaagctcggctgttcgtttccattgccagggtgagggaggccacctgggggcatatgttgctttctatcttgcagctatcggtttaggaacaaaaggaaaagcagtttttttccgtgactcagtttccaagcttaacttttccctttgtcatagtaagtttggggtcctgagattttattttcctttcacacagggaaggaggtggaacgcatcagaggccacgaaaggagcacaaagggggaccgctggcctaagacaaaggaggcgcgaggaaaaacgcggagctcgcgtctcccagggtgatgcccggcgccgctggccccagcaaaacttctctaccccggcctcgggcaggtgcccgcccggggagggggctgtcgtccaggccaggtacaactccccttcccacccttcactccctacccaagggtctcgagaaaagagaagaggaacatcaagacccccctccacggcacgtgacgcgacgcaacgcaggtagcgcagcgcgggcaccacgggcaacccaaacccctctccacacacaaccgcggagctgcctgccaggcctgctcactgcagagccgccgctgcctgcgggacgggcaaaagccaagccgccaggtggacctcggggaagccgccgccaacactcacctcacaggaccaggaggttccatcggggcgctgccgcgaatcgcgccacttacagccctcaccccaggggcaggtttgcgcctgcgcaggtcgcagcctcggcctccaactcccagaatcctcctcgccgccggcttccgttcgcggactttggcccaggcgcgtgggcgctgccgagaggctgggagcccgggaaccggttcctggacttgagcggagcgagaaagagcgcgccgcctgcacgactggactggagcggccgggtgccctggaggcccctgggaattgcagtccttgcgcaggtggagagtgagcccttgtaagcgggtgacttcatcaagtttggggggtctcttgtggaattgtacctgaagggcggtgctggcggacagatgtcagggaaattctggccttgtccatggcctgtggtaacacttctccatgagttctattttccaattacctcttcccagacctgatgagagggccacagctaaggaagacggtcccttccacgaaaaaatattccccaaccactagcctgtacaattcctggggcgtagggggaggggaggagaaaaaagaattctaaggttaattttattgcgatgggggaaataggggttggtgtttttttgttgttgttattttttattttatttatttatttgagacggagtcttgctctgtcgcccaggctggagtgcagtggcgcgatcttggctcactgcaagctccgcctcccgggttcacgccattctcctgcctcagcctcctgagtagctgggactagaggcgcccgccaccacgcccggctaattttttttttttggtaggagacacggcgtttcaccatattagccaggatggtctcgatctcctgacctcgtgatccgcc

SEQ ID NO: 64209 - DNA, 1370 bp, Homo sapiens
cccctatttagaccacggtataaaaacaaaactagccccttcctcagggccgagaaaattttgggcgctagctgcctctcggttgccggctaataaggactctttaatttgtctcaaagtgtggcgtttctctgtaactcgcttggtcacaatagaagctgctcctaaaagcaatgtagacccttacaaagagaccagcccacctaaatccctcccttgtttgaactctaacagtcctaatattttagactgagtagtagaacatatatgaacaatacagttcattcctgtggcttagtctagcctccccagcggggtcactcgtgggatgcaaaaaccagatttggttacatatacaaatatacctggcacagatgtgggcgaggaataatcaatttatgcctgacggtggattctgggcctcgggaagatgccgttagcggtacccacaggagggaactggaacaggcaagagtagcgggacagggccgggaatggggcacgccgagaccaagaagccgaccgagagcaagaaggcccagtcatgcgcacccggcgcctacatcctcctgcggtcccccaggcctctccccataggcatatgagctctgctccactcctcgcttgccggtggacgcaggcgccgcggccgccagctctgtgaacgcagcggggtctcacctccaggctacccccaacctcccgctcggtcgggggcccctccacggccgctatcactgggtcgcggctcctagcgccaccatcttggaccccgcgcctgggccaggcgagaacttccggtgcgctccccgggactgcggtcccccagtccgcgccccgcccagccgtcccccgtcggctccagccaatccgcgcgcgctcccctggccgtctcccaccggatcaggtgtctcctctgcgcagactcctccacgacgccagtcggcgctggcgtagctcggctcagcccggcggagtctgacttccggagggccagcggcgcgctggctggttaccaaggttaccgccgagaggccgcgtcctcagctggtcctagacatgcgtggcgtcggggctgtggcacggtcgggtccggggtgagtgaccccttcaagtaactacgtttttgttctgcccttttgttttgtttttgagatggagtctcgctctttcgcccaggccggagtgcaatggcgcgatctcggctcactgcagcctccatctcccaggttcaagcgattctcctgcctcggcctccccagtagttgggattacaggcgcccaccaccacgccctgctaatttttgtatttttagtagagacggggtttcgccatgttggccaggctagtctcgaactcctgttctgcc

SEQ ID NO: 64210 - DNA, 1416 bp, Homo sapiens
aaaaaaaatagaactaccaggcgggcctggtggctcacgcctgtagtcccagcactttgagaagccaaggtgggtggatcacctgaggtcaggagtttgagaccagcctggccaacatggcgaaaccccatttctactaaaaatacaaaaattaggcaggcatgatggtgggtgcctgtaatcccagctacttgggaggctgaggcaggagaattgcttgaacccaggaggcggaggctgcagtgagccgagatcgtgccaatgcactccagcctgggcgacagagcaagactccatctcaaaaaaaaaaaaaagagagagagagatgagaggagggaggacttgccctgcatcgacaatgtcctgagtctctgcccttatgtggagagatttggcaggtgtgaagtctcgccagctctacaggaaatgcggatgtctcagtcatactggtacggtagtggaggggcaagggtggaagggaacaggcagttctcaacagtaaaaagcggaaggattcccccctacttactcatacatcttttcttcatctacttgcttgtgtttcaggggcttggcaatttcccatttcttgcctaagaggggaaaagcatgttcattgaagaagaattagcaaaagttgtgattttttaatttaacccagagaaaacacacttagggacacagttaataaatgatagagccggacttagaacccagacagtctaaccacagagcctctgcactaacccagtgaaggcagccacagcatgggtggtgtttattttctctatgcctggcacttaggtggcacttagaaatgttggctgaatgaataatcaaaagtgtggttgggaggaaatcagataaagaatcggaaaagcagtttgtatcctgtagatggacatacacgttgttataaattatagcctgcttgttaataggagtggttgaggataaaaagaaagtaggtgaagttttagttctgggtcattcctttgtccatatttgagaatggaaactattttctccccccagacagagcctcactcttgttgcccaggctggagtgcagtggcgcaatctcggctcactgcaacctctgctccctgggttcaagcgattctcctgcctcagcctcctgagtagctgacgttacaggtgcctgccaccacacctggctaatttttgtatttttaatagagatgggggtttcgccatgttggccaggctggtcttgaactcccgacctcaagtgatccacccgcctcagcctcccaaagagctgtgctgagattacaggcgtgggccactgcacctggcaggaatgaaaacttgtttttttttttttttaagatggagtctcacactgtcgcccagactggagggcagtgatgcgatctcggctcactgcaagct

SEQ ID NO: 64211 - DNA, 1270 bp, Homo sapiens
agacctggggtccaggcccagtactgtcggaaacagttcttcatactttattacctcgtttaaacttttcttagccattatattgataaaaattccaagaggtgaagtgactctcccaaggtcgcaaagctagaagaggtagaggctggaactgcaccccgccatcggtcctcctctcttactcatttttttttttcccctcactgtgctggggtggagaaccgggaccggcaccttcgagaggccaggcctctgctgcagcccctcttctccagctccgctcggcactcagcctccccgcgccgctgggtcaggcgcccagctccgccgaaaccctcccctcccgccgcgctccctccgcgctccctccgcgctccctccgcgctccctccgcgctccctccgcgctccctccgcgctccctccgcgctccctccgcgctccctccgcgctcccgaggccccgcccctcccctcgggccaacgtcacgtgccgccccatccccctgcgcctgcgcactgcttatttcccgctgtcaggatgaggaggcggaggtcggcggtcgggtccgtctctgcccgcggctgtggcggcgccggcggatccagccttagcggtttctctctgggcggcggcggcggcggctcggttgacgcctcctccgccagctgagcccgcgggagcccaggacgccgcttccccgcccatccccgctccccgaggccggccgcctggtcatggcgcagccgggcccggcttcccagcctgacggtgaggcgcccaccatggcaggcgcggcgggcgcggcctgcccggcgtcggcgtcgcgggaggatttcggggcgggcaggcggcggcaagggcgcgcgcaggccccgggggtgaccccgccgggcggaggcgggggcgcgcgggctgcggcgcgcgagggcggcgcgggcgccccggctgccgtcgctggggagggggcgggaggcgcgggtgcagcgcttgcgggagggcagagggaagggcgtggggaggctgctgggtagcgtggggtagtgtggggagggagcggttctgggtagcgggggaccggcacgtgggttctgcccgtgggggaggatggaaatcgggaacatgtgctatattcgttaaagaaaaaaaatcttagcttaggtagtgtaccctccctgccgccccaatccttgctatagaactctttgcacccagttatgtgacctgaaagtagttgtgtacagtaactggatttagtagcattccctgaa

SEQ ID NO: 64212 - DNA, 482 bp, Homo sapiens
gcgttcctaaagaaaatgcatagtatataaaaggtcaatgctgattattagtttttgtcttggccgttagcctatatcataataaaaatcaaatgtgaagatttcccctgagacagcagcttttattgtatctactgtgaagtctaaatctagtctttaatgattgccacaggtgtttacagtataaaccaggattttgatgtggacagcagtctttgttttatctttcaggaaaaccaggtcaaggtaaccctgaaagtccaaacattggtttttccccaataggtccagcttttgctttagtgttgtcatagctgtgtttgcacttgtttggagaatagctgaaatataagtgcaaatggtaatgagaaatgcacctttttacttctcttactgcctgttcttttcttagtacctattcttttttttttttttttttttttttttgagatggagttttgctctgttgcccaggctggagt

SEQ ID NO: 64213 - DNA, 1279 bp, Homo sapiens
ttccaaggctctttgtatctgtccctgaagattgcaatatagagaccagaaagtaacatgcagactggtggaccaagtaagttgggcaaccttctaacttctttccacttagactgctaagtgtgcttcagctacttttttaactgtttaatttccaaaatatcagaagttccataagtaagttaaaattccttctcatatattaagcattcatattgggtcaggaactatgccaggtgttgaagatacaaacaaccacagcagcctgcacttaccgtgtggtcatcttcttcttccccttctagcacgacacagtgatacagcattcctgattcagtagcgatcactaagatattggggacacagggtaagcagagtacagcacacgcatcataaccatagttatcttcagccgcaggatgcatgggcaatggacccaacagctttccaatatttccagggctaaagaaggagtaaaaacatatttgggaaatgttgacagtatgcatgctcatcccataaaaccattctttgactttgttttcctccagctatcataccttcattataaatgtagtgtattcccaatactccatcttctcgctttcccactcagatcccaccactctgtgtttctcaaccagagataattttgccctagcggacagtggcaatgtctgaagacattttggcttgtcacaactggttgtcacaatgtggggggaggtattagcatctagtggttagaggctagacagaagccgctaaacattcccgcacagcacagcacctctaaaacaaacaataattcagaccaaaatgtcaatagtacaaaggttgaaaacccttgccctaaatttactatggtttatgctttcaccactccactgaagctactgtggcaaaggtcacctgtgagatttgctaaatccaaaatgcacttaaccttctgctgcatttatcactggttaacgactactgctactcaacagctgtaacaattctttcttgtagttctctcttcctacctctttaaacacaattttctaacgtccttttctaatttctgtctcttaaatattggtgttctccaggattctgttgtatgctttgacttttttcaaaatacacacttaaatgagagcctgttaaactatgcctcgttttaactaccatctatattcaaagactaccaaatcctttcttctaaaatgtagcttctcttcaaggctttggatccccatattaaatttgatttgacaaatacttattattgagt

SEQ ID NO: 64214 - DNA, 2507 bp, Homo sapiens
gggactgcaggcgtgagccaccgcgcccggccttcataattctttttaactgaaattgggtaaataagtagactgtagactcctgccctattttcaaaactgcagaagcattgctagcgtcttattaaaattaaatcacttctcggtaacaagaattggaccgggcacacaacagatgtcataccttagaatgagtaccaagctctttttcatctttaagagaatctgtgtattacaaataaacatttccataaaccaatatttgaccacggcaagtgtgtaatactttctggatcacacccattttcacatgctgtcggctaatcaaaaacaaaaatccccattttgggtatggctttattttctaaagcgggcgttacgggggtaagaattaacagagacttcctcctccatgtcaagcatgaagcgtggtgctttgaaacctgcaacctgacttgctgtgcacaacgcaagagaaagttacgatctaacctattataagcgtcacatcaggaaacaggtttctctcgacgaaactaaaaatagcaactccgcccactcgttctcaacccctttagcccgctttgtttttctccagagcactcatccgtcactagtatttttattgaatattcaatgaccctttccttcctcccaggcctccaggccgtaagcatcgagagagcctgagtccccgcgaccgcgtatggcagcgtcggagtcaatccgctggaacgcctgccacaagatgaaaaacagccaagaggagcaaggaacaaaaaagactggttccgatcccggtgagggtcacttccaagatcggcctggcattacctggtactgggacagggcgggctcttcgccgccgccgctggggccccgaaggcgaacgactaagaaggagctgtcttctccgtcccacaggaaaagctctccgccgaggccaaagaccacgtttctcgtcagcaactgcggcggcggcgacgaaggcaacgacgaagaagctggtttctcagcttcggttggactctggtttttcagtccctcccggagccgcaagaacacgacgtggttaggaagccaggtctgccacagctcgccgtcgcccaccggtccctcggcggccgccatcttggcccaactgctcccctcactccagttgctcagcccgccgctgagcacagccaatccgcggccgtccactcactgtttcggccaatcaccgagcagacggcccggaagctcgagaggctcgtgccaggtcggggggcgaaggcgaggccagcccaccaagcaggggcgtcaccaagggaaagccaatcaccattatttctgaagcccaagggggcgggacgagaagtcaacataatggtggtgctgctggaaatctagcacctggggagagcctgagacttgtgtatctaattgcctattggacacctccatctgggtaaacccaggcatccagaactttccctcaagacttacctccctcagtgcaggtcgggctggcctcacgcatttcgcttggatgcctaaatctgtctccacgtggggccggtcgataaaacaacacttcccagaatacgctgcgatccattcgcggtctgcacccggaaagtacacctcccaggggtctgtgcgcgcctccagggaacgggtcttgtggctttgtctcccgcgaagaggagatggcggagtcgttgaggtctccgcgccgctccctgtacaaactggtgggctcgccgccttggaaagaggctttccggcaggtgggtatggggtttgtgcagtggtctaccctagatcgtcccggtgaccgccgtcttccctgccttcgccttagccctgctccgtggagcaggtgccgcagcgcgcctggtctggtcaaacccaggcctgctgactgtagagtgtgggattagcccgggtcggtcaagtcctagaaagccttgtttttggattcgattttgttttgaatttaaattgtggtcaggacatcaccgtttgcacctctgcaataacactacctactgttgctgcggaggtggccaccgagagaggcactttgtctacgttcgtcttgtgagatagagatgatttctattctagagagtagtaaaatgaggcttagaagagggctccacctcagttctggcctcttctgaacacagtgtggttattagtaagtaatgtccaagaaagtaacccgacgcaagaaagatagcagatacagcagagtttctcagccttgacaatggacattttgagggagatatttatatgttgtggagggttgtttaagccacgtctcgggcctccacccactagatgctaatagtcctataactagaattgtgacaaccagaaatgtctccaagcattgccaaatgttccttgggggacaaaacctccctgagttcagaaacgctgctgtgcaggaaggccgttacccagccatatctagagtagcaagaatttggaaggaatataaatgttctgtaata

SEQ ID NO: 64215 - DNA, 1724 bp, Homo sapiens
caaatttgtgttcggtgaatggactgcctggggcttacgaagttgtccaaatgaatccttcactctcttgaaacccatttatcaaagtatccacacctgaactcaaggctcttctggggatgacccaggatgggtcctgcaaggttaagggagttgctgccctgggatccccagaccagtacttacttttccccggcaactttccgcactaatttcgcttctgtcccattcagttccagctcccaacctccagacatcttagggagggttttatgcttctgaatttttctttcctccttaatttcatcactcaggaaatcaacaaaagctttgtctcctagaaaagaaatccagatacataaaaaggaaagccagttagtctaaaacataaaactattacccaggttattgcagccagaaacctggactgtttctaatctctctgctattacggttactctagaagcctgtttccttatcggtaaaaataccataatagtagtaggaagctgagcctgattctggaaaagtgatttccaacaatgaacgcattaccactttccgctataaaccaggagaatttccaatcctcttccacttgccaaacgatataactatgctattttcaaccacgaccatgggccttcccaaaggtccactttcgatagaataagactaaggaaaaaggtaccctagtatttaattttattcaccccctaccaaaagaaaacgaaactgctggataggggaggtgggggaaatatgatcatacgtgggtttagcccgctggttgccaatcaatggaaaaatgtcccagacctcagaggtcggttgcaggccctattcctggtctacgttttccctctgttgaacgcaaaccacacccccggcccgctaaacctcaccgtcggtgtgcagcgagccgcagccacagccacaggcgcagggtccgcgaggccgcaggaggcccggccgccgctcggaacctgcgcgcacgctgagcagcccgaagggccgggtgcacagccggggtgccggctgcaggagctgccggaaaggcgaggcgggcgcggcagcgcggaggccggcgacggaggagcccagcacacggggcacgcagcgcagcagaggcagcatcgcggaaacgactgcgaacacgtgcagatgcaaaggacaacccaggcctaggcgccccgcgacctgaggcgccgccggaagccccgcccctgcccggaagcgcttcccgcgccggcgctctgacgacctaaggccagcgggcggaatcgcgccctctgctggagactccggtgcagcccgggaagcctcgaatccggattccggagctttcttgctgcgctgccgagtccgctgtccgaagctgtttaattccctctagtggccgcttacccactttccacctgctgttctcaaagcacgcaaggcttttgggctgcgtggaatgcactcttgtctcccgccagctctcaccagacccttccacggtcactttcctctaggaggctgtggtgttatgatatatatatgtattggttttcatccacagttcctgggtcgtaactcctatagcccttgttacaatgttctgtgataatgttgggtgtgttaggcctcaggaaacagactctccccttctcctgccctccttttacctgccccaaagcaggactctaatctccttccacatttctgattatgggtcttaa

SEQ ID NO: 64216 - DNA, 1672 bp, Homo sapiens
agctcacatccaaatccagtgggcatcacatccaagtccagtataaccggacttgactgctgcatctgctcactctctattcctttgactagcagcactcatgggtctccttcctctctttggctgctcatcctttccgtccttcagtatctcctctaacacgttggggatcataagccccatgaaatcagtccctgccccacaactctgcctcttttcatgcaccagaaactacaccttccctttcgaccggaatgtgttcaggttcccatctctcaaacgggctttcccccctgcctagaatgccctccctcccacacgacctccccagccgcctcctcacaaaccgggtcagatccactcttctaagatccgcaagcccccggtacgtttctctacccttttacgcggaaggtgagtctttgcctacacacgttggtcactctcaccgggctgtccagcgcctccagggcagggctgccggactcttcttcgaggcccctctccaggtctggcccagaaaaggtattcaggtttgttgaagccacgaacgaaagggattgagaggcatgtaagaaaaactgctctagctaagccacggacgaagtgcaaggaagagcccgccggcgcggccactcaccgatgaggaccgcgttgtccaggtttcggagctgggccaacagttgcccccgcgcttggaagatgggcagactccggcgctgcagctccacagcttcagggtagggactggccgagggctgggccaggggcggctgctgcctccggcctcctcctcctcctctgccgccgctgcccgcagtcagcagcatcaccacttgcctcccgggagggaaggacccagcgcggctcggaggtccagagcctggccggaatctcttggccggcgggaagcccgcctcctccggcatgtcgggagggcaccgcggcgggaggcgcaagcgccgagagctcctgccccctctcaggtgcagacaacaggagcacaccgccccttcctcgccgccacgtgctggcggctcccggcgaccaccgatgacctcacggccgccccagtctttagaaaaagggactgcatctcccagcatgccttgggggcttgggaaggctttcacttcctgggggtgggaaaagcagggcctgaggtacaaccaggaaaaggcccggagctacaaccgggaaacacaggatgtaaggttccgtgggactgtagtcttggttaacgaggtttttctcattgttttattttttttttttgagatggagtttcgctcttgttgcccaggctggagtgcaatggcgcgatctcggctcacactgcaacctccgcctcctgggttcaagcgattctcctgcctcagcctcccaagtagctggggttacaggcgtgcgccaccggggcccgtctaattttgtatttttagtagagacagggtttctccatgttggtcaggctggtcttgaactcccgacctcaggtgatccgcctgcctcggcctcccaaagtgctgggattataggcgtgagccaccgcgccccgcccattgttttgttctagtagcattacttcttttcagtaaacccgcgttttccccttctctgtccaaataacagtcactcttcaaggaaagtacttaattctgtaaaatcaatg

SEQ ID NO: 64217 - DNA, 2426 bp, Homo sapiens
agcattaatcactattgtgatgaaccacttacttgaaagtgtttaaagattaattcaggattgaagtacaactgaaaaggtgtgatcaattccaactgctgaaatagaaaaagagcttcttaaagcaaatcaagaaacaaaatttcatcatttacaacaaagaattagtaggtctagcaatttccaactctcggtcacttagacgtgatttcctttaagcctttcttcttaggccagaggaagaggttggtaaagaattctctaggattggtagaattctttgtatcctcaatacctaacacaaaaaagtctgttttatgttgcaatagttgaggctgacatgaagaaatgaggcagacaggtggtgatattttagacacaggacaaataaaaacagctgctatgaatctacccaccacatgggcaccacctgaaacagctgtatgaaacaacaaaactcacttgaaataacggagactggagaccctgccaccgttagggctgggtacctccagctagccccttatttagatccagagaccctttttattataagccattcccctctcgacagtttccagcttgctttccccattcctgtttcttcactaaacggaccttcctctcactagtcaccatggtaccacctggccattggcagagctctcggacacatttcttgggtgggaggctcccgcaaccctaacccgctataggtccggcgctcatctcttagaaactgacctgaccccccatgaagcagcactcccttctcgcgtcactggataagcattcttggcgccaactcgaaccccagagtaatccctgtacgcctccacccatccccgggaccagcccctctgggcctccccgaggcccaaaccccagtttcctgaagacccagtcatatccagcccagataatgagaaggtggcactgcagctgctcaccacggcggcggtggtgaggacgcaggcagtggtgtaggcgcggctgaccggtgggatctgcaggtactccagccgcaagctctggtacgccatcttccccaccgtcgcctgccccaccccccacccaccccatttccccttccgccagcaggccccggcggcggggcgggcccaaaggccccccgcccactttagttttcccgcgactgcccaatcaacgccaagcaaccgcaatccgtagagacctaaggaacgcacatccgccaatcacgagttgcgtcgccaccgcccccccccagcgccccatctccccaccctctcttctccaccagccaacgtccgggaaaaacgagtaagtacaggttccttctgccaatccccgccggccacagctaactttcccgcccggcccctttctgtcataattgaggtgtccacaaccagccaatcaggaacgcgagagtatcccgcgtttgctttcgctcgccgaggcgcgtatcagtcggaattttggggagccaaccgcgccgtctgtccctggcaagccagcggcggtttaaaggaggtggcgggaagcctgtgtgtgcttcaaatcgtcaccctcatggtcgctccggtaagtgctgcggggcagcattttctctgaggaggagcggggacgggcgagactggcataagcgtcttcgcgagggagcaaggcggcctgtgggtcggcctcaccccggcctccgacctgaagatcccagcatgcagcgcgggcgcggggcccgacggaagccgggagccggccggaagcagttcctgcgctctggcttctgggtcctgtcctgcgcgatcgcggggtcttagacagctcaactcgccgagatgacctgggcacctctgcgttgaatcggcaaatactgatcaagccgcatttattctgctctcaggaactctaagtctagcagagaagatgaggcggtagaagttcatcagtcagtgcccgaagagaggtcctaatgggaattcgaagaaaggagttaatcaaggaagtgtatttttttgttgttgtttgagatggcgcccacctgtaatcccagctacttgggaggctgagctaagaggatcacttgaacttaggaggcagaggttgtagcgagccgagatcataccactgtactccagcctgggcgaaagagtgacactttgtctcaaacaacaacaacaacaagaaaattagccaggcatggtggcctgcacctgttgtcccggctacttgggagactgaggtgggaggattgcttgggcgcgggaggttgaggctgcagtgatctgtgatcgtgccactgcattccagcctgggcgacagagcgacaacatgtctcaaaagaaaaaaagaaaaacagaaagaaatcctaccttacatatacagccaaacagttataaccactccatatttaaccattacaaacgtaaatttttattttattttat

SEQ ID NO: 64218 - DNA, 1562 bp, Homo sapiens
tatggggaaactgaggctcagaagctgtgatcatacagtaatagaagacatccaaatgagcgatagcaatttctcctataacatcccagacttggttttaatcccgtgttggcctgaattgtatccctggtgaactaaccaaaccccttgctagatagcttgaactatttagcacctccttgtctgagcagaaatctacttccttgttcttgtttagccttctagactggcaccaaccaaaggtgtacgttctggatttggatgtcagaatctagaatcaagatcaagcaatcttaggacatgggaataacaaattaattttaacagaaaaaacagacaacgacaaaaatgaagggacttaaaaattgctttgcaaaggagagaaaggggaagttcacagcagctcgcatgtacaaggcctgagagtctgagcaggctctaagttcagtgtgatctcacagttcagggaggtgggcacaggggagggagttcaggttgtggtaccaggagcaccgggtccatgtaggtggagaaaggagggtgtttacatgctctctgctgactggacagtccaggggtcaattctgactcattcccacactggagcatctactgagggaggtgactggatggcaaagaatttacaaaccaaaatagaagaggaatgatggaaggagctgagatgtctaacttgcataacaagagtcatcaggaatgctatgaccacagtctttgagaatctaaatggctttttagatttaaggggaaggagatagactttttctatgagttccaagggacagaattaagactgataagaggcagagattggcttaacatgaggaaaaagataacattgctacgatttgttaaggattactgcatgaggcatgtatagacatcgctttgtttaatctttccagcattcctacaaattagtcattatgatcctctttttacagacgagggactcaaatgaattaagtaattttcccaaggtcactcagcaagtaagtgccagagtgggatttgaatccaggtctgaagctggggctggttagttctccatctgtggttgcacccaagccaggattcagtaaagcccatcctctttccactacactgtgaagccagcttgttgcagctcagaggtagattcaccattttttgagagctgactagggatggttgtcctagaaggactgtttgggggtttgggttcttagattgttggtactagactaagagtccataaattttctctatcccagaaaatttattatttgatttcctcttgcctacctcaaaaatactgagcgatacaggggagagtatctgaaattgccaaatcggtttaacccatacgaccatatgactatctaggtcttattcttccacctcacacccaaactatcatgagaaacttagctaaaagctttgtgtatgtcgacatctgttaattcaagggcactgtgaagacaccattgtgcatgggagagaacataaattttagagggtcagattgagtcaagtttaaattctagtcataacaactgttatgt

SEQ ID NO: 64219 - DNA, 1574 bp, Homo sapiens
ttctccctacgatgtagactggcctttctattaggcagtggtgagagatgagactggagagatactcaaacagctcggtgatccccactgcctctggaaactgtcctcaacaccatgtgctccgtgcccccaccctgctcccctctctatctcttaccactgcctactcgacagccctcctcccactcctacccagcacctcctcacctccaggctgctccactctgcctgacacttagatcactgactccagcacacagtcccagctccaggccgcctcgtctggaggccttccttgaccctcccgggctgggccaggaactcccgctatgcagtctcctcccgcctgcctgctcttcttggggtctctcccagaggaccctggccccttctcaggggaggatctgggtatttcttccactactcctggcatctggcagagcaactgatctaggaagtgctttgtgggtaaatgttagctaagcaagggtaggtttcttggcttcccctggattgcccagtgtggggccctgatggcagcagcaatctggtggcctcggcctggggctgttgctttctggaatattctcctcccagctcctcgcctccctgcctcttcatcttctcccctttggctttaatgcttgtaagaccatccaggataattaagagagaggagttttatgctgtttatgggactttgatcaaagattttaattaacctaccttgctttaagcctttaaaagttcattccccagggctgaccgtttgataatggaattaatgcttctaggcagagtgggggagtgggggaagcaggaatcgggagggctgacaaggagggcctagcgattgtctcattaacccttccccagatggatagatttcggctcaacataaaagatttgtctcagtctgagctattcacctatggaatgatggggttggagtggtggtgagacccccatcgctggaggtatgctagcagatactagacagtctcctaggagggaggttagtcagtcatcgcctcattgatcagacgaggtcacttttagggacctgccagacctacgagtcattctctctctccctatgccatgctggggaggggcagggtacacagtctgactcatacctggagctttgggttgaggtcaaaccagtagttctaataagaagacaaagactaaaggcagcaactccatgaagctaacataccacttgcaaaaaaatcactcttccaaccagccttcatggaagctgcgcagagggaatacttatctgtgcagacaccacctcatgggttcagacctgtgcatctgctttagaagccccgaactagttgtcactggggaggcagtcctgcaggtaggggttcctgagcagacatgcaccagacacccctggaaagagacttcctggagcacaggccctgcctgttctcagatgccagtgccttccggtaacaagcacctcctttagctcaggtgaggatcttggtgagacagtctgctgttttgaacttggggggaaaagggactgcagtcaggaatgtctgtggtaggtgggg

SEQ ID NO: 64220 - DNA, 494 bp, Homo sapiens
taactattttttttttttcctctaaaaggcttaagttaactagtgggtaacattgcctttggagaaggaggcctcagggaaactgttaactcttagatgagaacgaagaatgagtgtctcaggttttggtgtcagtgcttgcttagagagagaatgttcaatctttgattcttcaaaactttgggaattgtgtacatgtggctgtgcttgtgtgcattcagcagttttggcttgttcattcattgactcacttttttttttttttgatctccaggaatgtgctggcactgatgacacagtaatgaccaaggtaaacaaggacctgctctagcctgacaggctggtaaggagagacagaaaacaaggatcttagattgtcaaagtgcatcctagtttggctctatgagagggacttgggcgctggtagtttacctgggaagtgatttcaagaagcacaaattgggccgggcgcggtgactcatgcctctaatcac

SEQ ID NO: 64221 - DNA, 2574 bp, Homo sapiens
gctcgcccatagtctgttctttttcacaagggcctgagacaaacccatagcctatctcctccccagtctcaggaacccccacagcttctcccctccacaggtgcggggccatttcagaacttgacgccaaagccccaggcacactcgcaggaggcaccctcccagcctgtccctgtccacagaagcctaaggctctctcgtaagctgcccctaagcccagagctgtgggccctgagggggcccgagggatcccccttgcctgttccttcacccagggccctgtaagaccgccgcggcttgtctctacccaggaagctcggccaggaacacccctttcgacaggtccctctcctgcaggcacgggatggagctcgactctacttccttccccacatcccgaggcggccctcatagcctgcaccttcagccacaggtgcagaatgctctcatggcccagagatcccgggcgaccttttctctcgcagccccggggacttctatcttcggtctcctcctccccagacccggtcacccacacagccccggcaagccccaccacctcgggctcccccacagccccgttcacccacacagccccagggtcccttgcagcctcgatggagcctggggtcccaggagctcccaaagcctcattcgccccggcggcgtcggctgtctccgccgcttgtctcgtcccccatggccgctgacggccctgtggcctttctgcactcacacagcgcgtctcccactccgagggcttcgcccggcgccttgctccacggcctcgggacgtccctgcgccccgtctcttcccccacggccgccgaaccccccgccccgacctgctgggccccacgcagcgacccggcatcttagccgcctgctctccccggcgcagcctgggcaaggccccacggcgagtctcccggctcatagctccagggcagttcccttcctccctaccgcggccctgggggatgtcttagcacctcgctccctaagctgctccacacacgcactcacacactccgctccggccttgcagcctttctccctccgagcccctcacccatcccacccccgcccagtctcgggaacccgcccccagtcccaggcccccgtaaagcctagacggcagaaaaggtaactggggggacaaagcaacaaaggctttccgagtcagatctcctctcccccaagtccatgactctatgcggcttcccagaatcccccccagccccggcccgagcccacctggcctagggtgaggcgcggctactgggaggcgggcaacgggggcccccaacaaggccgcgcttccggccgcctgcccagtcgccatagcaacaggcgcagggcggcttgggagcctttgaggccctgaactatttaaggatccaggtgttgcaaggcggtaagttttgcagccagtgtccatgaggtcggggctgggactagattagggtagatctaagcctgggcttgggagtgcagctagcgcagaaagatctgaggaactagagcaaaaagccatgcggatggattgtggtcgtcagaggctcccgtagtctttagcggcgctggcttccgcaggctccgccctctcttgcccacccggaaacagcctcgccccgcctacgcgggacccaaccgcggcgaccggacgtgcactcctccagtagcggctgcacgtcgtgccaatggcccgctatgaggaggtgagcgtgtccggcttcgaggagttccaccgggccgtggaacagcacaatggcaagaccattttcgcctactttacgggttctaaggacgccggggggaaaagctggtgccccgactgcgtgcagggtgaggccgggattcgggggctgctgtccaatggaaatggcaggaaggtcgagcctacggccagaaggggggcttagcggaggcagagtcttggttccagacatccgcggagcaatctgagctgtccccaagtctccttctattaaatcctaccccgccctgccaagagcgctcttccttttaccaccttacccggatgatcttggaatctagttccttaaaacttctcactcccccagtaccattagtgtcttacaggatacgtgagttggtcagcaaatacatgtgctttccattgttacgggcgcggtggtgcaggggcaaatcgggactgggatttggtccttacccttaacgtggctctaagaccagaagggaacacctgacttgtgttgacctcttcagttagctgcaggttaaagtctgagtgcttaccaagactgggggaagggggaaagaacacagtttatacgtgcctgattgtagagttgacgtgcgattattttatctcaactttttttaaagctgaaccagtcgtacgagaggggctgaagcacattagtgaaggatgtgtgttcatctactgccaagtaggagaaaagccttagtaagtggcaatgtataatctacctcgcagacgtgcacaaattgcatacttaggcgggaagggcctcagggacttacttacccagtttgtcttacaaggtaatgtctgacaagttaaac

SEQ ID NO: 64222 - DNA, 1612 bp, Homo sapiens
ctgtctcaaaaaaaaaaaaaaaaagaagcaccagtagcagaatgatacacaagtctggcgacgatatttcaaacttaggcaagctcatgtgagaagcagaaaaccaatcaaggaggacacggtttaacacacaagtcctctcccttagtctcacccacgccagggagctggtggggtggtgtctgaatagcaaagatgtgcgaacaaaccaaatcaggaaaactgcaaagagtaccttagtctttctagacgctacaagagccttctctcctctctgtccaaatattaaccctgccaagagtaaggcctggaaggaggccacggggaagaggtctgggtcaaggagagttccatctgcgaagactccaagatcagagagctactcacctgtctccatagcgacagcagcggccataacaaacgaagacaccaaaacgccaccagcctgacagagcaaaagcccagagacgcgggcgaagttccggaaaccacggctccctcttccggtcccggggcactgtgggatatggggcggggcggctccgcccatccccgaccagccctgggatggctccacccgcgctggctccaaaatagcgagggggcggggcccgggccgtgggagcgcctgaggggcaggagtccagtgttttagccttcgaaggaccatggtgcttccacgtcatcgtgttgtggcgctcccggctatggcagtaccgtagttttcctctcttctgcctgcggtgaccattgggctgtagggtgccccgaggcctccctggccccctcacgccggcagaatggcctcagcccgaggggccaagcagtcttcgccccgggtggggaccacccgctacacagagacgtccacggtccgcgtggagacctcgtcccaccgcgtggagacgtcgtcccggcgggtggagacctcccagcgccgcagcgaggggccctccctctccccctcggggaagcggctccctcgcatcctcgaggcgtcctcccggcacgtggaatcctcctcgcagcgcacggaaacgacctcccgccacgtcagagcctcgtccctgagggtggagacgtctctgcactgcgcggagagcccgaccccgcggccaagccggccgcccgccagaacgaaaaaacggcccgatgagatgctgcttcccaaaggccaccaaggggccagggccctcagccaggacagaaaggcctccagttgccagccagccagccagctgccaggtggaccaatcattttcggtttcatggaaacaaaccataaatcaatgtaagaaacagccaagccgcagtttctgaacacagccaacgtttactgaccgtcctgcgtcttggaccagcctacttttgacccagtgaactattttcacttgaagccagcacagaaggttttcaggcccaggatgctgtctaaatcgggttgatggacaaagagaggctgtttgagcctctgagccaggtgagtttgggatccacagccctcagaaaaccttcaccccttaggaacagagaccaaactgaaataatgacctgtggaatgattccatgcctgctaaaaactcgagggacaaggaacagactcataaattat

SEQ ID NO: 64223 - DNA, 1385 bp, Homo sapiens
acaggtgtgagccatcgcgcccggcctgtatagcaactttttaatgggagttttcaaaacagttcctccttcagaagaaaacttaggaaaattccctattttccccacaaaatcacaggtttccgtgggcacttttgcctctgagctctgcagtctcttccctctggtcacaaattcccctggtttgacttggctcgaacttcctgtggatggaggcacagagcacaggcacttaactcagagctgagtactttctatcctggtgtggcctgatcacctttgcaccacagataaatttgtgtgttttagaaaaacaataacttttttttagctatttgtcagccacaggtcatggtttctgtccaaagtctggctgccatcaaaggtgacccctgatgaacttgcctgtgtgctaggaacaggaaggtaaactttctaggacctgtacactgctgggaacaccagaggtattcagtaaatgtctgggtttggatggatttggtcataatcactgctggttttactcgacttaaactccccgtgcattgaggcacagagcgtatgcgctcagctcagagctaagtcacaggtttgcggtgacctggcctgatggacccacacggcaaagaggaagcttgtccagcaatgtcgaactggcacgtggggaccagcttatctttaattgctttaacctgcctgctcttcctccctgtgctgggagctgtgcggggtgcccagcatcagagtggttctggaggaattcaaagtcaccggaagccaaatgcagatactaaaggacaggcctgtgatatgcccaggggccgctcagagatggaatgggggtggggaaaagtcagggaagcagcatttgaactagccttgaaggctgaggaggtgggaaggtagagaatggcattccagggaaaggggaccacgtgtgcacaaagctcagtgagcagcctgggttcgaaggaacaggagggcagactagcaggagacagggctggagaaagatcagggccagacacgaaggactttgtaaacctgcctattgagtctgagggctcttctgcagctttgaggcataattaggcataattaggctgtgagcagctcaaacttacttgaatctcatgtaaacaaactggagccacagccaggcgaacagcagcatcaccagcatgttgggaaaggcaaatgcaaaccaggaagcaaagttcacgaggtccttgctgtcaggaaacaacctacaagaagacaccggcccccacctcagatgctgagctgtgggagccagcctggccctgtgcgtggggacggagcagcagctgggccctgagaggcgcgcctgtgtggaggccacatcctcctgaggtctagccacc

SEQ ID NO: 64224 - DNA, 4382 bp, Homo sapiens
aacagcagcgtgactggaagcccaggctttgacaccagacagatatgattggcgcccactgtcagccactgtctggcctttggcagccactaacttccttggggcttggtgtcggggtgtaccctgggcaggccatcagaatgatgcctccaggggcagacaatgagagggcgcattggagagaattttaaaacaataatattagctaaaaattagtttgcttcttactatcatcaagtgatagcaattctaaacaatgtcgctcataaattactcctcctgctcccaatcctggtccctgtcccctcttgtttcatgtcttcatctgcaaatcgtggatttaagagtgctcattcttcccatatggcgcacaaagtcctcggtaacttttgattctctaaacttagaagcagtaggtggcgtgcgtcaccaatgtacactgtgcgttcctggaggagtcaagcagacccactaggaaagaggacgagacacaaggttaactgccccctcacctccgcgccactatttagaagcccaggaggtgcctcatccctgaagtcaacaggcttgacccccctagtctagaatgcctccacagtgtcaagggagagggcaggatgggaagcggatgttagaaaagttcaacattaacaaggcagggtgtcctgacacaccacttaatgaaaaaatgcaggcaaaacctactgtgtgtgtgtgtgtgtgtgtgtgtctgggaagagagagagagattcatctggaaagatgttcatcaaaatgtgaataacttatgggatttgagtgtacttttatttttactttatatcttacagatttgcaaaaaagaaaccttttacattttaataaaataagtgatacaagaaatctatcatttatttcattaaattttttttcaattaaaaaaagacccagaggaaggatagagagagtggagcagagatgaggccaggagggaatccaggtggagacaggaaaactggagacagtcggtgaggagagaggcctgggtgttggcagagggtggcgtgccctgggagtcacctcctggcaaggactgtgttgctcaggctgccaaggtcctcccagcttctcaccagcttcccagctgccctgcccgtgctgtgtaccctctgggtttccttgcacaatggggcggccatggagggtgggggcagggtgaccaaaacaggcagaaagggaaaaaacaagaagacaaggtccagggtcctcacccaaccccgccagaaggaaagctcgtgaaggcagcctttggaaggactctccctgggttctcttcttcccctccctggtcctcactcaaaggacagcttaatctctctctctctctctcttacacacacacacatacacacacatacacacacactgagttagggtttccagttcagggtgtgtgtgtgtgtgtgtgtgtatgtgtatgtgtgtgtttgtgttttttgtgtgttttgtgtgtgtgtttgtgtgtgtgtttgtgtgtctgtgtttgtgtgtttgggtgtgtgtttgtgcgtgtgtttttgtgtgtgtttgtgtttgtgcgtgtgttttgtgtgtgtctgtgtgtttgtgtgtgtgtctgtgtgtgtttgtgagtgtgtgtgtgtgagagagagagtgtgtatgtgtgtgtgtgtgagtggggtctcctgtggcaggaaggtcagccaagctactataatcattccagggaacatcactccctaccagcagagctgaaatcgcagctctcctgcctggctacttcccctggacaataacaaccccagacttcttgctacagaggaagtgtggctgcccacagttggtgtggcaactgcacagcctccacagttggatctgctgtccttgacccatccagggcctgtgctaggcccacccaagggctcctcccagtctccccctcccccatcctaggaactaacgttaatcccttttgattcccaaagccttaaagtgtcagaaccaaaccacctagccccattgtacagatgagaacaccaaggcccagagagcacaggcacttggctaaagtcacacagatgacagaatggtggaagtccagttctcttgcaggttggcttcctgacaccccagtgcactcccttcctctagagctcccccccagagcatcccctgaagagctcctctgtttcccaaacctgcctggggaggggaggtggggagctggaggtttcctgtctgggctgagagtgaaagggctgaaagaaggaacgaggaaggagcagccagcagccacaaaaggcttcaaagggcttgggcctccgccaaactggctgtgcacagcccagtggagcctgcgcccaccctgcggccaaggccattcattctctctctccctcacagaagcattaggagactagggcctgggaggaagcttccctgcaactccaggtcctgccacccaaggcgcgagctctgggaatgtgtcccgcctcctgctacagccccagcaggcaggaggcaaagcaggccaaccccaacctgcctgcagcctggagcaggattatgaatcagatgtggctctccaggttggaaggaatgtggatcatagatagagacactaaggcccaaggaagggccagagagtggcaaagacagcgcaggatccacgtgggtgatgatttttttcctgtaggtccctcctgacggcagaagccacctacagcttgaagtcttctttggcgaagggaaaagacaggagagagagagggaaaggcaagctcccaggttccctgttggcgcaggtggcattttggggggaaacagggttatgcactgtgggagattcgattcggagccaggggctgagcctaaggctgggatctgtgtggctgagatctgtgctcacttcgaggtttccgtgcttgcctggacggctcttgcgccctgggatctgtaaaccccaagggtggtgcgccctggggtcgccatgcccctcagattctttacagggcacctcccatccggcacctggagctcctgagtgcgcgcgccccgggagagctgtgctccccgcgaaatccgtgcgctccagctcagggctcccgggatcggtgcccgttagtgggcacaggacgccgggtgtccgaagggctgcctggagatgcaactgaccttggcgggcatcagaatgacgagtggcagcagcaggagcggggtgacgaacaagatcacgaaggacttgaacttggagacatagctcagcgccgaggccatcgcgcgggagggagactggcgggcgagacgagtgaggggcagctagaggcgccgcgggcttaagaaggggccacagtccccggggattggggagggggcggtgacaactccgccccgcacgggggcgcctccccgcggccctggggcggggccacccctcggggtctgtgggacgcgcctgcccccaattctgccacccggcggcggtgggaggcgtctttggactccaacgcttcgggccagccctctaggggcagcctgggccctagcatctcgcgctgtccaagcctctcctgcgctgccgaggcagaggtgcgtcccggggctgccaagcggggcgtgttttggtcactggtgctgcccgctttggcgtaaggcgccctcccgcgtccgcatctgctctttcctgggctctgaagggtcccggatgaaactctctgcaggcctctgggtctctcaggtctatctccccgatctccctctcctttccatctccttacttccgcccctccggtgtctctccgagaggtgtccccccacgccccgcgccctccgcaccgcgggcctcgcttcccggtcccccctggcttcctcgccacgtccgccccactctaggtgcaggaccccttttccccgctcgcactctccggcccggagctcctgggcgatcgcacagggaagcgaggccactgtcctcctctgtcccaggggctgtcgcgctccagtggacgctgcaccccgcagacgcccggcgggcagatgcggacacgcgtcttggaggggccccaccgagcctcagcagccgcagctgcccgcccgacccaggtcagagggaaacggagctctagagaggaagggacacaactaaggcgacactgagacagtcgcccatgtattcattcagcccgccaggcaacagacaggtgccgagcacctcttctccgcgaggccctgttttgggcactggagacacacggatgcaaagacatccccacctctgtgattttcttctttcctctcctctgcctgcctctcattctgcagcttccttttggggagtctcatccatgctggtggcctaaccacagccggctccttagtgatta

SEQ ID NO: 64225 - DNA, 562 bp, Homo sapiens
gttagcaccaaatgaaaaagaatattaagattgttaagaaaaattccaaggccaaagtgctacaacaacaacaagctaaataaatggagagattataccaagttcacggatagggagaccacacattgtaggactatccatttctctcaaattaacctataaattcaattcaattccaattaaaatcccaacaggatttttagttaacaagcctaaaattcaggtagaatagcaggtaagccaagaataattacgacacttctggaaaaacacgggggaaattgccatttagacttcaagaatgactaacttgtaatagttgatgtaatcattaactattgacatgaggttagaaaaagagtagaatagagcctagaaatagacccatggttgcatggaaactttatttacaacagagattgagtgatctatccaaagtgtactctcagttgctggatcaattagtttttagcaatatagacatttttctttcactaagtatgctaaatacatgtaggagaagtttgagcataatttctaataataaggttatttctgattt

SEQ ID NO: 64226 - DNA, 2714 bp, Homo sapiens
aatggcaccattgcactccagcccgggcgacagagcgagactccttctcaaaaaaaaaaaaaaaaaaaaaaaaaaaaaaagaagaagaagaagaagaagaagaagaagagatggacacaatatcttggagccagtgtgaatcattgtaagaaagaccacgtgatgtcaaggacagggtaggaagaaacataagtttccatttttaaaaattaaaacactagttattccctaaaatgagagtctgagtggctgttcattaccacaacttaaccatatgagtatgttcaccccaaattctgagtgaaaagaccctgaagctctaaactttttctctttcacctcccccgctccaccataaaaagaaacaacaaaaaaattgacatatatggtcatttgtcctgagttccatgagatttgcagcaaccaaggggaccataccatgatcaagctattaaaaaattggttggatgcagcggcacatttctgtaatctcagcaccttggaagaccgaggttggaggaccacttgaggccagttcaagaccagcctgggtaacatagtgggaccccatttctacaattttttttaaagttagctaggtatggtagtgtgtgcctgtagtctgtgtgaaggcaggaggattgcttgaacctgggagttcgaggctgcagtgagctatgatcaccactgcactccagcctgagtgacagagacagacttcatctctttacccaatatgtgtaatctgggaagaggagaaggctcataacactcacccttgtaaacatcagggaagagaccttgacatttggactgtgattgctgattggacgggaatgggttggcaggggaagtgggtgagatgttttaaccaggaaaaagaaaaaaacaaaaacaaaactatgaatgtgtgaaaagagacttctcaaagaaagaaaggaagagaaaagtactggtcactccccacacagacagaatgccatggagttgctctttcttgccatgagtttaatgacaagcttccttccccttcatatgccaactaagcagcagccagcaggtcattccccgtctttgctgcccagccaggcctagagtcttccccaaacacagtcacagatattcccaggcttgaatgccatccagagactagtcatctgatgcaatttcctgtggtctgacaaacgaactcccatccaaacacgttgtgcttggggagtctgactatatgatcacatctcccaggactcaggcccactctgaccacaggattcttctaaagacaccaccgacagaagtgtgtgcaattgcaccatataatttttgtctgggaagtgaaatatctctgtcgttacatcatcttccttagcatagtgatcccttaaaagaagaaagcctaaataagatcccttctcaaagccaaactattaaaacaatcctttttaaatattctttcctgtcttccatgctgtacaagtacagctttcacacaatttctcttctgatcttcaaaacaatgcacggaggggtgtattattcctgtgtcctagtccagccaggacttcctgctcccctttccccccgattcctgcaaaggtgacatggccagcccggccaattcacgtctgagagactggcttcctgtgacaaccttcacccccctcccctgacccacaggcctgacacaaagagactgccggaaactccccacaacggccaagtgggtagccacagtgtcctggaaaggaattctaagcccacaacagagcatttctcatctagctgttttttgtttttttttttttaaatgggattggggttggcgaccagccaaagacgggtggcagaatgatgaaatcatacaagcccacagcaccgattgatgtcgtagtggaaatggggacaggcttttgtgctaaccagagtgttcctacatacactctctgattaataatagtgatggcccaggaacagccgtgacagtcaaagagaaacattgctgtatttgtaacattccatttttttaaagagtgtatattcatatattctttatgaaatctaagttatcttgagaaatgaaaagaaaatggccattgctgccactttgagagccctccgactcaggggtgttgtgtgggttgggggagatttccaactccctgcttaattatctcaaaacaccccatccattcgggtcagccagcatttgactgcctgctactgcgaagctcaatactgcactctgcctaataagcacaaagcccgcgggtctctccaggaaggcaggggtggtgggtcagaaagagctggctctcaaatcgcccatgcctgtgattggatggggaggagttgagacaatagacacacagccaactaaccaaagccagagacaaaggaggtagattctagatcagtgttggcataggagttggtcctgaagaactgctgggattttgatgaggaagggaagggttggcgtgggtgggacagtctataggaggaaacatcttggaagaaaattaggatgtagatgagaagcaacttatggtcacttctaattccactcctatcccctggccacacattccattcctctaaggtgtccaatctatacacccctgccaccacccctatcccatctcagcaggagacaatatgtgaaaagaaagttcttcatttttccttcttttccatttctttcttcctgtctttct

SEQ ID NO: 64227 - DNA, 2015 bp, Homo sapiens
aaatggagttaataatgcttacatgagggattaaaacgaagacaatgcctacctaatgcttagaatggtgcctggaacataggaacaatgttgaaacagtctttcattcttccctcctatcactgtgatcatcagtaccaccacacactgcttctcatttagtgcctgaattttagagcctgcctggaggctggagccctgcctggacatttcccttaatcttgttatcctcctcagagaggcggcacccaccccattggcagacgccacgggaattctctgggcctgcttgtcatcactccagatgttgtttagagttcttctgttagcacagctgtttctagggtctggaaaaactctaaggacccccaggaggatacacaccagattgggtctgggctcacaccaccctgcatccccagagcctccctggacgctgtttgcaaggtcctcaccgcctggaagtccaggagccatttttagggaacagcattcaagctcaacatggcaagttccctctttcctgcaggggaggaccagaagggagccggagatgggggagaagggtgggaggtggatggtttggaaaagggatggagacccagacggagagaagccagccagccagggtgagggaacaagctgctgtgctgcccaggagaggcctggcctcaggctgccagcctcagggaggtagatgcggctgtgacagcagcaaagaatgacggccaagggcgacagcaggggctggccatgctgtaaaggggcttcttgggagggtccagcctcaggaatcaaggggaactcctgagccgagaattctgaagatctcctccctccctgaagctgtgggctgggccatcggaaaactttcagttttgtttccttgcctgcaagaaacgaaactcaaccgaaagcctgcagagagcagaacatggaaggagacttctcggtgtgcaggaactggtaagaaagtgctttctccagcggcagacccgggctggcgagggagagacgtagacgacatagggctgtttctgaagggagcagaaagtggttcctgcataagaacacttaggaggacaagcagctggagaccgtgggccccaagggtaggagggtttaaacttggtaatctctgggtgggggtgggcagcattacctccacttcactgcagcccctttcccccaaatgttaggctttctgggacagttctgaagccaaatagcccggccagtggtcccaactgggctactcatacttgtgagaccttgggtcctaatttggggttctgatactatgaccttcacacccatctgtgaaagaaagtgtcccacggagattctccaggactactctcaccctccttggaaagggagccgtggggcggggcaggggggacagagcagggggctgggaccacacctctaacgggagggggggcgcggaatctgaccgatcaaaaagccccattctcaaagctccctacctgtgacagggacctgagtggaccctccccagagagctttgctccagccagacccttcaagtactctggtttctcaaccagcccaggaagagcagggggagaaggggccaggtcaggcagaggagagagagcagaggaagggaagatgatgctgcctgtgtgcccgctgcctgggcagaagaggagtgaggctttgacagtccctctcggagcacgtcccctgtgccaggaacatgggcatgtaactcttctcgtcccctgggcctttacggctacagccaccccatttcccttctcccaagctgccacaagcaagagctgatggaaatgaaaggagtcatttctttctttcttcttcttttttttttttttttaagatggagtttcgcttctttttgcccaggctggagtgcctggagtgcaatggcgcgatttcagctcactgcaaccttcatctctcgggttcaagtgattctcctgcctcagcctcccgagtagttgggattacaggcgtgcaccgccatg

SEQ ID NO: 64228 - DNA, 831 bp, Homo sapiens
gccaggaccccaggataagggcagtgcccaaggaaaggggagcagaagacattcagggagggggaaagaaatgaggctgggacagtggataagggccaggtgaaggggagaggggcggcttctgaaggctttgggcagggagagtggctgggggaagcctagtaatgcaacctatccagcggcggcttcggaaaaaacccggggctgggtcaggatgggaaaggcagcgaactgaaccgttttgagccccaagttcggggccgaatgtcttccctgtgcgcagaagcaagggcgggggcgtgccatcctcacccggagcgccggccgagcctcccgcctcccaacgcctggccagggccccgtctcgccctctgcacatgggatccactgaccaggcaactgcaggtttggggctctgcgacccgggggcaggaacagagccttgcaggcggcagcgcgtcacaaaggcggccggagcttggcatttagcttgggccagagcaaggcgcagacccggggcgcccatggagttggcgtcggagcaacagctgcgcgggcggagcaggtaggcgcgctccagtccctgcagcccgagcggggttcagcgaacgggtaacgggagaatgcgggccggagcaggctggggtggcggtgggatgccccgaggcccgcggcggggaggcgggctgctctcatcaccccctctgggaagcatctttggctgcaggagttgccaggccaactccccctcccgcggtgggtaggacatctttagatttccctccctggttggcagctgtgtgatatggtggaccaaccctgggttcgaat

SEQ ID NO: 64229 - DNA, 3155 bp, Homo sapiens
tcctgaccttggtgatccacccatcgtgggctcccaaagtgctgggattacaggcatgagccaccacaccaggcctccaagtacctttcttatggaccaagttcatttccaatattttagcagtggcgttaggtagactgtatatgatgattctcctaaataaggttattctctttctgttaaatatggttttcattgatttatggatgtatctggaactattattttggcaggttttacaaggcctcagaatcggttcggatgcaggaactgtgtttgacgtttatgtcgaagttctcatcaaagcctggaaaatgtggagcctcttttgcaagagtggagattgttgcctttaagccagatcttaaacactgttagctcattgtgaaaaacacaagtgccagtgattaacaaagaatgtttacttaatttacttcagatctggtctcagttaaaggttagctcatccttatcaggtggtcacagaaactagatcccagtagcagagtgacctttggaagctagaattgtagtcaatggacttaaagtgagatcgtgggagccagttcttcacttaattaagcagagttgaaagactttcttctttccagctccctattttccttccttgggctattttctgtaagtcagacttggtttgcctcaatactacatatgccctgtaaaaataaattaactacaagagactgttgactgtatggccaccagccctgccctggtgtgtgtcctttgcaacactagtgtctgaggtggagccctccattcctcgtgtttttcatccactccccctttccttcctctcccccgccagtagaggactgtttgcgcaagagaccaatggattagccagcaggtctaagcagctgcaaggataggtctctcttttgcccgggggagagagataccagcttgactcgtgatcaggtactttattccttatgatagggagctcagaatccagcatcagtgttcctattaatttcttgttagttttgtagctttgggtatctgcacttgtcaacagtaggctgtaagaatatttattggaaaccacaaaaatctcactagcctcctctatcccggagcctgggatggcaaagtgctacaccagaaaagggctatgtggatcacaaggacagtgtaggcctcatgactctgagataacagaacagaggcacagagaggctaagcaacttaccctaggtcacacagtaagaggaagagtgagccaggatttgaaccttggtgtgtctgacataaaggccagcatcccatctataaaatggagctagtaatcataccagcctcttcaggtttttgtaaagatttgatgagaaaatatacaagaagtcactttatgaactgtggatcacagccaagtgtgacaggtcatcactattgttgcccatcagtcaattatctgggatggcctgaggttgtgtcatacctacataagccacagaaaaattgactcatgaaagaatcagggctgggcatgaatgaatgagaaactacgtttaaatggagcccagactgaacgggaaccaaatgtgggttctaatgccattactcattactgttacccaaatatgatcctgctcccctgggagggtggctctgaccttgtcactcccaagcctggcacccccagagcatgctagagtggtggtggagggcaaagatgacaagacatggactctctgggttagggtgagtggcaggcaacagaatccacagaatagagaagtacctagattgggtactctgggagaaaaacaaccttccggagattttcccagtgtgccaaatcctgtgctacccgagagaattcccactcatcactgccaaatgaaccacggaagagacagaaactttgctcctgtgtttcttttaattatgtggattacagacacgttcaactttggttctatgttaagaaaattcaagtttaaatgactcccaatttaagtgatggtatttaaaaataaattttgtgttatctaagacaaaaattgtactttgtcttaaaaagatatctggcttggatgggtcagaggggtacggaacagggtggccttcatcagtagctacaaaggcttttgcaaccgtgggctaattgcaaatgtccttcatgaaacacaggctaagaccagatttcatttgtgaaacacattgatacccaataagacctaggaattgcatgagcagatttactaacaaaacattgctttattgaaatcttagatgtttccgcattttatgtctacatgttgagaaatggcctcaaccataatcaaaatcacatttcccttaaaagcagcatgttccagacactgtgttgagagtcttccacacgttatctcgccaatctaggctttattagtcttatttacagattaggcaactgaagctcggggaagttgagtaacttggcggggatcacatcacaggtagagcgtggagctgatccaccagctgatctgaatcacatctccctgcagagcctgggatctgaatccaccactgaggctggctgcctctgagagctgtattcacaaggaaggattttgcccagtgtcttcacaccctgccagccacatcctctgggacagacctcaaaaccctgctaagttagcagaaactctgaggtctgcccagtgagctgggaaggcttatttggactcttccgagccagagcagaaaagcacccagaggcttcccagtgagcagagaggggcctccctccttgattgaggcatgggaagggctgtgtatttgctgagcactctgagaggagacgttcagcactggggtggcatagatcagaattaacagaattaagccagtgcttttggcctcaaagggggtttctccatcccagattgggaacatccctttctgatggcaaagagtctctggaccaaggagcacctagattgcaaagctcccaggaattaggcccacactctgcattatcattgtgccctatgacaccgtatgtgcagctagacagccagattcagggaacagcaaggacaggaagagttccagacgatatagtcctttccttactttacaggtggtcctaaagaaggagagaaactttcctggcagtgttgcaactagaagctagg

SEQ ID NO: 64230 - DNA, 1174 bp, Homo sapiens
tcctctaattttcttgtcttttctttgctgttattttgttgtccttttttcccactttctggatattctcaacacttcttttgatttttaagatttttctgctcttatattcttaatttctaagaacgcttgttctccaaatgttctcttttttaaagactcctctgcatgttccaaggatgcaatctcttctctaaattcttgatggatttgatagtgtatgtcttctttttctctatgcactatctgtctcctgagtttctgtgtctttgattatttgttttggtgtctgccatgttattggctttcctcaattatttggtgatcatctgatttagactgagatgctaaagtgctacctggaaatgctgtctagagggacagtgcttgtcaaccagaatgctttatcatacagagtgatcagttgagaccctggcatctcacaggagaatcctcaaatgttaatatttatggatctttcctttcggggccagttactttctactttctccacagaaaagtcctccagtctcctgtctgagggtagaagcctggctaccagtgtcttaggaaacagctggaagaattactatgtagacatagaaatgaatgaatcaccaagtagacattcattgaaccttttaacctttaaccttctgctggggtgagggagagccagagtgaagaggaagctctttataaagactttcaaccaatcttgtttctggttctatcctgaccctccagcttcagaagtaactggatgcatccagttttgagcattacaagatttctgcagcatgaatcagctggcttcttattgttctctacccagcctgattttctgcagtccctaggtttgttaccagctgacctttgctttctaaaatcttgatttcattatttgtctactgttgcttcctctctaactctctgtgtgtgtgtatgtgtgcacacgcatgtgcttgcctgtgtatgcatctcaatctctctcatgcttggggcatagctttattattattttgttagctttactgttattaattctttactgctattttgttggaattctaaaaggaagagaagacaaatgcatgtgcttaatccaccatgtagatgggcatcttcccattgacaccttgtaactgattttcacctctactgtgtaccctcc

SEQ ID NO: 64231 - DNA, 2103 bp, Homo sapiens
gaagcaggcatgtcacacggtgagaaagtgagctagagagatgccaggctcttttaaacaaccagcccagctctcacgtgacgtaatagaacaagaactcactaattaccaacgggaaggcaccaaaccattgaggagggatttgtcctcattacccaaacacttcccaccgggcctcaccttgaacgctggagatcaaattttaacatggtatttggtggggacaaaccctatcagcagctgcttttaatatttaaaaaaatattttgagagagggcccacagaccctctgaaagaagcagactgctcctgcaggacccgggggacaccccaaatactgtgagtgccccaactgcggaagtgggaaagggagaccctcctttccggaacacacaccccctactggagaagctgaaggtctgcttccgggagatgctcccgacttcacctggagctgagtcaagttagagaaccggaccaagcgaaatacaggggcagaggaggcagcagggaggccctgggagctctttgaatccccaggtagcctattcctgcctggcaccactgggattcatcaggagggaggccagaggagcaggaggtaaaaccctaccgggagaaggacttccctagctgaattttgtaacaatttgagtggggcgagaagcctcctggccggaacttgggggaggatgcggatctggcttgcagacttcacaggtgggggaagaactaaagcccttttctttcacaggtgggaggcggaaagcctcgggcaagttttcaagcccgtcctctgtctggaaacagactcagaggtgttgcaggggacacggtgggagtgagaccagcccttcggtgtgcgtgggatctgggggaggcctgtgactgccggctttcccctgcttctctgacaacctgcatgactcagcagaggcagccataatcctggagagccccggtttaagatctccaggtgaagtagatttttattgtaagtaactcctgtactttttaagttgtgagacatgcattcaaggttgaattctgaaatcatgtctgaattaacttcactggagtcttctgttgcccttatagagtagggaattctcatagttctgctagtaattgttttttgagggggcaggtgtggtctaacaaggaaaggctagagagcaattaggaccaagggaaagaccttgggccatggaaggttgagttctctgaaagttttaaaaatataaatatgtatttttactctagagatgcggtctcactaagttgtccaggctggtctcaagtaatcctcctgccttagcctcccaaagttctgggattacaggaatgagccaccacacctggcctcacctcagaacgttttgaaaattttagttttgtctgtttgcttgttcaatcattctgcatgactggatatggtgaggatcatgtaatttgggggacagaggaagaactcttggatttttttggatgactttactggtgcgatgagttccctggtcacttgacagggcaagtagaattcctcaggaggggaaaatttgttctaagagaacaaacagttgcagctgtgggcttcttacgtggaaaagcttctagtcaataagtgaacataaaaacaatggccagggcatattaataacactgacttaggaagttgaataaaatatctttgccaatagagaaagagtcctgctagaggtggctctcttcctcgttctacctttataacttttccaggattctgttgttggcagatattccaagtaaggagtgaagtttccccacaaatgatgatgaaggcattgagtcagtattttcccatgatgaaaaattttgtgaagactgaacttcaggtcagggacgaaggagagcccaagtagccttctcagtgtcttcaaagcctatctttggactttttggtgggtaaaacatccaccttgttttcaattagccttttcatcttcaggggcctttaactgagatattttaatgtcctcaaatagaggataaattggcaaactgagtaggtttaatatctggtctgattacagtgggactgggacagatttataaactgctact

SEQ ID NO: 64232 - DNA, 1882 bp, Homo sapiens
tttcagtatttgtacatgaaagtgatggaaagattttaagggtcctgactaaaaaacatggagcccaaagagacctgtggggtattgtagccaacagttagactctgtaataagaggatttccatcttccatgagagccgtaaagcccctgctttgttagttgaagcaactgacgaaattctcatggtgacagcccttagtggttttgtttctcattcttgtgaaagcatttgctaaactcgcgtcatactcaatattattcagttagtagactagtctcatacgaagttttctttctttcagcttctcatatcaacatctctagatgtaataacctaaatcctacaactcttctgtctccatttccagataaaacactgcactattgcataaccctaactgatcactgatcaacttctttctcccaggactgacctcaaagagaccccccttactactgccaatggtgtttggtttacaaatggatcttacttaaaggataaatctgggacttaccactcaggttatacaatagtatctttaactggggggaaaaaaagaaggaggagaagaagaagaggaaagtgttaagcttctaggcaccacctgagctcaacaaacagaattaattacattagtcaggacttgtcaattggcaagaggaataactgctaatattaatatagagagtagatatgtttttagagtagctcatgattttgaaacactatggaaacacaggatttttaacttcttctggtcagtccttaaaaagtggccacctcatttcatgatttttgaaagctatattattaccacagtcactgtttataattaaaattccaggccatttcaaatcagatatcccagaaagcaaagaaaattagctagctgataaggtagcaaaaagagtggctctaaacaaaaacactctgtattaactcttaaacacctgaatttgatataaaattagctcaatccagagctccaaaatcagaatacaaaatcacactttgtgcttgaataaactccctttaaattagactctgattcttttgattattttaggttgacgcaggtgaaggcaaatagatgctgtgattcagggcagaggaatttactggagaaggtggaaacatgagtcaaccgtgaagtaattggtgtcagggagtattgaaatgaggatggttttagggttagaaactaaagggaatccaggcttcattagtttgtttatggcttgcaggtattggactatttaatattcttcccattaagcttttgaataggctttatttatttttctgagacggagtctcgctctgtcgcccaggctggaatgcagtggcacaatcttagctcactgcagcctccacctgctgggttcaagtgattctcctacctcagcctcccgagtagctgggactacaggcgcacaccaccatgcccagctaatttttgtatttttagtagagacagggtttcaccatgttggccaggatggtctcgatctcttgactttgtgatctgcctgcctcggcctcccaaagtgctggaattacaggtgtgagccacggtgcccggccaataggctttattttttagaacagcatttgatttacagaaaaattgagtatatagcacagagaattcccacatatccctgttcctctttacacagtttcgcctattattagcatcttgctttagtgttgttacagttcatatactttacattgttaaatatagtctatttaaagactatagtttatattagttcactcttggtattgtatggttctaagggttttgacaaactcataatgatttctccgttacaagatcatgcagaatagttttacctcctaacactgtctatgtt

SEQ ID NO: 64233 - DNA, 467 bp, Homo sapiens
gacagacccaataggatagagagacacacatatagattacacacacagatatatatataaatatagatttatagatacatatacacacacatacacatatatgaggggggttattatgggaattggctcatgtgattatggaagctgagaagtcccacaacaggccattggtgaactggagactccgggatgctggtagtatggcttaatccaagtctaaaggcctcaggtctagggaagctgattgtgtaattcttggtgtgaggccaaggtcctaagaacctgtgaagctgctgatgtaagtcctggaatccaggctggcaaacctggagttctgttgtctaagggaggagatgagtgtatcccagctctagaagacatgtttgcccttttcttgatttatcataagtattttaaactcatatggaagtgtttggatacatgttttatttgctccttagcaacat

SEQ ID NO: 64234 - DNA, 1187 bp, Homo sapiens
aatatccaaaatacagaaggagctccaacaactcaatattaagaaaacaagaaacccaattagaaaatgagcaagggacctgaatacacatttccactaaagtttttaagacataaacatactttggcataaacactgtattatatgcaattactttttgtaaataatttttgtaaagccatcagatatatatccaaatgatttttcacctgagtgtaagacaggaaaatgtttaaattaatacataaatcaaatcatctgcactggcattgttaacctagaagaaagtggctgcatagagaatagtaaaagcaaggatatttagtccatactttcaaatggggcttgatgatttgaaacaacaaagttgttcactggcagaatttcccaccaagtctgtataaattatgtgctatttgataaaagatagcctgaatgaagctaatttttttatcttcagtatttgctttaagagaaaaatcctgaagcttgtagggatttctaatgccaaaaaagatgatgaaatgggagagtatatttagcaatcatggtgactaagctcatggtaactggcatatgtaaaattttagtttgcattccaattacttaaactgagatgttcttgatcagttgaacatactgtgagtagacgatctctttctcagagaaacaagatggagagatcttcagagaatggccccactgaagctcattggtaaatgagctttctccagattttgttgatttcctgagtttttccataattcctcagttccctggccattttctgatagaccatggtcttcctattgccctttcttattcctcaaagtttggcaaatttttcttcattttttgatacaaactggaaactgcctttggttttatctacttactgaatgcagatgccatcttgggattatactgagatttgtgaagttattcaaacagtcagagaagcttcccgccttgtcctccctgttgctggaaaacagcagactgcaccagctggctttcagttatgttccacaaagatcaatgaatggttccttcaaaatagaagtctgcagcattatttattaaagttctccaattataaatagattcctctgtaagcaacattccatagcagttggaatctcctctgacatgggtacaatcactgatgaaaaccaggtaagttttga

SEQ ID NO: 64235 - DNA, 4202 bp, Homo sapiens
atgttgacctggctggtctcgaactcccgacctcaggtgatccgcccgcctcgacattcctatttctaaataattattacagatctgtcactcaccagttaaacatacaaacggcttttttggaggggatgacctatttatatttttaaatcttatatcctaccttattcaaaagtcctatcagttttcctagtttagagaagcaaagtgacatttttgtgtacatttaacaggactgcttaccttcacaacctgctcagtcggctttccctggacttctcctaaccgcccatttttcctggatttggcaccgagagttacagtatttcacgtgcgatgataaaatgttacttaggagaaacagttccaataccaagaaacttcagcaattttaaagcattttaaagccacaaaaccatgcccgatccccaaaagggggtcctaactcctttacactgtcagaatctcaattttaaaagggaggagtagagaagagatagaaacgctctctgttggtgaaaatctgtcttacttaccatttccccaacacaggagagactaaggaatttcaggtaaaaatcagatggctccaatcctccgatactaagagcccatcgccccagttcccaggagttccgccagttagactttttcccccatggcctcgctaaggctagttcctcgtcacgtgacgtgacaggcttggtcacgtgacataccagctccttccattcccgtgtgcggggggagggggaccaacaaaccggaggccctcgctcttccaatactcacgccctagctacagaggtcaaggaaggtttccccaggagcagttttggtttcagacggcgccgtctcccgcgaaagtcctgagaggagcccagccttttccgcctgccgcccccggatgggatggttgaggccggggccacgccccctctgcccccctgcgagggcatcctgggctttctcccaccgctttccgagcccgcttgcacctcggcgatccccgactcccttctttatggcgtcgctcctgtgctgtgggccgaagctggccgcctgcggcatcgtcctcagcgcctggggagtgatcatgttggtgaggggactccccggcaaggatcggagagggcctgaggggctccgggctgggagggctgggaggcgaggaaactctgggccgcaggcaggccggaggggccggggatctacaggccccggagaaggagacagactgaaattgaaaaatgggaactgttcgagaccagcctgaccaacatggtgaaaccccgtctccaataaaaatacaaaaattagccgggcgtggtggcgcccgcctgtaatcccagctactcaggaggctgaggcaggagaatcgcttgaatccgggaggcggagggtgcagtgagccgagatcgcgccactgcactccagcctgggtgacagagcgagactccgtccccaaagaaaaagaaaaaagggaactggagcggagggccctggagtgggaggagccagggctggtaaaggtggagacccctcaaggtaggagaaacaagagcggggtgcctgagaggtgcttgagttgaatggaggacatgggaggaaaagagagtgcttgttccagaaatgtgtagctgggccttgttttcccagtaatccacccaccgccacttcaagaagaaatgatatgaagaagtgccggttctccctcccctcttccgcactgtcccgtgatgatgacgcctccagagaggacgataatctgggttcctgggagagatggcttggtcactattcccacccttgcctcgaccacttgtctcaatgtcaccacctcacgccctgttccaggtggctgagtccgaatccagtaaccaccacctcgttttggttaatctcaggctcgggtgttgtagcaacattggaaatgggaggggtttacgaagtgaacatgaggtcaggtgcctgaattcaacagtctacccattccccttttccagataatgctcggaatatttttcaatgtccattccgctgtgttgattgaggacgttcccttcacggagaaagattttgagtaagtattcgggtgggggaggcgggctgggagcaggtgggaggtggcgaggcctagggtcagaattacgtctgggaggcccggtgcttagggcccctaggttagaggacttggagaggagagcggctttcttgagaatgtggttaggagccagggagtcagacctcagcggccatcccaaacccaccaccttaggtgtgacctctttaggtattttacttttctgtgcttctcagtccacctctgcaaaatggctatgacagatctcaccccataggatggtcaagaagattgaataaagtaatacacgtaacagcgcctaaacaggtgtcgggcacatagtgctcagaaaatgttggctcctattaaagtttgacccctttgcttcattcccacccccaggaatggcccccagaacatatacaacctttacgagcaagtcagctacaactgtttcatcgctgcaggcctttacctcctcctcggaggcttctctttctgccaagttcggctcaataagcgcaaggaatacatggtgcgctagggccccggcgcgtttccccgctccagcccctcctctatttaaagactccctgcaccgtgtcacccaggtcgcgtcccacccttgccggcgccctctgcgggactgggtttcccgggcgagagactgaatcccttctcccatctctggcatccggcccccgtggagagggctgaggctggggggctgttccgtttctccacccttcgctgtgtcccgtatctcaataaagagaatctgctctcttcagccctgtgtctgtgcttgagtgggggcgagcacggggctgagactagaggtcggcctctgcctggaaagtcccgatgtctgagcggaagtggagcgaagtgtggcgcggaagtgaggcgaaggctttccccatcgactgggcgcgccgagcggtctaagcgactgcgtctgatggggcggggagccgccgggttgagcctatccgctgcggggagggcgggacttcctgcgcgggggcccgagccgctcagtctccctgctctccgtggtcccggctcgcgtgtagcggcggcggcggcgtctccgtgaggaggcgcgcggggccatgacgtcagcgtccacaaaggttcgacctccctcgcggacagcgctccctggcggccacgggagggcgggccccccacttggctcgcggctcttccgccccgggcggggggcgggcgggagccgagcctggggtggggctaggggctccgggcgggacggggagggcgggcgccggccccccgtgacgctgccccgcccccaggtcggagagatcttctcggcggccggcgccgccttcacgaagctcggggagctgacgatgcagctgcatcccgtggccgactcttctcctgcggggtacgtgagcccggactgggacgtggacgctgagagcgggcgcttggactcggtcacagacacggaccctctctagcacagggacagacattagtttccctttgtgcgtggcacagcacagagtcggtgttaataaatgatcgttgggtgagggaatgaatgacagataaaaatacagacaggcccatagcccagactcctgtttcacagttctccctgctgcgaacgggtcgaccacaaaccaccgccactcccaaccaccccagttcatggaattcccccagacggctgcaggctgtgttggtgggtctgttttgaaaagcccttcctggcgagttggtttcagtgtgctgtgtacagcagccgtttaacgttgatggtggaaaggggtgtctaaggtggaggtggttgtgatttcttgtgattggggtcctcccggttcccgcagggcctcaagagctttccgcctccccttacggaggacctctttatgcatccgtggaaggggtcccagaaatcggaaggaggcggctggttggctgtgggatgcatagcctgtgggcgggctccacaccccccctcccatttttgctatcccccctctccccttctgacagtgcgaagtggacggagacggaaatagagatgctgagggctgctgtgaagcgatttggggacgatcttaatcacatcagctgtgtcatc

SEQ ID NO: 64236 - DNA, 1688 bp, Homo sapiens
tcatccccccaattccaagactgacaaagccaaccccaccccagcacgcacctccaaacctcccccccaaccgccacgtctctcctgaaaacagaggacacttccctccccacttacctcagctactctcccctgagatcctggtcccctattttgaaaagagcaaaatttagggtgcatccctcacatttggggtgcaggagaaaggagccgccccagtcgcatcgctggcctccttcctctcggctggctcagggactggggagtgccctggggagggggcacccccacaagagatctcaggaggggttcctccactcccagtcagaattggggacacccccccaaaacccgtcccagcccatccgtctccaactcggcgggagaggcagctgcaatgccccagtcagattcacccaacactacattcctcaccccatctagaggggtcccggggtccccaaaaaatcccaaaaaaatctaggatgttgggaggacggtcctggactagctccccaaatttggggtcctcagatacccccgttttttcaggaaaattccgtcttttgcctgcctcccgccagccctgctctgtcccgatgccaattttggaagtcactccctccttcctcctccccgtctctccaggccccccccaccgctcgggggctagggtccaggacacctggcttccagaccggggggaatcactcctcaaagggctaggggccaggaggtcaagctcattgcccctgtcttaaggaagcaggaaagcccgttcctcccttcccctcccccctggctggtcaccgtggtggtttaggaaagcctggaggattggaatctgccattgctgttgcacaggcagttttttttcttgggttgggggggtgggcggtgggagggagagaggggaggagggccgaagagagaagggacccaggcgcgaagagctggcctggcttaccctgtagccccggctgccgtggggaacccctccccgccatctcacccacactcccagtcctctgtctgctttctgtttggggctcatcctagaaaatcagggtgcaagaatcacctccttgtaccccaccagcacccctccttgccacagttccaacagcactgccctggtcaggggtgcccacttggccaagggacaccccatttttctccaacttcccccaaactaaggggtgctcccttaagaaattgggattcagagtctgaaaccgccttttctccctctcttctccctcaagccacataataataaaaggagataccacaccctttccaagtttctcccttcaaatcctgggcttatttgggggttcactaaagaaacttctagaatctggggtgagagggcactataagcaaaagacatcccaaaccagggtccaaattaagtgaactcccaaatcagtctcaccttatgattatcccttagcttcaccaaaagcagccagagtgacaaaacacccccaaaataagaacaccccagaactttagtctcctgtcctcgcggccctcaccttgtttctcccctggggaaaaagcttcttgggtatccatggatacacaggaataccccacgtctttccactttgtggaacgtgagtgtccacaagactcaaatataaaagtttgctcccccctcccaggacccccaatcacagaaa

SEQ ID NO: 64237 - DNA, 1215 bp, Homo sapiens
tgcccgcaatgtctcccgaaacaaaatatgagggtgtgatccatgcccatctctcagatcagggacttcaaattagggtggttaagccccctcctgccctctctccctcctccttgttttcccttctcgtttaccccacccaattttaatgttcaattaaaagtcacctccaaagacatctgggtagcagtgtctagcttaattcgaaaagaaaacccggagttcccaggctcaggtcccgcttcttgtcccacccattcccctggctcctaaagcccgcgatttctcacctcgggtaggaaccccagcctgaggggaaagtcccctcggtctcctaactctagctccctccgcccagccctagtcccctcctaggagacagaggtgcaaaataaacccgcgcaaaggggaggaggctaaaggtttcagccgcccagaccaaatggatcctgcgcccgggtctgagcgcaccccaggccgggtggagacgaggggcgaggcgaggccagtgctcggccgccccctcgtggaaggagccgcacattgccgagccttgcctacttgccgcgctggaccccggcgtcccgccagcctccaagcgtagccgacgggcgggtgcccgaggccctcgtgagctgggattgggggaaagcaagcgggctttgggcgggagtccatctctctggatccctacaaggacccagaagagagtcgggagcgagagaggccggacgcctaggtctcccgagcgtctctcgcccctccacccccacctcggggctttccccacctcctcgaggggaagcagctggcggagccgtccggtcgcaggacaatggaaggaaaccaactagaaatcatatccgccctctccgtaccccgcccggccagagcccccctttttgtaggcccgggtagagtagcctgtcattcacaccacaccctccccgtctgagaccctacgggagcccactgtcgtctgcccaaacctgctgtctcgttgggctcccccttttctcccttaacacagtacaagagagggagagggggttgccgtatgcactttgtcctgcagcaaaggttggctcctggcaaaccctcccaaaagccaacacaccaattttcactggcccaggccttccgacgactcagactcccgtattgccaacctcgatatccctaacctcctccccaattccaatatccccgtcctcg

SEQ ID NO: 64238 - DNA, 2519 bp, Homo sapiens
taaataaataaataaataaataaaagactggaactgtgatctgattctaaagacccgagttcttaatcactatgtaatacagccacagcaatttctgtatctttggcatattccccaccagccgacattttgactcttagaaagtatatatgtgtattattgatgattacttttatttcccacatataaaattatttaaggctcaatatgtcttttaagactacacacctccctccctgcctccacttcttgtttgctgctttccccagtaatctgggagtgaacattgagtccacggtttcaaggtcagggtcctgggaagtatggcttataatgaaggaacaggaaatccaagccattggtgttatggagactgggaaggactggggagtgtttgctaggggcctgaggactacttgggtaagagggggctgactgctccagtggccagggtcatagtttgtctctttagtctaccccaccatcagatcaaaaaaggtggttaggaagtggttgttactagagggcagaggaaaaggttccagccccagtgaggaagaggtaggtggtgttggtggggccctgtgtgagcttacagccgcccttcctctcctcagttatttttggtctctgtgacctgtaggtttcctgttagtgggaacagaagtgacaggaacgagttcccactacagaaatgaacgccaggagtccaactcattccccttctctcttcccttagccgttgaacttctcagggatccaggcttctaggtctgcgtgcctagggctgcgtgttagtggcttcaggcgctgcgccaaacacttcgtttgagtctcatctcctaacccctcccctacccccaacagggccttgcaattcctggacccctcattaaagcaagagagtcctctcctctccagacccagtttacccaccactaacccttccgtgtggctctgggtgctgaaacggggatgacttggcccgctaggtgaagaggagacggaagcttcctggcagtccccgcgtcacgtggggccctacctagtcagcctcctaacgcccctccttacgcatgcgcccattcactgctggtccccaacaatgcctaaatcccgccctgcccttctcgttccgcccctgcccgggagccccgcgtcctcattggcgagctccagggtggcccggcccggacaccccagtgataaaatagatcatctacacggaaactggcgcgctccaggggtggggcccaaactcagttccaccctctggctcccagccgaacaccgaaccgggaccgatccggccccggcttgaactagctcagctccgagctcgcggaaccacgcccccgggagactctggcccggccagcgcgggccaggtcttcagtcctatatcgccccgccttgggaaaaggtgcaggggcctctcgccgcctcgtcgggcccttcctctctacctgcctctccaacccctctcggccccgagccacccggcagcgggggtgggtgtgcagaggtgcggcgtccagaacccggctcctgcagaggctctgggtggcagcagccctgttaccgcttagatggcgcgcaggacagagccccccgacgggggctggggatgggtggtggtgctctcagcgttcttccagtcggcgcttgtgtttggggtgctccgctcctttggggtcttcttcgtggagtttgtggcggcgtttgaggagcaggcagcgcgcgtctcctggatcgcctccataggaatcgcggtgcagcagtttgggagtgagtgcggcgcctggatctggcggactgcgaccctcggaagggagagggaatgcggcgactgggaagtggaagggcgaggggcgggagatgctgggggggagacccctgagatcttctcgcagcgccccttccacttcctcaggcccggtaggcagtgccctgagcacgaagttcgggcccaggcccgtggtgatgactggaggcatcttggctgcgctggggatgctgctcgcctcttttgctacttccttgacccacctatacctgagtattgggttgctgtcaggtgagagcctgcacaagggcaggagagtcaaatgcttagatcgttggatgttcacctccttcctgctccttccaaagggttcggggagaagctgagggaaagtttagctagcacctgtacccagaagggaattcttaataggaatgactaaagcgacaaacatggtgaggaattaggaaattcaaggatgatgaaacctggccgggcacggtggctcacgcctgtaatcccagcactttgggaagccgaggcgggtggatcacgaggtcaggagtttgagaccagcctggccaacatggtgaaaccccgtctctacaaaaatacaaaaattagccgggcctggtggcgctaatcccagttactcgggaggctgaggcaggagaatcgcttgaacccgggaggcggaggttgcagtgagccaagatcgcaccactgcactcca

SEQ ID NO: 64239 - DNA, 2010 bp, Homo sapiens
gatcaagaccatcctggctaacacggtgaaatcacgtctctactaaaaacacaaaaaattagctgggcgtggtggcaggtgactgtagtcccagctactcgggaggctgaggcaggagaatggtgtgaacccgggaagcagagcttgcagtgagccgagattgcaccactgcactccagcctgggcgacagagcgagactccgtctcaaaaaaaaaaaagaaaaaaaaaggtgctaggtactgtgactgtgaaatcgatatcattattggatttacagctggggaaaagctttaaagcttatacaacttggcaaatgaaggtcacacagctagaaatggtagagcccaggtctaactccaaagttctgtgctagttaccttacaaactttgtctctaatcttccacaatcccaaaaagtgtattattacattttgcagttgagaaggttgaggctgggggtgttaagtaaaacacacaaggttacacagctatgaagtatccaagccaagattgtatcccaggtctgtgggactccgaagcaagtgctacattctgctgctgggcaatgcggggattactgtgtgccttgagctccctaagagttctcaacaccacttcttcctttttgacaggctctggctgggctttgaccttcgctccgaccctggcctgcctgtcctgttatttctctcgccgacgatccctggccaccgggctggcactgacaggcgtgggcctctcctccttcacatttgccccctttttccagtggctgctcagccactacgcctggagggggtccctgctgctggtgtctgccctctccctccacctagtggcctgtggtgctctcctccgcccaccctccctggctgaggaccctgctgtgggtggtcccagggcccaactcacctctctcctccatcatggccccttcctccgttacactgttgccctcaccctgatcaacactggctacttcattccctacctccacctggtggcccatctccaggacctggattgggacccactacctgctgccttcctactctcagttgttgctatttctgacctcgtggggcgtgtggtctccggatggctgggagatgcagtcccagggcctgtgacacgactcctgatgctctggaccaccttgactggggtgtcactagccctgttccctgtagctcaggctcccacagccctggtggctctggctgtggcctacggcttcacatcaggggctctggccccactggccttctccgtgctgcctgaactaatagggactagaaggatttactgtggcctgggactgttgcagatgatagagagcatcggggggctgctggggcctcctctctcaggtaagtggaatggggttcccagggggtgagggctgccatgttgcacaactaggggagggtactattctcattacagtgtatgtgaatattgccctctggtgtagtacagtacacagcctgcgtggccaaccatagcatccctgaaatgggtccatggggcaaagaacttggggctgggaaagtctgagtggaaagacaaaaagaagctaagtggaacccttggcagggtgcctacggcttgggtttgcagaggacctggcagaacctggccagacacagacgtagcattccagtgtgcaccctttcctttggcctactgggccccaaaccaggtatctgaggcacctggtcaaagttctgctggctcagggtgccagaactttcagacctttatctcctcttacccattaactgaagctttagaaaggccacagttggtgggcgcctgtagtcccagctactcaggaggctgaggcaggagaatggcatgaacccgggaggcggagcttgcagtgagctgagatcgcgccactgcacttcagcctgggcgacagagcgagactccgtctcaaaaaaaaaaaaaaaagaaaggccacagttgccagaaagaaaggcacaagtatgcctgactcaatctgg

SEQ ID NO: 64240 - DNA, 1934 bp, Homo sapiens
ccccaggccccggtctaaagcgtggggagccaagtgcacgtaaggaacgaagtacccgcccccaaccagggctgtgcctagagcaaagattgagaaggcccggcgtgtgaacagactcaggccgagggcagctaggggactacgcggtggggctggggggtctccaggaaggaccaggggtagcagcagggcgccacagggggtgaggtggagggtgatcgcgccgaggaggagcagagcgccccgccagccgaaagtatcgagaagaagctgcaaggcgggcgccaggagcagcgaggaggccccgttgccggtgagcgccagccccaccgccaagactcgacggcgggagaagtaacgcgagagggtgcctagggcgggggcgaacaccagggcccaaccaaagcctgcgaatgaataggaggggatgggggccggcactggggacgcccgccccagcattcccagcccggctctccgcaccaggcccccgcctcgttcgctaccccagatcccaacaagctcctgtcacctccttcaccctgaatgacccgggcatcccacttccctcaccagcgaggaggcccaggccgaggtagagatgcagcagatcgctggcgaaagccgagaagacgaagcccagcgaggcgaggacgcccccaaccatcaccacggggcgggccccccagcgcgtgctcagggcgctgcccacggggcctgaaagggggcggagtcaacggaagacacgcccccgggcccccaaactctctccaacacttctcattggctgtttgcctccctcgaactaatggttcttctccttgacctcaagatgcactcttttctagagccggttgccctttctcaggttgtcgggtaatcaggtgggtctcccatccctccactcacggctcctcctccccgttcctgtctcccgcctcagggcccccctcactggctgcctgctgcacggccagggccagggcgctgatccacgcagtgtcctgggcgcttcggtcaaagtgctcggcaaggtcagggaaggcaaggcccagcgagcgcagcagcccgtaggacagcccgtttatcgcgaaggctgcggccgccaccacccagccccagcccccatccgggggtccggcgggctggggggtcatcgccgtctgcggggtggggaaacatctgtgagagaagcctccacgcctgtgcttccgctggggagctggcatccctgagatccagcctctggctgctcgcccggggtgggcccgtcactccgagcgcgatggcgcggggcggagggagccggagcctggcctagggctggaactcccgggtccgcgcgaggtacggggacggggacagccagatccccaggcccgaggttccccgtcccacgcacactccttcccccttacccgacctctccgggcggtgcggggaggggaagggtgaggaagggctgggcccggctttctctctgcttcccaggcgggcgggggccccgaaggggagcgagggcagcgatggagcccaacttggacgggctctctcggtaaacagagatcaccacaggggcctgagccacctgggacgcggggtgtacggagggcgggggcgagctgaaacagccaatccggcaagccgcgcgtgaggccagacgccagtcccacggggattgaattatgtacacacacaacccccaggcccgggggaggggggagcggcgagaaatgaatgcagaggggccctgccctactcacacgcatgcacctgccgcctgctgcgcgcaggggagacacgtggattgcaaaccccagcgagcccagggtccaccgccaacgcgtggaaatagggatggtccccaaaacctgaggggatgagtagttttgttctcaggaacgttgccgaggaccaggtaaatctcggatatc

SEQ ID NO: 64241 - DNA, 558 bp, Homo sapiens
aaaccattctatcaaatggcaatagactgttcctgtagacccccatgaagtaatcatgtaccacacgaataatacacaatgagattgctttttcacttataaaacatgaccagttatgactcattctgacatttcaaagcctaagaatcccaggggcactactagaagcatttgtctacctttctagcatgattcatatatttgcttcagattgtgttaacccttgccattctttttttcccaaacctggaagtaggttaactgtaagataagtgtatcttctcattccagatgagaggcaggatgtgcaggtcactttactcagtgcctggcattaagccagtggtggacccactatgtggacagctaaactcccagctttctgccttccgccaagggtcacaccgcattcaccttgttacagccgctaaacagacttgactcagctttcccttcagagtcatgagacagctgccactgttccaaatctcctgccctcacaaggaaacacccacgacaggaaggtaacaagcacagctcctcttttacagccttttt

SEQ ID NO: 64242 - DNA, 631 bp, Homo sapiens
gccccataaaacttggaatcacttctctggctctaggaaaaagtacaccaagtacaactaaaatactgattatacgactggtttgcacgtctggaaaaattatattgtcaagctttttacagttcaggaagactcagcaataagttaaaagaatatgaggcaaatttttttaatggaatactgactactttcagaagaaatgagagttgtgcaagaaagggaatgtaatcagattatagtagttgactcagcagtaaccatattgacacagatacaactgatacaaattttaaagtagtatttaaatataaattgtagactacattggaagattttacctcgtttacatgatagcgactaaataatgtctacaactcatacgaagatgaaatatcagtttgtgtgtcttacttagaactgcagatgtcagtactagaagaaacagctagaatcactgaaagcagtttctccaggcagcaagaggagctaaagggggcaggtcaagtaacctagagccctgtaaaacttctagttttatagactttatacttctagttttatagactttataaaatttctacttttctataaaaattctagtcctataaaactttagagtgtattattactt

SEQ ID NO: 64243 - DNA, 3071 bp, Homo sapiens
acacactcatacacaacatacatacacacaacatacacacaacatacacacactcacatacacaacatacactcgcacaacatacacacatgcacaagatacacacacaacacacaacatacactcacacacaagatacacacaacatatactcacacaacatacacacacaacacactctcacacacaacataccctctcacatacacgacatacacacacacaacatatgcacgctctcgcgcacatatacacacacacaacattcactcacacacacacacagagtcccagctgaatctgcattcctcatatgcacatacgtgcacacgcacatacgaggcacatgtgttcttgggttgggaggagaagggcaggcagttatcttccagatctccccacacctctggcacatgcctttcctggggtcctggggtagacaggaaggtgaggtgagggaacaagcgggggtgtcgggccctcctcagtccctgttcacagagtgggtgcggcagagacctcaaagggacagagcaatcatgagctgagacagagggggagcaaagccgcagaaactgcacacttgcctttcaaaaatggatttcctctcctgggattcagcctgcgagtgcctggcccctcaccttgatggaaaggatggtcattttcctccgagctcagctgctggatatcttgaaagtccttggccatgatggggcccgggctggagctggagctggagctgggctgggctgggctgaggttgctctgagggctggggctggggcagaggtgcagattcacgtggaggttgatggtgggatggaacgcagggtcggaggggttcggggtggtggcctgggtaggatctgaggttggcagggcgtttgggatgaggtttgaaatcccgctgggtcctttcccttctcaggagaccgcttgggccttgacctggccaggagacccctccccacgctcatggacccgaccacccacagcttcccatggggtcctccccatccctgaaccaaggcctccttgttcccaagcatcctcgtcccagttgcctccccagcctcagttacctgtgaaaggtgtggagagcggacacctggctcccgcaggcaaccctggccttggccaaggaggggttaaagccaggagaactggggcaggtggagctcacaggggagaggagagtggaggaggggctggtccgggcaaggcctgcactggagggtctgagtgtccaagctctaacctggcacctcctggcctgggactttggacagtaaacagaagaggaaacagagctgtaactcatttgtggggtgggggcaggggacggggctatctctgttcttattcccagagaggggggtcccctgggctgcgctcaactccacacgccactcaccccactcattgcaccatttggaaggggtgccaggccaggaggggctggggtgcagtttgccgtttccctctctccctccccctctcacttcctgcctccgaatttaccagaactgtgggtgtctccaaatatccctgaccaggatcacagcgaccagttctctactcttgcccaatccggcatctgaaccacagaccccagcttcctgtgggctcggccaccagactctcagctctggcccaactcgcttcactctcctggagagtaaagcctctcaaatccagaagcttcagcaggaggaggaaggggctttgcagaaaaacagctctcctcgcaggaggaatccaacctcagagagccccgtccggcccagaccctgccccagcccaggcaacacaaacactgtcctcaggcccagccactgccctaaattctccaaggtgtttcttcatttatcacagcacaacacccccacgaggcaggacttctgttactcccatttcacagggttcggaagcggagcctcggagagatgaggcaacttgctctaggtggtggcccaggtgagtagagaaactggcaaagcaaaatggagtaaagaggggaaaataacatcataacaaaaggtctggccgggcacggtggctcacgcctgtaatcccagcattttgggaagccgacgtgggtggatcacctgaggtcaggagttcgagaccagcctggccaacatggtgaaactctgtctctactaaaatacaaaaattagccgggcgtggtggcaggggcctgtaatcccagctactcaggacgctgaggcaggagaatcgattgaacctgggaggcggaggttgcattagccaagattgcgccattgcactccagcctgggcaacaagagagaaactccatctcaaagaaaaaaaaaagaaagaaagaaaaagaaaagaaaaggtcttcatggtcctacgaggaagactggcttccatgaagcaaggaacgtggctgactgtctacacttgcgctaacaatagctcgggaaagaaaacacagtttttgtgcatgattttctgaccctcaccaaacttgggcggatggctacgggcagggtttcttataaagctgctcgtttccccgggtgccgaaaaggaattcaaacagaggccttttctgttcttgtaacttgctgacccacatgggaagtagccacccccccagtaccctgacattcccacccagccaccaggcagcagcagccgctgggctctctgactgcagcccacagcgagagacgaatttcatgctgtgatccagaacatacacacaagcacccgcacacacaggtgcatttgtatgtgttactttctcctggatccccagtgcctgccacacagtagctgctcaacaagtatctactgagtgagtgagtgaatagaataatgcgtttggaaatacacggttgacactaaagtttgatgggacaatgctcaccttactacgtgccttctgttgagtttcccagtccattaatgggtcacaactcaaagtctgaacaacactgctgtgaagcccccatcttaaggggcatgtggatttagtcctgagatacaggtaagagcttcacagatggattgtctactgcatgtcaagctttgcca

SEQ ID NO: 64244 - DNA, 735 bp, Homo sapiens
aaagaaaaagaggaactaaaaagagctcaatttgggatagacggtgtttgtgtttgaggtccctgttagaccctaaggtgagatgccagggcagaagctgaataaacaatccaggcaggaacacacactcacacacattgaccccaatcccatgagccccattgtcctgaagacacatccctgctcctgcccagctggtccctgacccctgacccctggctatgctggcctcagatctgtgtctccttctcaagtcattggcccccagggccactgtccctccgtctccactgggtgcactggaaaggcagggtgaggtacaagaagccccatttaaaaccatgaaatcagcagctcaaacaccagaaagtccccagcttttgcaacagctcataaggactggtgtttcctgcgagcagtgacaccctgcaggtttctaaactctgcttctctttgttttgtaaagcagtgttctatcagtcccggaaagcccctggagtggatcacgcctccctaatctaccgtgttctgcatttatctgcatctgcaatgtttgttgtggtcttgttgctagaggcctcgttccccctgcctggtttataaaatccatgtaacccaggattttttgtggtgtggatactctacattgaaaggacatgcatgctttctattttatttatttatttatttattatttttatttttatttttatttttggagacggagtctggctc

SEQ ID NO: 64245 - DNA, 1523 bp, Homo sapiens
aaattagccgggcacggtggcgggcgcctgtaattccagctactcagaaggctgaggcaggagaatcgcttgaacccgggaggtggaggttgcagtgagccgagattgcgccattgcgctccagccagggcaacaagagcgagacgcggatcttttgagcccaggagttcaaggctgcagtgagccatgattgaggcactgcattccagcctgggcgacagagccaggctcatctcaaaaactaaaaataaagaaattctgacacatgctacaccatggataaaccttgaagacattatgctgagtgaaataacccagtcacacagggacaaatattgcataatcccactacctaaggtagtcagattcatagagacaaaaagtagaatggtgtggtcgccagggggaggggttggtgggcggggaatggggagttgctgttccatggatttagagtctcagtttcacaagatgaaaagagttctggccgggcgcggtggctcacgccggtaatcccagcactttgggaggccgaggagggcggatcacgagatcaagaaatccagaccatccttcctggccaacatggtgaaaccacgtctctactaaaaatacaaaaattagctgggcgtggtggcgggcgcctgtagtcccagctactcaggaggctgaggcaggagaatcgcttgaacccaggaagcggaggttgcagtgagccgagatcacaccactgcactccagcctggcgacaaagcgagattctctctccaaaaaaaaaaaaaaaaagatgaaaagagttccatggatggttgcacagcaatgaatgtgccgcgtgcaacagaaacgcatacttaaaaacggttaaattttatgtggtgtgtattttaccacaattttttatgtaaaaggcaaagttttaaaaattactgcaatcagtattaaacctcatttcatatttctagtttactctttcgcccttaggaagttgggtttttttcttttttctcttatgttcccaacatcaggatagcagcgccaccgtgtggtcacagctgcaggtgccagtctgaaagaagagagactcccctgcaccccaactattttttaatacaggttgagcgaccctaatcccaaaatccaaaatccgaaaggcaccaaaatccaaaattttctgagccacaagtggaaaatgtcacacctgacctcatgtgacaggtttcagtcaaaatgccatcgaaactgtttcatgcacaaaatcatttaagataatatataaaattaccttcatagcctggacaacatagcaagaccctgtctctacaaaaaatttaaaaattagccaggactggtgttgcacgcctgtactcccaacgactcgggaggctgaggcaggaagatcacttgaggtcaatcaatctgcattatacttctaagtagctgaagtgaaacattaaacagtaaagagatcattcttacatagctaagagtattcaattattcagctcctgagaactatttggcta

SEQ ID NO: 64246 - DNA, 996 bp, Homo sapiens
cgagaccatcctggctaacatggtgaaacccatctctactaaaaatataaaaaattagcccagcgtggtgatgggcgcctgtagtcccagctacttgggaggctgaggcaggagaatggcatgaacccaggaggcggaggttgcagtgagccgagatcttgccactgcactccatcctgggcgacagagcgagactgcctcaaaaaaaaagaaaaaaagaagtacattattatcgtcatcaaaagttaaaaaaaaaaaagttatgggatcaatggattggatagcaatgtcctacgccccaccatttactcatcttttctcctcctctgagttgaaactcctccttggtgagctactgaattcctatatgcacttgcatgtaggagatggctactgttggctttccctcccccacatcccaccgccaacaccgcctccacgtttctgtgaactctcccctccttcgcatgcggtcaccgcagcagccatggcatgacctttggctgcaatcgatcaggccagtgttagtcagctgatccaacagagccaatcagtgtctttcccactacttgggagcgggggggaagacagaaagagagagaaagagaaagagagagaaagagaaagagagagaaagagaaagagagagagaggagagactattaggtaatcgccctggatggtcagttttctgttgaaggcgcctactccatatcttttcctcttcatcactctgcatttctgaatttcatcctatactttgtgctcaacttttgtgtgctcttaaagtcagctttatcctaagcaaatctgtatctactttaaaagactgaaaatagaaaaaaaaatctttgccaaattcttcagagactgctgtatttacatatggtttaaaatcaaatgccataagaacttcttgattaaactattccccattattacattctttatctcttctacagcatcatttttgaaaatacttcctctttgaaatac

SEQ ID NO: 64247 - DNA, 846 bp, Homo sapiens
gcccgtcctgatactatgtattcttaattccagtaaatatcttgcagaatggctattccaatttatcctcccatcagcagcttctcccacaaccttggcagcaattgacttcctcttaatgtttgtcaattggatgggtgtaaacagatggctcactcgtgtttgatttctctagttagtcactagtgattgtaaacatgtcttcatatgcacattagaaccccaggcttcctcatctgtgaactgcttgtttatacctgatgccacttttccaataggtttcctgtgtatttcttcatcttggtctccttctgtgttgaatgtcttccatttgtccttccagatccacactctatccttctccatgttgttctgtggcctgggaggctgagctgtatgactgcatcaaatcgctcccttgccatctggcttccagccctcttccaggaagagagggaagtgaggatattaactccccggcccctccctgtagagtggctgtgggttagctgccccctgcaactgagtatcacagctcctgttgggaggccctctccctgcggtcctggaggtggtaacagctccccactctgggatgcctaggttcttgctccatcttgtggcttccctaagcctgttcacacctttgcagagagtccctatattatgaaatcttgcacttacccatttttgggtgtgccatctgttgcttgctgggagcctacctgatacattgctgttgaactgaaatttatcattttcatgcaatttcacaaattttttttggctttttggaatgtgcttcggaggccttatttaacaagctcttcagccgggcgcgatggc

SEQ ID NO: 64248 - DNA, 1069 bp, Homo sapiens
gccaggagttcgagaacagtctggcgaacatggtgaaaccccgtctgtactaaaaaaaaaaaaaaaagaaaaaatacaaaacattagccgggcatagtggtgcacgtctgtaatcccagctacttgggaggctgaggcacgagaactgcttgaacctgagaggtagaggttacagtgagccgagattgtgccattgcacttcaacctgggcaacggagagagactccgtctcagaaaaaaaaaaaaaaatagaaaaagaaagctttatttacagaagcaggtgagggccaaagtttactgactccttctctacaaaatagaatcctgtgtttttagcaagaatgtggcctcatggaataaagttcatttctcagccccatttgcagctatctgtggccctgggactaattctgatcaaagagatataaagtgaagtgatggaagtgtctgcatagacagagagagaatgcgccattctccttcccttttcccctttctcttgtccggaatgtgtcataacaggaggggcagacatcttggaacatgtgatggaagccacagattgaaacgatggagcaacaacgtagaaacagctagagtccagaaagatttcatcataaatcagagctgaacttttgctgagtgttttttctgcattgtgtaattgttttcttttgtacacatttaatctatttttctgtactctctaaatctattatattaacagatttttcttatgttaaatcatctttgaattcttggcatctatactacttgaacatgttaccttttttattttttattttttgttttttgtttttgttcttgttttttgtttttgagatgagtctggctctatcgcccaggctggagtgcagtggcgcgatctcggctcactgcaagctctgcctcccgggttcacgccattctcctgcctcagcctcctgagtagctgggactacaggcacccgccaccacacccggctaattttttgtatttttagtagagacggggtttcaccatgttagccaggatggtctcaatctcctgacctcattatcttcccac

SEQ ID NO: 64249 - DNA, 3360 bp, Homo sapiens
acactccctctctgaccttcactcaggtccttctgctgtttctccagctgggactctagcgacttcatctttcttcccacattgcctcctgcgggagaggctcgctcagcgttcccgacagccccccagccccagccccagccccagccccgccccagcgccctcaccctgggtgctcaagcccttgacctgggcctccgtgctcgctgtgaagttgctgaacgtctctctcaggccccgcagctcctcctgcagctgggagtctggccaggacagcgtgcagagagaagaaaacgggatcgctgtgtccgccaccactgcacccaccactcccttgccacggtcccccgtcaacaccccccaatgttgcccccttcccacccctggggcacccactttgggatccgatcacacagacaaccacaagcagcaggaggctgaggcccagggagagcaggaggaggcgaggtccggagcagagacgctgcaggaggggctggggaggaggtggccctgcaagaggagggggtgtcaggagcgcggggacagaggggaccctggcacagctccagggtcctaaaagggtagcaagctaaggcggccctagtagtctaggaggaaccatgtacatgaagaaatgcgggcggtgggcgaccctgcagggccagaggcaactggaaatcggggagaaaagagggctggggaagggggctaagcgctgagccgccccatcccaccgaggccctgagcttttgctgacacctaatggcatgactgcgtcactgcagccaatccaggaacctcagtccaccccctcctcccgcgccttgaaacgcaattgagtggcccgcgcctcggagtcgctgcttcccctgaaagtggggaaagaaggaaggtttctttctctgtccatgaattccacttgtctttggctgcgtgcagggagagaaggtgcaatagctaccattcaggccctcaagtcttccacccagcagggggaagagacacgttagccctgtgccctgagagctggagggttgggggggcctccctgccgggtctcctccgctgcggaccctccttccgtcaaagcgcgctgcaccccatcccccacgaacttcatccttgctcagcctaaacaattccctgctcggaggacaaagaaatgggtcaaggggaatttgtttttgaagcaaaagagtctcgttctccctcaggtcagagacccctcatcgcccccctcacagaatcctcagacccttcacagaaaccttttcccccttcaccaaactgatcactgacacacacacgcacacgctcgcacgaccggggtccctgggtggtgttggaaggggaaaggaagagggggcgtgacttcgtcataggaagccgacagtgacctcatctctccagcttccagctgttcccacacccccgggtccacctccgagggccaggaggcacaggaaagctttgggcacctgtcaccaataaagggactccaaccccacactccgcccctctcctgagagaggcagttccgacacctttcccagtgttgggggagggagacagacccagagagagagccaggctcacgggcaagagtaggagctgtggctggggggtggagaaccgccaaattctcgccttgcagaggcagggcaaggtggccctcaccttttctgagctgatggtggtcactctcctcattgtccagatgctgaaggtcttgatactccttggtcatgatagggctggcgctggacctgggactgagtcaagactgaggctggggctgaggtgggggctcaccaggactagagtgggaatgaggggcccatctctttactcccatctgattgacggctccatcatggagacctttcttctttctttcttttctttttcttttttttcttttctttttttttttttttttgagagggagtcttgctctgtccccaggccggagtgcagtggcatgatctcagcttactgcaacctctgcctcccgggttcaagcggttctcctgcctcagcctctggagtagctgggacaacaggtgcacgccaccacgcctggctacttttttgtattttagtagagacggggtttcaccgtgttgcccaggcttgtctcaaactcctgagctcaggcaatccacccaccccagcctcccaacgtgctgggattacaggcgtggaccaccgcgccccaccgggagctttcttctttcctccatcccctcccaggcctgacatccagaatccatcctctgatgtttcccacccagcaccccccaacacaccctgggttccctccgcacccctgcacccccagccagcctcccgccacctctcttcccattttacttgctcagggtctcagggtctgattcccaggttcttcagtgctgtgcagatgccgaactaaggagggggctgaagcttggagaatgggggtgggcggacagccgtggacaatgggaggggagcgggcagggtccataggagggccctgggccccggtgtctctgtgtctgcgtgtctgtgtgtccaagcacgccaaacgtggcatctccagtgcccgggactttggacagtaaacagaggtggaaatggattggaacttaggggagtgtgggggtgggagtgggggatgggttgcctctgctctgctccccagggaggagaatcgtgttgcccccacacatgccagtcacctcactcttccgtgcaccgtttgggaggggtgccaggccaggaggggctggggtgggatttgccatatccctcctccctccccgtttcgcttcctgcctctaaattccccagaactattggtgtctccaaatatccctgaacaggatcagagggaccggttctctgctcttgcccaatccagacctgtgaccctggcaccggagccgcaggccccagtttcctgtggggctgagccccaggcttcccagctctggcctgacttgcttccctctcctggggagtaaagtcctccaagcagcatgagggccagcttggttccaggaaaggcaggagagcctccgctgggactggtgccagcaaacctccactcactactactgtgtgcctcaggtcactgcgttcatgaacttctctcattatccccagagcacatcccatttcacagatgagaaagctaaggccctacaaggtaagagcttgcccagggtcatgctgcaaggaagcagcaaagggtagactagaacctgggcagcctgactccaggcactgcgttcgggccccagaaccacacccatcacacagagccaggatcccatcccgttgacacagctgggctccagtgtcccagagatg

SEQ ID NO: 64250 - DNA, 2367 bp, Homo sapiens
agagaagttggggttttacgggtaagaggcaggagaattcctgcagttcctctcaggcccgggaggaatccatctgcctgggcacatggtctctggaaggaacagagggcaaagacagaagggaatgttcaggaaggtctcagaggctttactaagggaggggcagtgaatctgggggggtcttcctactgtgaaactgtagctgttccaagagttagtgaatggcctacatctcagaagaatacacttagggtactcacaccctagcttgggtgccccccaccactgtaccctcccttttgtgttggccgagatagatttcatcaggaaccctagagtctgtctttccatgtctctgcctctgccatctaccttacacttctctttccctacttttcccttctaaccccaccggagaagccctcccttcagtccacctccatccctctggctgcagtgacttaagccccttcctcttctgtcccatcctatcccatcaccccgtcggaggactagactctaggtcggacgggcgggattaaggagtttgggggagacgagggacgcttggagatccctctaagtcagcggaacgcagggccgggctccagggaactacagctcccagcatgccccggggcccgcaaccgtccgccgcccggtgcactgtggacgatgagtcagggttaggggcgccaggacgtgggcgtgcaggacgccagagctgggtcagagctcgagccagcggcgcccggagagattcggagatgcaggcggctcggatggccgcgagcttggggcggcagctgctgaggctcgggggcggaaggtctgtgtgtgacaagagggacggtgggcagcggccctgggcaccgggccggcactgaacccccactccccacagctcgcggctcacggcgctcctggggcagccccggcccggccctgcccggcggccctatgccgggggtgccgctcaggtaagtcaccgcagccttggcaagggggtgtgggagcggcggtccgcttcggcgcccgccatcggcagggatctccctcttggtgccaggtacctgcctactgctcagtcgccgaaagtaggggaaagggcaagccagggtgccctagggcgaaactaggggaaaggtcaccgcttcgcgccgcctccccgcgcggctctcgcctgttctccccttgacacagcggaagtcccttccctgaacttgctaaccgtctcttttcccagctggctctggacaagtcagattcccacccctctgacgctctgaccaggaaaaaaccggccaaggcggtaggtagccccgaggccaggtggaccttagccagacccaaccagagccctgaaatttgcctctctctgcccaggaatctaagtcctttgctgtgggaatgttcaaaggccagctcaccacagatcaggtgttcccatacccgtccggtaagggaagggataatcagagctgggtggggccagggtggtttcccctgccagcctggcctgaccagcctgtcccccaccctctgcagtgctcaacgaagagcagacacagtttcttaaagagctggtggagcctgtgtcccgtttcttcgaggtaaggaatgactcggggcttggtccctggtgaggtgtttggagatgttaagctcaaaaggagcctggatgtgggatcctgtgccttccccaggaagtgaacgatcccgccaagaatgacgctctggagatggtggaggagaccacttggcagggcctcaaggagctgggggcctttggtctgcaagtgcccagtgagctgggtggtgtgggcctttgcaacacccaggtgagggcgccctatcgccacatcccagtatgccataccccagcttggcagactcagctcttttgccatagacctagagactagggctaaggtctcttctaagcacctgccctgggtgcctgtgggatggatgttaactgtccaaacataacacaatttacatgcagtcccctaggcctgagccatgggcctcaccctggttcccaagtccttacaaatctctaagttggggattgcctaacaatagactgactagtagcaagtcaccctcctacctagacctaagacagaccagcattctctgctgtgccctttgcacaccccacttcttttctacacactggggatggcccaggtcaggcactgccctaggtcaggaactgccctaggtcaggaactgccctgttgcccacactctcctgttaaggtcaggtccccctgcagccagtgacaaccccagattcctgcttcccctccagtacgcccgtttggtggagatcgtgggcatgcatgaccttggcgtggg

SEQ ID NO: 64251 - DNA, 1859 bp, Homo sapiens
tctcctgacctcgtgatccgcccgcctcagcctcccaaagtgctgggattacaggcgttacaggactcctgagaacgtactaaacaaccagacaatggatcaatttactcagtacagactagaatactccaacataaaccagtatgcccccacctattccagtaaagcctaatcttgtctaatctggtttaggatatcctagtctgtccgtgtgcctcaatctatccaagcataaccttgtccatcctgggatagtcaacctacctcagcatagtacaatctgctccaccataggccagaaaatcccagtgtggcccaaagtagacgtgtgcccctccatgtcgcccaatccactctagcaaagcccccgccggtcctatctaggccttgcgctcacccgaaatcctgatccatagacttgaaaaagtacttggcgcccgcgggccgctgcaggacgctcttgaaatcgccgagggtgatgcgctcggcggggacagggatcttcaccaggtagggagtctcttcctcatccaggtggtaaatcaccttcgtctccccaaccccaccgcccccagtgctgctacccgccatggtctcgcccgcgcgctcccgggctccaccgcccacccaaagggctaatggcccctgccgcgcctgcgcacacccgcaaaccgacgcgcgagcgcggacaggactgacccagtacgggagagaagcaaaggggaaaaagcacggatctgcgagggtggcggcggggggcgggccgcggggtgcgactcaaagccccggtctcagcggccgccgcgcgccaccgccaccgacgccgcgagcttcctccaggtacccgcccacctctcctcatgtcacgtgacttaaaggcagccaccccgcgctcctcagccgccctccgtcacgtgatcccctcccaatcacgtgaccgtctgactccgcctagtgcccccgccacatgatcgctgccttcagcaacggtctcccagcccccaaacgtgtaccccagccgaggtcctctgagcacccaggctaagctggcctgtgccttcaggaaacggaccatcggctcccaccccgctttaccccacccacgatggagcacgaagcaactctgacccgcaggagtgtgcgtgcagggagtgaaggtggggactgtgggggttcctagactcgagtggggagggccaaatacaatgaaagctctaaggtggcttacttgtcttggggtgggaaaggcccagtgctgtgatatcttcagattggactttgagacgtgggtttcagccccacctccagctagtcttcagccaccaaagcctccctcccgagcaggacagtgagggctataaacacaaaagagcccactctgctttatttacaacacgcaggctgtctgtacaaacagcggccgatattattaaaaacaaaagaggtgagtgagaatcgtcacctttctgctttccttcctcacttggccaggctctagtactccacctttgagctgccatgcccaataggggaagtccaaaattaaaaatacaaccggtgtagaagaaaataaatggggagtgaaatagaagaaaagatgagggaggggagtgctaatatttacactagagttttatagacaactgtcccattccatcccaattccaatcctgacccagaaagtgatggtggcaggtccaagagacagagattatgtgtcgggacacagacagcctcccatccccaaccgtaatggattcaatttcaagtccacagagtggggaggaaggatagggtgggaaagtgagacactcattttcaaacaagtctcccttgagaattcctgccttgaagtgcag

SEQ ID NO: 64252 - DNA, 2673 bp, Homo sapiens
gccacacagtttaagaatggcattcccagaaacacagtccctaagtgaggtctagaaaaggggggcggggggcgttgtcaggcagggctactaggctgcaaaggtaaggcaaacctcacctgagtctctggcttaagggtcggaggtggatctggaaaagcaataaaagctgagtcaagacactaggaacaatctgtgtaaaactccccctctaaaccccgttgttcctaagtgaaccccctgctctcccaggtccctctgccaggccagcaggcccccagctgtgttggatccgccccggctcccccttccgccccgcgaggggcggagcctgggcgcggcgccctctgaggcctcgctatagcgctccccttcccccaaccggaggcccggcgccccgcccccccaactcacggtctctctcgactccagtctactcggatccctcagcgccccaccccaccgtaccgctcccggggccgcgtccgggccgccgccagccgcccccgtccttcacacgcgcccggagccccgagttcctacccggccgcgctccaccgcctcgggccctccgagaccgcacacgccgcccgccagcccccagggtccaggatgaccacgccgaaccgctccccgccctccggccccttctactcgagcacgcggcccggcgcgcccctcacccccaccccagacacacacaggcacacgcatccaacgctacttcacggccgggacagacccgggagctctaacccggacgcggcccccacctgcccccccccccccgcccataccgcgctccccacaatttcgccgtccctccgcccccatccggggctttggcccctccccgtctccagcttttcgggctccccaccgggccccccggccctgttcctagccctctccggccgccgcccccccctccgcccccgtactcaccacccagttactaggctatggacccctcaactctggccccttccccccaaccagccactctctctctctctccacagcagccaccgctgctgccgccgatgcccccctcaccctcagcaactcccaggctcttaaccctcgcggaccaaccctacccccccgcccgacaagtcgccggtcttaaccccccccaccccgccccaccaccccctacaactacccagctcgcctcgcttcctggctcgctctctccacaactaccccccggtacaggtccgtctgccgtagacaatacccagaccccctcttctccccacaactacctgcccacctctccgacaatcaccgggcattctccggcggcaactactcggagctccggtaccaccgccacaaactaccccacctcggcgaactaccgggcccctcactcagcctcttctacgtcctccctcctgagcaactctccggccactggattcccctaaccttccagttccagggccccaatctgccggtggccctttcgggccctaacccccgaggctccgggtttcaagctcctatcccccgcacccccacaccgtctgatctccaactaccccagcccagtttcccactcctctttctccaaggtctctcaactcgtcgctctcccacctccagggccagcctcccgaccccctccccgaactcccccgctgggctccggggctcgacctccaagtttgccaattgattcctcgcccgccccccgccggctcagcgctctgcaccggtcgagagctcaccttcgggactgggctccgccatggcttccagcatcgccccctcccctcctcccggtccggcgcccccctccccggagccggggatcccggtgccgcctctagtgctcgatgctcccactgcttcgctccacagaagtgtccgcctcagcccggttgagactcgagtccgctagccgctgccgccacctccctctaccactgcctcccgcactcccggaccgggccccctccccccgcgccgccggccgcctgctccctcctcctcctcctccacctcctctctcctccctccctcctcttctctccctcctccccccgccggcgccgaggcgcagtgcaccaagggttttgtagtccgtccgggaacagcggaaaagggaccgcatgaacctccggaactttgattcccagaaagccacaggctggcgcaggcgcaccaagccgctcccctcccccggggagcggcggggagaccaggagccggaggggagagcggaagtgcgcgcgcaggcccctgggagatgtaggctgggcgggaccaagaaagaagaggaagaagggattagaactctcggccaccatactgcctcgttctgcagcttctttctccccaggaggaccgccccacttccggcctgccggagaaatgattgctgggagttgaagtattcctggcgataatggctcccgctcccagtcttctccctccctgattccactctgccggatcccacacaccggcaaaagtctagccaagtgacatgcaactgagaacagccgttttactagcttgcacacatgaaaatatcttagttagaatgttctagcaaatgtggatgttcacctaaagcaggtacttcggaactttctccacaggaacccacagtaaaaaaaaatttttttttacatgagcatttttaacatttagtttcacatg

SEQ ID NO: 64253 - DNA, 2801 bp, Homo sapiens
taccacacgagcagtataatctctgcagtcctgggcaaaaaggcctcaaactgttttctgctgctttggaatggggagggggactgggaagagtcccgaacagatagtttctctagctcactgttctctttccttctctctactcctactgttctgtccaaacccccaacccacggctattatgaaactttaaggcaagccaggaagctagtccaaaactactgatgtaacaacactttcttcccctcacgctcttccaagattcctctccaaagcctccaccacttcccagtcaccatacctggtacagctgacccattgtggcactggtgggtggaatgacattgttgacaaagaaaaacaaggcatcctcagctcggagatgaattcgcttccggatcaagaagtagaactgaccaactgcaaaagatacaagatgcaagaaagtcacagaggtcaaaaatgccctcaaaagaacagctgctaggtggagcctcctcccgcagagactgcactcccacccacaggaagcaagcctgagtcttggatcaggttcccacctgtgagatcagaaggcaccaggtatttctttttgtccaggtctcctatccgagctttgggagccttttctactatcacctgataaagagatgaaaattaggagacagaaggaatgcagccccgaagctgcacctgtcaagaactcaagaaacaatattcctagcacctaaatctaccccagattcatctctttgtctttgtacacgcggtgcagcactgagtcccagagatcctgacctcactgactggagctcatttaaatatccaggatccatcccccaatagggcgtcaccataaacaactatcttaatcagacggaggtgacttgtttgggtcgactagtgattcaatctcgcaaccttagctagctggggggatgaccatttgaagctcaggctgtcaaactctctaaggcctcaaatgctaaggtttctctctcctgtccacatccctctcaaccccacatccaccactaccccactcctttcatcctgggtcccaaggacagcagtttcaggctcgctgccaaccccaccacagccagcagcctgatccctgcgctgcctgtcccgatccaaggccaggctgtggcgtcagcgtaagcgtcccgcgccctcggccctggctactgtcctcaccggcacccggtccgggtatttctttcggatcttctcgccctcagagcggcgcttctcgaacggatgctcttctttgtacacgaacttcatcctcccgggaaccgggctggacagggctgggctgagggaacccaggggggccgggacggggggcggcgacgacggcggcgacgcgcgggcggattcagcggagcgatccacgaatttgcgccacttccctattcaccaaccccgcccccgactatcggggactgccccccccgctaagatacgccactacctcagcggcgctaacgctgctagcgtagcaccaccaactgaccggccccctcacgccattagcgtaatcgctttggaatcaatttgtgggctacgcaggcgacgtagcaaagacggttggcttttgctcatcgaaaattactctaaacctattccccaaccgtcccctcaaggaagctggggctgaagaggagtaaaagatggtaatcatcatacgagacttggttctccaagttcctttcgttaacaacgtagaggaacagcagggacaattacaaggttagctattcacgaaccgtgttgctacgctgaaggcggccgttgacaccaaaacaaagtagtacccaagtggcggagatgatctccagaaataagaagtcaaaaagaaaacagatgtttggagagatctacagaacgcttaagtgccaaaatgagtagaccaatagggactggagaggaggttggaaaggtagggactacgccagcgcggaggaacactgcgggacttgagttaaatcatgtgatctcaaagagggcggagcgtcacgtggcgggtgcgcgaagtagggccggcttgggagggcgccggggaggcggggccggctgggcgacagctgggagggggaccgacgccttcccggacagcggaggtcggggcgccagccacctgggggcagcgcccgcttaacctgtccacgtcagtgccccggacgaagcccggtttctccagctctacgccctttggccgtccaggtttctcctttcgtgcttccatagccggtttctcctttcgtgcttccatagcctgcttctccgaaggtgtccttccactccccaccagcgcgcccatcctgtcactcggcccttcccgccaaagcatctggtgtcagcattattgtatcccaggcatctggtgtccgcattattctatccctatactcaacgccacctttccccctgccccttgagtccaacagcagtctcttccccctctgcctgtgggacagggtgcatgtgaacaaagtcccctctcttcacttcccaaaaccccagagaaggacctaaggccgctttggtttcaaagttataatgcatggtttaaaagagagaaaaggaaaaaagacacaaagctggttacaggtctgagggagtctaaggagagaaaaatagagggagagtaaaggggggacaaatttagggaaaatccagtggcccaaaatcccagtatcccacccacagcccagcccttggagcaggagtgaagaattagatcagttttgtacaagagttttttaaaaaaaatcaaatcacaacaaagctga

SEQ ID NO: 64254 - DNA, 3044 bp, Homo sapiens
aagtgctgttagctgaaggacctctgaccttggagaaaagctaagggagaggggacccagagatgcttgggtccatccggacagtttccctcagaatgctaggctctcctggagaagcaaacgtcctcattttcaagccctacaactgcccagcgctgtcctctgacagggacacccaaacttcaatggtgggcacagcacccaccttgaactccctcccacaattaaagaggcccatcgtaaaagcatctgctttagtcttcaataaatccagatacctacactcacactatgaaataaattttcacagcctttttggaggaattctcttaatgggaaccgcaggcgtttctccttcacacccagggctttcccaagttcccgtccttgtttgtaacgtatgccctcccacccacctccacccttgacacacaagtctgtctcttccttgttataggaccaaacacacaccgaggttccaaatagggtctttcccaagcccacatccacagatccggctgtcatcaaacaggtgttccccgcctcttggtttctttagcaacaactccagctttcttaaagagcgccccacccaccaccttagcccccaagagttgccaaatcctgtcccatctagccccatcaaaacccccaagggcaaggttctattacaagggtctcccacctcgccccgcttagggtgcccaattctctggcgagaaaagccccagccaggattcccttcctaggcccaaacagaggcccgacactccgaaaacccctgagcaccacggacagatgtccccaacaccgccagacgtccccaacaccgccagcgcccaccctggctcaccgtgcggatctgcctccgcagaaggtaaatgaagaagctccagagcttggcggcgaaggccacgaacgtgcgcagccccagcagacactgcgtccgcatcatcccgatgaccccggcaccgccggccccggggcccccgcggcccagctccgccagccccccgggggcagccccccgccgccgggagggggaacgggggccccgagtggcaggagaggctgcagagaggggcacggagcgggcggctcagaaagccacccctggcgagggtaaagcccagcggaacggggagctgggggacaggcgtgggcagcccgcgggggcccacatgggctgggagtggcaccgacggcttcggggaggttgcgggccgagacaggtagggctaggatggggtcctccgagacctggagggaaggggaaggataattgggggagggggcagtgggggagggggctagggaaaagggaggaagggaaaagggaaggggagggggggaaagcagagagtggcccgctgcgcaggcgcgctagggggctgctcgcaggaacggggagggcgggggcagcggcgcgcaaagggccgcggcagcggagaacgggcctgcagagcgaaggagcagggaaggagggggagggggagccggagggcgcagagcgctgggccggagcggcctccccctccccgagctcgggggtcctttagccgctggggaccggggctgcagcctctgcagctgggtttcccactctgacaggcgccattttaccgtccaaaggactccctcttcctgtctttccccctcctcttcccctttgacactacttccggtggtgacgtgtattcgcttcaccgggactaagttcctcctgcgcggtctatggcgggtaggtataaggaaagccaaaagcactccaagcgaggctgcagtattgcgcacgcgcagaaggtggccgcggggcggggcctgaggcgaagcaggccccgcctcaaactgcgtgggcggggagagtgacgtcacttggcccgcgcttagggccctcgcggggggcttgtgggtcctcctccccctcccactgacaactgccccaactgctcttcccgccccggtcacagtgaaaatgtagacggggtcgttgtccgtacgactgtgcgccagggctcggggaggggcgccctccgcgtgagcgcccccctgggaatattgaacataatcacctctcattccagactatgttaggtcttaatggtgggaggacgcccgagtgctcggcccgtttcaccccgaggaggaaggacactgggtcatgacgccatcagagggcgccagagcagggaccggacgcgagttggagatgttggactcgctgttggccttgggcggcctggtgctgcttcggggtgagagccagaggcacggtggcggggcggggggtgcggttcgggcctggctgaggggacggaagtgggcaggaagggccaggggtcacaggctaggtgtggaaatcgcgacgggttcgcgaaggcggtaatcccagcgctctcataccctttatccgtccctcgctctgcagattccgtggagtgggaggggcgcagtctcttgaaggcgcttgtcaagaaatctgcactgtggtgagtatcccacagtgtctccccggcctaccctggatagggcacctgtgcccactctttgacaatcccttctcatctctgccttagtggggagcaagtgcatatcctgggctgtgaagtgagcgaggaagagtttcgtgaaggttttgactctgatatcaacaatcggtaagtaccagttggaagagatttgattaaatttgagacctataatgctaaggaaatttctttacaacaagcgcagaacctggtatgtagtagcagttccttaaatattcattgaagaattggatatggatctttcaggaggcaagaattaataagaggagtgatgagtatttggggagtccaaagcaaagatcatagaagtcgagagagaaatagcctggaaatagggagaacatgtgggaagggtattgcagtaatccgttaatccggcttcactctttaaggtacatatgtaccgagcaccaactatcaaccaggtgctgtgcaagatactggagacggcagtgagtgagacctgttcctgacctaatgaattttagggaataa

SEQ ID NO: 64255 - DNA, 4016 bp, Homo sapiens
ttgggggctgaggatgtgaggtcctggagtctgtctagtttcttcagtaagatgaaaaaaactcttttcttttttctctccagactcagtggttctccatccttccggacttcagcctggatctccaagaggggccctctgtagagtcccagccctactccgatcctcatatacccccggtatctaagaatgccaaggccagaacaaggaaatgtagtttagtatctggtcacgggagagaaaataaaagctgcagaggttgggggtggggtcagggattctagggatggggcagagtggcagcatcctttgtacctacaggtggatcccacaactcatttgacctttaaccttcacctgtccaagaaagagagagaagccagagatagcctgatcctgcccttccagttcagttctgaaaagtaaggttgggacctgggtacgtggatccctgagtagatcccagcatctgggccatggagaggttggggcaacaggttattgattaacctgactttatagggactgaagtccacctccagagacaagtccaagttcttgatccacccattccccctataatggcagaggacctttatgtctcttttctctcccttatacccttgggtcacagctccagttgtccccagagcaccctgggcctgggctgagccagaccagacccttgggaggtggccctatccctaggcagtggtgctaggaggacagaaggctatatgggcgtggcagaggctggttaacaagggcttagtacacgcttgctgttctgtgcccagtatgtgggcggatgacgcaagactacaagatccttgccctcaagctgctaggaacttacggttttattaggagagcagtacaagggtatctatcccagtaccaaatggtgcttcagctctaacatggaggtcagagaaagggacttggaccaataaaatgacatggaggcctaacaggttgcctgaatgagagtcacagtcacctggaagaaagtatccagacccaacctgttagctaccctcaccagcaccaaatcttcccttctcagacagcaggctctcctgcggcctaggccagggcaggctaccagccacatcttctatgagccagatgcttatgatgacctggaccaagaagacccagatgacgacctggatatttgactggccagatttgattagattgtaattggagggggcgcgggaagactttgggcccagaaccatctttctattgtttgtgttagccttaccctgtccctgccccaccttggttccccttgtctatggagccccgccttgtgagccaggaagcagcgtctcatcaggacagaaggtaggatgaagacatggggtaatgtgagagagtagaacacccccgtacctaataaaaatctttatttttttattaaaaaagaagtactttggtagctatttaaataagaggggggtgggaatgaatgtcgagatacgagcacctgcatcttttagtcaattgtcagtggagtcagtggggtgctaagtgttctgaactgaagtaggtgcactaaggttccaagctccctgcaaggatctggacgggaggaaagcagaggccctgaagggaaaaaagcctgcttcccaatacttattttttattactgtacaaaaagcacactctccctctttttgtctctcccaccaacggcacccccccacccccaacccaagaggactatacatggagtgcagggacagagtgaccaggaggcctttgtccggcaccctgcccacaggctgagctcagccccaggccctttcaggcatctagacactcccatagcctgtcaggctggggcaaggagatcccaggtcacacatactccttggaagagttggacttagggtaagagcggggtacacggtacccagccttgctctcattcccaggacaggaacaggagagcagtgcacctcccaggatgactagggcagaccctgcccagccaataaagatggcagggccaaactcatacctgtgaagagaagggggtggttagaaaccctggcgtgcctctgccctcctccctattccaggaccccagacctgtccccttaggaggcagggttcccagacttacttaatgttggtagggatcaaagggttataaaagtctgtgacaatctgatggccataccaggagcaagctaccaaggcggcaagacctggagacagaatgagggtttcagtatagtgaggccccaaatgggcgccttgcccagccttgctcctcccagatgggagaacccgggggctcacctgccacgatgaaaattatgcctccacccatggctatacgggccttcttcactttgtcgtctcccccacagcgcgtgcacttcatgcccatcgtggccacaaacatggccaggaagcccagcaccagggagaccaccattagggctcgagtggcctgcaaggccgctgcgggcgaggggaaagggcgccgtcattgctggaaatgcaggcggctccagccttcgtgccgccggccgcgcccactaaccgctggacctcttctgtccggcgccgtgttctgccgagggccaggggcgcccaggtgtccaagacctgggccaagcgggcaggtccccgcccctcccgacagcgcggccttcctgctcccgccccgccctctccgctcaaggatccgcccggggcgccggggtttcggtgaaactgccctggatagggggaagggtgaaagggtgcagcgaagagaagccgagacggtggtccgaagccccgcgcggcgcacatgccagccggcgtccctgctctgagcccgctatcgaggccaccgggtttgtggcttcggctaatcggccgataagattagaggcagcaggcggcggcccactctgaccagccgcaccgcccttcggccctcggcgcgccccgtgccccgcgccccggggccgtttctgtctgagaaaaggacgggagatgacggaggccatggcctgcccgggaatggaggaggggatggccccggcctaagcaccgctgctccgagccggggacgaggctgggttgggggaggaagaggaacgtgggcgaccgaggtgcgcgcccacgtgcagccgccggaaccccggcccgctcccgcccagccccgccgcccccagccgaccacttcctcgccctgcagctccccggcaacccagggcccccagccgtggggcctcggctctcccacgcgcgccaccccgccacctcggtcaagggcgcgtccgccccgtcggtcccgcggccttaccggacagggcgagcaccgagtcgtacattttgcagctcatcatccccgtgctctgcgtgacgcagtccatccacagccccttgtacatggcctgggccgtgatgatgttgtcacccgcataggagctcatctgccactgcgggatggcggtgcaggccaccagacccacccagcccagcagggccatggagaagcccagcaactgcaggcccgaattggccatttccgccctcagaaaacactgggggcgccgggcggggagaccctacagtaaaacaaacgacacttggggggcagccccacaaaagaaaacttgaggtggagttttccggtcacccaaagagacaaaaagggtttgggccaggtgaatgcaaatcttgtcaccaaactacacacaaatcgacccctccagtgaagcgatggcctcgcggcacagggagtaggatacgccgggagggtggttccagacaaaattggtggtccccgaaggccaggcggttccctccgggcgctctcggcgaccctaggcaaacaaaaggtggaggggccgtctgggcgcgtttctgagcgccggcaagtcccaaagtatcctgggctgtaggtccgaggctgcggtgcgcagcagaggtggctcggaggtgagccagcaggtgcgggcggacaggtggggcgcacctgagtatatgtagggcgtcggggg

SEQ ID NO: 64256 - DNA, 820 bp, Homo sapiens
tttttttcctgtctcctaccctggtcgatcccaccttcgggggccctggctcgatccctgagagtcgcccccttcagcaccctcttcagtgtcccggttctctggctctgctacagacacccggcttagcgtggctccccaacagccccaccttcctgtgcccccattccaacccaacatgacttacagcctgaaccctttgcactcaacctccccacctaccactgtcccctccggcatcaaggctcctaactggaggaagaaaccactgggacctaaagccggccgagggtggggagcagggtgagggctaggtcagagtcttggccacacccatcgttcccctcccttagagtcttttcagacctatcctccacctttcccacccctcccccacactcgcccgtttctctttccctcccgggcctgggcttggactgccaattgctgtgcactctgtcacgcctcactgttccgtcctccctataatctggctctctaaggtggtcgtccatggtccctcaccctgcagtcctgctatctctccccaaagcattgctccctccttcctcccggcaccccttccagccttttgctccttcctccttcatctttggtcatctccccttcctgcctttcctgctttggagcttcctgtttcactccttgtcttttttttgttgttgtttgagaggaggaagtctgtgttacccaggctggagtgcagaggtgcaatctcggctcactgcagcctcgcctcctgggctcaagcgatcaccccgcctcagcgtccccagtagctgggaccgcgggtgcacac

SEQ ID NO: 64257 - DNA, 1928 bp, Homo sapiens
aggtcaaagcaccaatgttggaaactaactggataaacgaggagagcggcgcaggacaggaggaatcgagcctgacttctaccataggggtgactgggcgggtaattcattgaaataaggaagttaggaggaggagcaggtttggacatgctgatcactagagctgccacatccgggcggtaacgaacacctggatctgcagctccagagaagggcctgggtcagatgtcactgaagccctatggtggcggaaaggcgagaaatagtgggttgagattccaagtgcaatccactgcggctcctcgctcgccctccaggtggcagcacaaccctgcgcttccgaagcccgttttctgagccagacactctccacgctctgggtatttcggcttctctctccccacacgccgaccctaggtcgcgcactttctgcctggcagaatttggccgaggatccaaacccggagcagcctccagagagcgtgtcgttcacgcggccagcatatgctcagagacctcagaggctcagagacctcagggctggtggtgtggtcggttgtgaccacttgtccctcggaccggctccaggaaccaacctggggaatgtgtgtaggggaagggcgggatagacagtgcccggagcagggaggcgctgaaagacaggaccaagcagcccggccaccagacccgttgtgggaacggaatttcctggcccccagggccacactcgcgtgggaagcatgtcgcggactctttaaggcgtcatctccctgtctctccgcccccgcctgggacaggccgggacgcccgggacctgacatttggaggctcccaacgtgggagctaaaaatagcagccccgggttactttggggcattgctcctctcccaacccgcgcgccggctcgcgagccgtctcaggccgctggagtttccccggggcaagtacacctggcccgtcctctcctctcagaccccactgtccagacccgcagagtttaagatgcttctgcagcccgggatcctagctggtgggcggagtcctaacacgtgggtgggcggggccttttgttccagggactcttttctcaaaacttcccagtcggaggctggcgggaacccgagaggcgtgtctcgccagccacgcggaggggcgtggcctcattggcccgccccaccaactccagccaaactctaaaccccaggcggagggggcgtggccttctggggtgtgcgggctcctggccaatgggtgctgtgaagggcgtggcccgcgggggcaggagcgaggtggcgggggcttctcgcgtcttttcccccagccccgctccaccagatccgcgggagccccactgctctccgggtccttggcttgtggctgtgggtcccatcgggcccgccctcgcacgtcactccgggacccccgcggcctccgcaggttctgcgctccaggccggagtcagagactccaggatcggttctttcatcttcgccgcccctgcgcgtccagctcttctaagacgagatgccgtcgggcttccaacagataggctccgaagtaggattcatcatgagggggcggggcgggggggcacgggtcccgcttttcttgggctggggtcgcggttggggtcagctgggggtggttcctgcgcaggcgcagggggtgaaggtagggggctggctatttatacccggcctggacaacccgtgactgtgagattccaatcctaccaaaaggcagagtgggtctggagggcctttcggggcacaggcagcaagtggattctgcgagccagggttcacccccttgcctagtaggcggcgcggcgctccggaatcggggacaccctgccctcgatccgactcgggaaagcagatccaggcgggtcttgccctccgggagctgtccgtccgtcttcgctcacg

SEQ ID NO: 64258 - DNA, 555 bp, Homo sapiens
tccccccggctcgcgaacccaccgccctgctcggtcctcgcgccccgagcctcgcccacacgccggcagcgggcccggagccgaggccaatggcagcccgctgccgccgctcgcgcagaccccgcctcccgaccacgggccaatcccagcccagcagcacccccggaccgcacgccgaccccgcctcccggacttcgcaccgcggccccggcccccgccagccgcccagtaagtacacctgggccccgccccctggccgccacgtgacggcccccggcccaacccattggccggcggcccctttcccctcccccctccgcccctttccaccggccgcgggaaatcaaacgggccggtcgcgccccaaccgccacctggcctctgcgggaagggcggggccggggccgcagtgccaaggttgcccctaacgacctgagcgaggggcgggaatctgcagcctcggttctggcagtgagtagcaccgctcgcctccaccctcgagaccgaccttgcccgtatgctgccaggtgcagacgccttccggccaccaccgcc

SEQ ID NO: 64259 - DNA, 650 bp, Homo sapiens
tcgaatacatgaacggcccccattccacagatgagaggactgaggggcagtgcgaggcttgtaccaggtttctcgggagcctgggaagattaagaaaatgggccgggcgcggtggctcacgcctgtaatcccagaaaaacgaggctccagcagtatctcctccctagggccgcctcccccaccagggaggacgcgggtgcgcgttgtatttttagccagggcagcgcgccccggggcagcacacgtgcccccaggcgctgctgggcaagccccacgtgcgcttcccaagggctggcgtcctccgcgtctccttcgccgccagctgcccgcagcagccgcagtcgcctctcccggtcccggcgcgccctctgccggccgctcccggaggccgccggattccgcttcctcgctgaccctccacttgctatctatcgcccgccgcacccctccggccctttcagagttgaagattcggatttccggggcatcgggcacagtggacagaaaaagagaagagacaagaaaacaactaagtagcaagacgaggccgtgaagcatacaagaatgaccactggccttagactgttaaggaccgacttacccgtgcctagccctgagctcaagaaattggagaagcctaagaccaagac

SEQ ID NO: 64260 - DNA, 2994 bp, Homo sapiens
acgggggtttcactacgttggccaggctggtcttgaactcctgaccttgtgatccgcccgcctcggcctcccaaagtgctgggattacaggcgtgagccaccgctcccggcctaccactattttattttatttatgtattatttatttatgtttttgagacttgagtttcgctcttgttacccaggctggagtgcaatggcgcaatctcggctcacggcaacctccacaggagaagcgattctcctgtcccagcctcccgagtagctgggattacaggcatgcgccgccacgcccggctaattttgtatttttagtagagacggggtttctccatgttggtcaggctggtctcgaactcccgacctcaggtgatccgcccgcctcggcctcccagagtgctgagattacaggtgtcagccaccgcgcccggcccaccactcatttttatagacaattttttctaagggacctcgtagacaatactttggggaaccgcagagcacagttggggaaaacacagtaataccatctaagtttctttactgaggacctcagagccgaatggcctctatggatgccatagagaccaatacggactgagggtttaaagaagatggtgtccgccgcaggaccgctctatcttctcgggtgaactctatggcagagcataggcattcgatttagagaagtgaagccgagatgggtgggaacccgaccacactagcgcgctagaagagtggggcggaaagacatctcccgcgcatgtgtggaactggggggactgattccaagacaaggcgcccaccccacagagcaagttttctgaaacgtgtgagtcgtttaagtccagttaaagccgaggtggggcgtatcctgagacgcatgcgttctagacgagacaagtgatctagcggcgtggtcttttcaacgcctggcgtactgacggcgtctgaggtggaaggggttgtttaggattccgaacacgcatgcgttctgagacccaggcgtttcctttagagggtgtggagtgcagggctccttattgcgcaggcgcaaggactgcccggtaggacgagcggtctatcaaggggagggaagatgaggttgaagagattaaaaaaccgggtgcgcctgcgcgttgcagattagttgaaaacgctcagggtttgtgaggggcggggtcacgtatgcgcgtcattggacgggtcggtgggagggagggtggagatgggtagggtgtgtgcgcttgcgcagtgcgggggtggagggcggaggagatagatagcacgcttgcgcggctgtcatagggctgcttggttggtcagtggggagtcggcgcctgcgtactaagacccgtgtgcagcagcggcggcggcggtagaggcggcggcggcggcggcagcgggctcggaggcagcggttgggctcgcggcgagcggacggggtcgagtcagtgcgttcgcgcgaggtgagagcgggcagggcgcgtgtgcgcggtaccttggcttgggcccgggagaagatggaactgcgcgggggtcggggagggggcagaggggagcggcggccgccgccgcacgggttcggccagagagcggcgcgaggtgaggagaggcgcgggcgcgcgccccggttggcgcgcggggtgacggttggggttggcccggtgacgttggagcgacgcagggcgggggacggcgagccgcgaggcagccacgcgggagaggccgccaggcggccacgccggggcgagggccaggggccagatcggcccaccggggcaagggtacctgggccgttgaggacccggctcagcgcggccacgtgaggtgggggagggggctattcggtgagagggcatgatggggggggttggcggacggccggggggaggggaggcggcgtggctccggcctggcgcagtctctgaggagggggcggccgcggcaccggaagtgccccccacgggaggctgccctcggggtcgcaggccgcatggccaagcgtggaccggggccgcatggcagcgcggggacccctccccccaggtcccggccaccggaagcccggaacggccacatggtcggcaggagccggcagcccctagcgcggggagctagtcctcgcgggggttccgagggggcctgagattttgaggagtggaagccggaggctcgggtcctaatcaccccggagggcctgctgcaggcatatgttagcgcttcccaacctcaagggccccaggagctttcctgaaaaaccctcctgtgaagtgtggcggtcagccaggtgtaagtggcaccccttcgagctgggaggccggagaaatggggaaacagggcgtttggacaggagcccaacttttctgtcggcctgggtggacagcgcctaaaagcctcaggcagatgagtttcccaccgtgataggcgttcttcaccttgtcactgtcttcctgttgtaactggtttgggagttccacggtttcgaagtccttaactctactagcctagtatgattttctactactcactactaccaaccttttgctttcattttattgtcattcaccaccccccacctctcccactttctactgactgtactggcccggcctgaaaagccgacaggacagatgcatcctgggaaaagtgggagggccttccaggagaggctgggttcctgggttctctttgggaaccaagatcgaggtgtttggcagggggatcatttcggaaacaactttgctttctcccccttggcttgttgcaagtgcatgttggcgaggcgggaatcccccaaagaggccttgtggtttcctgtagcagtgactggtttgtgtgtggatgggggggggcagtgtaacagatgggtggggccttgtcctccggtctccaccctccccccccccaattagccctgcccttttgctggatcatagctgctcacctaattatagccctggctatatgtggggaagaggggtggttggtttc

SEQ ID NO: 64261 - DNA, 2004 bp, Homo sapiens
gggtgggaaaagaagatgaaggcagggagagtcaaacgaagaaatcaaagctgggaaagttcaagggactgcttacttgttccttggtctcctctaatgacattctctcttccatctcctttttcttccttctctcctgttcttccttcatcttctgttccatcatcttatccacctcttcttcctctggagaatcaggcagaatgaagaagaggcagggtagtgaaaacaattccaacgttacagattgaagaccagcaaaacccagtcatcccaacacgcctgtatgctctttgcctcgaggggacaagctccccatcgcggcaatagggaacggaaaggctttatcaggtgctctccaaggtccttcccatctcaagggttctggagcgtggaacaggacgcttaaatcccaccacaacggggctattccttccctcctctgcgctcggcagcgggcgcgctggttggccggtgggttgaggccagccttgaggtacaggagccattctgggccgtgcgtccccctgctatggccccggctcaccctgccgcttgcgctcccgctccatcataatgtgccggtgcagcgccctggccatggcgttggaaagcttggggcgctccaggagtgcgggcatggtgctgccgtgggcgctcgggccgtgggcgcccggctgtctctgactgccagacctcagacggggcctgcggggaggcgggcgctcagagggggccgcgcccggcccaggcggaagcccgtccgcccggcccgctcgccgccccggtcacgtgtcccaggagcccgccacccggccgggaccgcagccccagtcccaccgcgcgcgggcggcgccggggtccccggctcgctgctgccgctccctgcccagccagcgcggacgactgcccttcctacccgccttctctgcgctttctcagcggctccgacgcgccctggcccctgcgtcacatccggcggcccggccgagtccttccggagtcacggcggcggccgacctcacaggtgaaagaaggcggaagcgcgctgcgacgggtgcccgcggcgtacaaaccccgtcgccgggaacgtgagcgacgacggctgcagactggccttggcatcctcagctctctttaatttcgcgggcccacctggtggcaccccaggggacgcgggctccggagaggggcgcgcgagagagaggccgaggcggaggctctgagacggtgtttattggctccttagaaatcagagtcagtaacaactgtacagaggcccccatcttccgtgcgcccacccttccccactcccgcccggtggccccggaaaaagcagcttcatgtgggcacagggagagactcctctgggattcacagtaaccagaaacaaaaacggaaataaattaagtgatgtggggtaggggagtaaaagggagtcatgttccccaaatcagtgcatgaagaggggtaccagggcctggagctgggctcccacgactcctcccatcagacggagtgctgggcctccggacatggagctgtgccacttgccacctacatctgagagcctgcctacatgctcctgcgcggctgccaagctccagcacctgcgcatgccacgagtcacgggaatgaggtggaggcagtcgccactcagagtccatgggcccgcggcccgactgtgcttgtagtagtggtgtctcacccctcattccacccgtaccagcagggcacagaggagtgtggcccccttctccttagtgacccactcaagttcggctggactgaagtgagggtcaggaggttctccaagggcagcggaagggggtcccggggtgtaggagccagggcgcacacacacctggaacgccacctgagcctggtgcgtccgctgggatttggggtcccggaatctgtcagacaagaaaaaataagggagtgaagcctctcgccccatcacctcccccttgcaaagtctgttccaaccacacaagccttgct

SEQ ID NO: 64262 - DNA, 1388 bp, Homo sapiens
caccatgcctggccaatttttgtatttttagtaaagacggggtttcaccacgttcaccaggctggtctcaaacccctgactctagtgatccgcccgcctcggactcccaaagtgctgggattacgtttgttcgttccttggcatctttcttcacttgccatcacatctctgacatctctccatcctccatgcccaagaaattgtaccaggaggtctgttcccagccattctagtgggttagccctcgtgtcccttccctggttctggatcttgagaaaactcaagctcttaatgtcatcttcaaactcaatgtttctgcttcatgctgtcttcctgaccgccccctggtgctctatggtctttctgttccctctcggtgcccggcaatgtgggctaccctggctgtcctaccccgtctccctctagacgcctcccaccaccctccacatctctgttccgcggtaccagcgctgcaccttgcggtcgatgcggacggtgaagacgcgtccatcgcgcaagggttctcggctcaacaccagcccgtggttaaactcctggcccggctgctgccgccgcgccgtacgcccacaggccgacaggctcaccaagcgcccagtgcgcgggtgcagttccccgccgctgcccagacccccgttggaccccggtcctgagccgctcccgctggggcccccacccccgcccggccccggtccagggcctcccccagagcccccactcccacccgaccctgccgccatctccgctgacaccggggcagcgcgacagccgcgcttggcggcaccgtggcaaccgcgtcgggcagacagtccgagggatacgaccggggggctgaggccaggtatgctttacggcactgccgggcaatgaagcagcccgcgctaggagctggggacgaccacgatgagaacagaaggacacggggtcgggagcctcgctttacggcatagcgaggtgacggagcggctccgagggggacgaagacctgggcagggagcttttgcgacagtgggagaaagacacgcccaccgcaggcatctttacgacggtggggtgctggagcccaaacactttctgctttgcgacagcggcaccgacgaccccgccctcgctagggggcggtgacaccttgaagcactcgctttacggcaagagggggtgtctcccctcgggatgcaggctccaaagcagcgtgagccgagtctggaggacccagagaagcggtagtgaaagtctcttcccgccacccgactgaggacgaagtgtcttgcaacagtgcggcagtccttccactttgcctcacacctcttctgattggctgagctagccgactggcgggggtgggggaagctcgctgatagttcaagtca

SEQ ID NO: 64263 - DNA, 2950 bp, Homo sapiens
taagacatcttgaaatccaccactagggatgccaccctcaaccccccttctcgacttctccatgcagaattctcttctggcctgtgagtttctcctccagaacggggcgaacgtgaaccaagcggacagtgcgggccggggcccgctgcaccacgcaaccattcttggccacacggggtagggatgatggcatggggaggaaggctgggagaagttgggcggccggctgaccctggctcttctctccaggctcgcctgcctgttcctgaaacggggagctgatctgggggctcgagactctgaaggcagggaccctctgaccatcgccatggaaacagccaacgctgacatcgtcaccctgtaagaatgcctgaaggggcggggctggcgctgggactccccccacccccgcccacccacgttcgggcgggcgggcggggctgacgccgaaacagaagcctgtgctgtggggcctcggaaaggggctgggccagcgccggggccaggctcgagaaaggctgcgcgaagtgtgcactgggacgtggagtagaaggcaggcgggagggcgggcagggtgcaaggatgcttggcccaccctgagaggcgtaattcgcccatcaacattgctgtcaggcatctttttagcactagacgtgaccccgggggtgggggcagatgaacggaacgcaacccagctcaaaggatgggaagttgtgggggaggtgaggatagtctttttttttttttttgagacggagtctcactctgtcgcccaggctagagtgcaggggcgcgatctcggctcactgcaacccccgcctcccgggttcaagcgattctcctgtctcagcctcccctgagtagctgggactacaggcgtgcgccaccacccccggctaattttttgtatttttagtagagacggggtttcaccatgttggccaggacggtctcgatctcctgacctcgtgatccgcctgcctcggcctcccaaagtgttgggattacaggcgtgagccaccgcgcccggccaaagatagtgtcgttcatttcttaattccctcctcttcaggctacgactggcaaagatgagggaggctgaagcggcccaggggcaggcaggtaaagaatacacccaccccaccccccaggcccaacacctgaactctgggcttctggtccacggtgacctctctccctagtgcccagctgcattcattccgttatttaacaaatgcgtattgggcgcatgcgacgtgccaggccctggcaaggcataggtgctggcgcagtgcccgcggcgcgcacgttcccacccaggctcggagcgcgaggtccccaggtgggccccaaccgccggatcctgcccttctgcactggggcccagccgcctcccggcctttcctccctcccccaggagatgagacgtatcttgacatcttccgcgacttctccctcatggcgtcagacgacccggagaagctgagccgtcgcagtcatgacctccacacgctgtgacccgaggcccacggggcccgcgcctgcctcccttccccgccaccgggccctctgccattaaagcctccgtgcttcgctcttcccttctggttcacttcttgggcgccaccttcgggcccgtagggtgttgggcgctgcggctcccgaggtgcggggagcagctgggggtttgcgagctccagtccagcaaggtgcgactccggggagcgaggcggcagcttcggccgcggcctgagcgcagggcgctgcggggcgggggctctcgggctggggcgacgtggccagcccagtcctgccgaggggtggggctggccctggggctcgctggccccgcgccgccgcggagagagcgcgcccgggccaccccggctggaaggcatccccggaatgcggcggctcagcacccgccccctcgggaattccccgggggagccgctgggagggactcggctcccgggctgggccggccgggcctcgggctctgagcggtgggattagaggctccagccccgccgacttgcagacgtgagatcgggcacacctgagcggcggcggggcggtcgtggccacatccggggcgacgtgcctgagtcaccccgtcccgccagcgtctgccagtccagccagtccgcccagtctctcgcgtccgagactcgcctccagcctcccacctccgcccgggccgcgcgagcctcgcgggggcgggggcggggcgccaaggggcggggctgtctcttaaagggccccgggccgctgcccttaggccacttcctgggggcggagaggacctcagcggctgcggcgacacccagggaaggcggcgcggccgggtcccgaaactcctggctgtttccatcagagccctcggacactcccagcccgggctgagcacgcatcgtcgctccccggcggatacaagggggctccgccatccgctcccgtcagttcggcctccatctcctgggacccgcgccggcagccaggccaggcctctgagtggccccagagccctggctggactcgtccacggcggcagcgatctgcccggggtctcggaggccatcccttcagagtcggccctgtgctcgccaccgtcacctgctggttggattccggaaacccactgtctgaagaccacagaggggtgtcgctgaccaccccaaatcggatacgtccagacctcaagctcccttcccctctctggctgccctctgctcttttcatctcttctctcaaccttttggggatttctgtgtcctgacaccacctccccatccaccaccaaagtagccggggtgagccccaaaccttactgggtgtgctccacctgtgcctccaacccagcgaatctgacagcttcgacccaattctgcacacacccaggaagttctgccttttcttttctttcggtgtctcctgtacttcccaaaat

SEQ ID NO: 64264 - DNA, 1026 bp, Homo sapiens
cacaggctaggtagcagtgtgcagggccctgagttctgcagagcttgcatggagagcaggcgttacgctggaaggaagcccaggagtgtcagtaatggggaagcgtgccctgaggcatggaatgctgccggtgatcaacaacagcttcaactgtagactctgtctaggccagggccaactctccgtaccagcatcaacatctctctgccctggccccattccagggttcattaagtaaagcctgctaggaagctctgaaccccctgccatggggcaggaactgtgtcctatttagccttatattccctgtgcgtggacaggatagctctatcgggcgcttattcatgtaagaggtagggtcctggctgagaggtgaaggatttggcgagagggcatgggggacagagacagaggagtgaagtctggggagggctgggaagctattcggagaaggctggaaagacgtgaaggaagacgagcagaggagaagggaagggggcttctcacagtcggggcgatctggtctggaggagggaggggccgccagtcgccctggggaccgtcaccttgtcccactagggaactcggggtgcggccctcgccggccccgggccagcggccaggtccccgccctccgcgggatttactcctgtcccgcctcctcggatttagcccaggcagcctgggaggttccgcagtcgccgcttccgccttgaccaggtgagggtccggaccgagcagggggcccgggctggggagagccggcggagcagccgtcgctgggggcgcgtccggggggcgctgggcctgtcctcttctcctgcgtccttccctcccgcagccgcgcttcctcctgtctcccttctgcgctccccgcttcccaccgagcgcgcagggccgggtcccccagggtcctgggctttctccttcccaacccaaccctgttcgcgcccggttctgagtccacctgcgcgtttccaactaggcccagcctcgatcctcttcttcctccttgcttataatgta

SEQ ID NO: 64265 - DNA, 1506 bp, Homo sapiens
gttttcgagatgatggtgtctgggtggcttagttctggaagcggaggcaaactcggagatagccagacagacacagagacagacacaaagacggagaggcagctgcgcccggcgccggcccagggtctcttgggcggcgcctctgactcggggagaaacccaagtgtcagtgggcgggaccgggtacctgggaccctggattccctcgggggccccagaaccgccccctccctttgttctcccatcctgcggaggaggctgtgggccgacggcaggacagatggacccgcggtcagaccgacagccccaccccaagggcggtctccctgacccctctgtgcccccgctcacctggagcccccagaagagcccgggtgcctagcactcggcagctcacaggagctggcggaggcggaggcgggcccgagctcggaccccggccccgccccccgacccgccgagcccgccccctcctgggcggtgcgtttgcgccgggaggaaggcagccgtccgctgccccgggaagccgatcgtgggctttgctcctcggcgtcgccgacgttcccgccccttccgctcggactgcagatgcccagagagtaggagcgcctggagaaggcggcggctggtcccgggccccgcgaacgccgccaggccggcggcgtgcgtgctcagcgccctgggtgggaggcgagggcggcccgggccgcgctggcccctgggctcctcctcccaagggcagtcgggcctcgctgacgcagcggaacacccttcacactcactcattggcttccaggactggctcctggctcgccttctgcctcccaggggcgacctcgccgtcttctctccctggcacagcggtgacccacacgggcacctcgcagcgacagcagtttctgcaggtgccccagccacgcgggtgacaggccgccaaacggtgtcagtgagcgtgctcaggccgcctagagggccagaggaggaagcgcggtcagaaaagacccccgagatgagtgtcttcgactggatcctgagccaggaccagtcctgccttgggggccactggctgagtggcgcaagagatgagtttagaaacggagtgcagtccacatacagggcgggttgtgtggaagctgcgatttggccccacgagcagcgaggagtccaccgagacatttttagaacaaagaaggtcaaatgtgtgttttagaaagatcgtggcggggcgcggtggctcacgcctgtaattccagcactttgggaggccgaggtgggcggatcacctgaggtcaggagtttgagaccagcctggccaacatggcaaaaacccatctctactaaaaatacaaaaattagccgggtgtggtggcgggcgcctgtagtcccagctatgcaggaggctgaggtaggagaaactcttgaacccgggaggcagaggttgcagtgagccgagattacgccattgcactccagcctgggcaacagagcgagactccatctcaaaat

SEQ ID NO: 64266 - DNA, 2067 bp, Homo sapiens
ctttaaaaaaaaaactgcccagaaaacccagtaattaagcaaaagggagctcaaagagccaaggcaagccagcccaagagtagcagggtccctcccgcaggggccaaagtctggatgctggggtctccactcagagcctggtagtaaaagctggtgcagaataaggtcgttccggaagctagcaataacccagcctgaaggagacacagcacagaaaacaggattgttaagaacagggcaggctgagagggagtgtgtggggcttggtcagggttaggcgcagggaaagattacccagagtggctttctgcaatggggcacccctaacagggccaggctgtgtaagaagtggtgtttgttggccttgtcaaacagctgtaagaaaaacagaaacgaagggatgtcgtaggcaatacaggtactgagatcccctgatgacacaagggaccaaagttccttcccccaccccacccttgaagtcccagcttgatcccaggcctttggcttacagagcctttggcctttgctgctccagagatccgcggctcgccccaccctctccccgcccacttcccccagggaccccagactttgtgccttcgtagacccacgagtcagggagccccagcgcagttacttcacctccttcccgtaggcatctgggaattgggcgcctgtggagaaaagaagcaaaggttagcggtcctagtgccagccctgaccgcccccaatccggggggacccaggtggacattggcgagaaagggcacccccccccccgccccaggaagcttccgattggtgggaacacgctcgggcagtactgggaaccaattggacccagctgggggactttaaaaggtttagggctccgcggactgtctgataaacgagaggccgggcacctcccataggttacgcccttgcagcagaccccagaggacgccccaagtacagtcccatcttcgtccccagccccctgaccgtgcgccccgtaggaagcgaagcctaaggccgcagctccggacaaggcgcccaagcggcggaaagctgcagctggcccggccatagctgtagaacaggacgcaccggaccaacgccgcccaggccacccaagaggccagccaatcccgaccgcccatgcaaataaggttcacaggcgcccaatccgggccgtgttcatttcagcattgcgctcttcacccgcctttgtaaaaccgctgcagagtggcgaagacgtctggcgggcggagaaaccagcaccaattaggaacagaggagctaagcagtgggggggcggggttgagggcgggactagggggatttgcgtcaaggattggcccactttccaagttgatcgcctcttcgaaccccccacccccatgctccggccaatttccaaagatcccggtcttctctcaaagttccgcccctttttccacaggctcctcctgttcagcttcaaatcaaacccactaccaaaaagaggcggcccgaaagatagcaaagccccacctattgccagtaaaccccgcccactgcacaaatggcccctcccccatgtctgaaggctccgccttctttgtatgatgccccgccccctgtagttaagatattctcccccccgccagccctccgagaccgcgagagccccgagggtgggagatccgggggaatgtctccaccctgccctggcccgctacgtccatctgtccgtctgtccgctcccgcctcttcccaccatctccaatccccccattctccggagggcgggcgggcaggcgggtgcgagcggggggtgcgagcggggggtgtgcgccgctctctcggcagggggcgggggaggcggccgcgcggtgacgcgcggggctgctgcggctgctccgccggcggatcatcactctcgggctgggatggacgcggggcgggccggccctggcgcgcggagccaggagtccgggcctcccggctgctgagcgtccctcgaagcctcccctcacccccgccttccctcctaggatccgcgctgacccccgccccggggctctggactcggctcccgccctc

SEQ ID NO: 64267 - DNA, 2814 bp, Homo sapiens
ctctccccaggccctagggtggagtttcgctcttatcacccaggctggagtgcaatggcacaatctcagctcactgcaccctttccctcctaggttcaagtgattctcctgcctcagcctcctaagtagctgggattacaggcgtctgccaccacgcccggctaatttttgtatttttagtagagacagggtttcgcaatgttggccaggctggccttgaactcctgacctcaggtgattcacccgcctcagtctcccaaagtgctggggttacaggcgggagccaccgcgcccggcccatccctcattattttttgcgactcagagccatcctattacccctctcaaaccccaaggaatgtttgagtggggttgatatgggtgtgaaaagacacagaataatctgtctccagaggaactacaacttccatcaggcactacttcagcggaacaggaaaggatgtgggggcgtggctaccacgccctagtagagcgggaaactacaactcccaggataacgcgggatttcagcagggccaaaagagtgattgagctctgactggcgacccgacccggcggaaaccacctcgacagcctccagaaaggggcgtggctgaaaatgtaggggcgtggccacgtgggcatcaggaagaagtaacctgttgaatctatttctgctccccacccttactgcttcccataagggggaagccgcagactaataagcctcttccaaaaaagaggtaaagggaggtagacaaggggcggcagcggaggctggctactgcattccgtaggaggagccaacagttactttttacctgctgagtccggtgaaccagttcatgggggcggggacctgcctatgagaaaagggccaggatagaagaggtatttatttgttcattttgaggactaaatttagaacccatcatctacagacccatttgtaggttgtgtctggggcactcgctcggcctcaggaagagggaagaacggggacgactttgtggcagcaaagccacctcccttccgtgttttccgcagcccaaagcgatagaaccgcatggcttccgcagtctgggggagtgccccctggtggggcccgccgcccccggccccagctcggccgctcacggacatcgacttctgctccggggcgcagctgcaggaattgacccagctgatccaggagctgggtgtgcaggagagctggagtgacgggcccaagccgggagccgatctcctccgggccaaggactttgtcttctctttgcttggtaagtaaccctacttgcctttgggaactcacagctctcagcctcaccacgcccccgcccccgccccggctttgggcgacgccctcacgatccgttccctttttttaggtctagttcaccgccgggaccctcgctttcctccccaggcagagctcttgctgcttcgtggtgggattcgcgagggctccctggatctggggcatgcacccctgggtccctacgcccggggacctcactacgatgccggcttcacactcctagtgcccatgttttcactggacggcactgaactgcaactggacctggaatcctgttacgcacaggtctgcctcccagagatggtgtgcggaacccccatccgggagatgtggcaggattgcttaggacccccagtcccaggagcacgtgattcgatccaccgaacggagagcgaagaaagttccaaggactggcaaagctctgtagaccagccgcacagctacgtcactgagcacgaggcgccggtgtctttggaaaaatcgcctagtgacgtttcagcgtccgagtcgcctcagcatgacgtcgtcgaccttggctctaccgcacctttgaaaacaatgagtagtgacgtcaccaaggcagccgtcgaaagcccagtcccaaagccgtcggaggctcgggaagcgtggcccacattatgttccgcccaggtggctgcctggttctttgctacgctggcggcggtcgccgagtctctgatccctgtcccgggtgctccgcgtctggtgcacgcagctcgccacgcgggtttcaccaccgtcctcctggctacccctgagccccctcgccgcctcctgctcttcgacctgatcccagtggtgtccgtggcgggctggcccgagggggctcggagccactcgtgggccggtccgctggcctctgagtcggcttccttctacctggtgcccggtggcggcaccgagcggccgtgcgcctccgcctggcagctctgttttgcccgccaggagctggcgctcaaagcgcgcataccagcgccgctgctgcaggcgcacgcggcggcccaggcgctactgcgcccgctggtggccgggacccgggcggcggcgccctacctcctgcggacgctgctgtactgggcgtgcgagcggctgcctgcgctctacctggcgcggccagaaaatgcgggcgcctgctgcctcgggctgctagacgagctcggccgagtgctcgaggccgggacgttgcctcactattttctgaacggccgacagctccgtacgggggacgactccgctgcgctgctcggagaattggcccggctccgcggggacccggcccgggccctccgtgccgcggtggaggaggccaaagtggcccgcaaggggggcggtttggcgggcgtggggggcggggcccattaaagacgctgttcctaccagtggaaagtgcctctgtgggcgagcgggacgtggggggccctgctcgcccctcgccagggggactgactgtgtgccctgggcctgaagcccccctt

SEQ ID NO: 64268 - DNA, 1458 bp, Homo sapiens
gggtgagtgcggctggggcggggtctcccggccagaggtttctctgcctgggagattgaggccagggactctgaagaatagggcccggctgaggggctccccgaaagtggaagggggtgggccaggacgacaaagtccctgccagactgtgcctcagtttcccttctcttttgtccataacccggagtctccttattttcgaggtcaaggggaaggcttgaggggctgcctggcgccccgaaagcctcgtagttcctgctcgtccccccttcccaacacagcagtccccacccccatcgtcctccgcctacgtgccggttctcgcgattctttcaatctggagcggaggggcccgggggtttccagatgcctgggtcaccccaaggatttctgcagctccagccgcacgcccccccccagcccccgcctgccccggttctcccgctcctccacgcctgggctcggttcctcctggtcgagctctgctggctccgagccaatctccccagctctccctcgggtgtccttgcagctacctcgccagccagccctctatgcgccctcctcctgtgacctgcgcttcaagaacggagctgggcacccctcccataacccccgcgccactccgaaatcgggtcccgtaggctcaggggaccctacgctggcaggaactcagacacagttcacggctagagatgggcgccgactcgggggtcgtaccacctacaaggggggacagggaagtcggcagagagcaagcgatgggggaggagagttgtgagagttagaattggtccccgtccatgtacgacagtcagggagtccctctggccctgctcccgcccgctcccagctcccctaagggtagccacctcgcgccctcctccccgcgccaccggctgcccatagtggtacaatccgcagcccaccctctgagtaggaccgggcccccacgtgactcagcctgcctctccatctcctcagctcccaccccccatatccttggtaaggtcccccttaccccaggcgagttacctggccgaaggggagaggctgagcctcagggagaactgggcccccgggagccagcggactgacagacagacagacagacagacagatgggtcagtgtcagacaggccggcgctgggccaaggcaaggctctcgccaagctagcggcagccgcagcaggtgctgagtcagcgtcaggcccagtcccacccccactcctgagggagagcccctaccctgtggtcaatttgctgctgccaagatcccccaccttcgcaaacacgctgccccttcagtacccctgctggtctccctctgtccctgccttttgatatatctctcccctccctcctcccccactccttcccccttctggttgagctgtagggtaggaattaagccatttaaataaatttcaataaattacactgaaagctcctggttat

SEQ ID NO: 64269 - DNA, 1329 bp, Homo sapiens
ttccttaggctgttctacttctggcttgttgcaagaggagtagatgccccctcacccacacaaaccccactcagtctccacccaactcctggcactgctcccaggggatcgggtctccactccagctttctcaattaaagacgatttatacaactgaagtgctgtctgtcatctgtcggtggcgggcttggcagttgctcgaggcaggatcaagtcccgggggcggggcgggtgggctggcggctgtcctccagcaacaggtgcacattcccgggctcctcgtcacttcccctgtgctggcggtcccagcggctctctgagcgaagtcactgagcgagccgccaggctatgaccccaggggctctgctgatgctgctgggggcgctgggggcgccgctcgccccaggtaagtgtaggccccgaaggggcagtgacggggccagcggtcgtggccaggcaccagggctgcacttattctctcctcccccaggcgtccgcggctcggaggcggagggtcgactccgggagaaacttttctctggctatgatagctccgtgcggccagcgcgggaggtgggagaccgtgtcagggtcagcgttggtctcatcctggcgcaactcatcagcctggtgagggcgcgcggggggtggaggtcaggccagccgaccggccgggggcgtggctttaggcaaggccggaccagggacaggctgggggcggggcctgggacgagaccaggctgagatggaccagcctttggtgaagattggatcgaaatcagaccaatggacaagctctggccgtgggtggtggacgggcctggagtagaactgggtagggtgaaggacggacctgtgatcggaccttaaagtggggctggggacgaggcaggggctgggggacggacctcgacgtagggccacatgagtcctgagtgcccagggtggggcggagcttggtgctcaggggtcaataaatggcagcgggtggaggttcggggctgggtggattatgagctgaaggcagggccggggacagagctaggcggagggctaggcaggggcgggtctggtaggttgataggctgggagtgtagacggcaggaagaggtgtttctgagatagaggcaggtcttaaactaacgccgcttctgggaggtggacttggacccgagaggatggggctcagaaaaagggggcggcgttcccaggagagaggttggccccccgagccccctcatttctctccaccctacttcacctttacgccttaaatttttcccttctagaacgagaaggatgaagagatgagcacaaaggtgtacttag

SEQ ID NO: 64270 - DNA, 1028 bp, Homo sapiens
agctggagcggggcctgggtcgccggcactggctgtctttgcgtttgggcgtggccagtcactcctcttccaggttccagcctgaactgtctgcccctgatctgcggcgatttatcgatggtccaaaccgggctgtggccctgcttccggagctacgggaggtcgtctcctctatcagctacatcgctcgacagctgcaggaacaggaggaccacgatgcggtatgtccaacgggggtggaacaaggccaggtctaggcgaccttggccccacccccaaattccgcaccagcactcgctttcgttttttttgtgtggtttttttttggctttttttttttttttttttttttgagacagagtctcgctctgtcgcccaggctggagtgcagtggctcgatctcggctcactgcaacctccgcctacgggttcaagcgattgtcctgcctcagcctgccgagtagctgggacgacaggggcgcgccaccacgcctggctaatttttgtatttttagtagagacgtggcttcaccatgttggccaggctggtctgaaactcctgacctcaggtgatccgctcgcttcggcctcccaaagtgctgggattacaggcgtgagccaccgcgcccggcctcgctttcgtttctgattggacctctccctcatttggtcccaccccctgcttacctactggttctttatgcccatgcattgcctgcagtctcgctctcctgttggcgctgccggctgttgcctcaaaccagtggtaggaggactcaagcgggtagcgggcggggaaatgggggggtttccctgggggtctgggcccagagctcaggaagtttcctttgcctacccacagctgaaggaggactggcagtttgtggccatggtagtggaccgcctcttcctgtggactttcatcatcttcaccagcgttgggaccctagtcatcttcctggacgccacgtaccacttgccccctccagacccctttccttgaagactggagggttgagacccaggcc

SEQ ID NO: 64271 - DNA, 844 bp, Homo sapiens
acttggtgtctccggctatgagggtgacgtcacagaagaggccacggagccgctgttcattgagctggcgcaggacggcgggggcatgggacgggtccgtcacctctgcaggggggggcatggtgccagcctagacagtgggagaagaggccgggtagagtctcagaggctgggcagagggcaggggcttctaaaatcaggcagagagaggatcaggagctgctggtcagaaactagtggaaggctgaatcacttctggtcacagaagtcaggggttggcccttagccacccaagtctggccagcatccaagaccagtatgtctaactcacttctgaggctggaagaggccagagatacctcaggtcatggtgaaggtcaaggggtcatgacctctgaagtcacagactagagatgtaagtgaggcaaatctctctcatgggaaggaggaggaagctccacaactcctgatagccatttcacagaactccccagcctagacaaaatggccgcccctgctggcctgctgccttgggtctactttgtcctcactgtaggcctctgggtaccttctcacctgagagcacagccaacatggagtggggcggggggtggctcagcgagtcccttctgctgggcctcttccttctgcggagaaacagaaattatgtcaggggaacctagaggaggagcagaagagggtcctcaaggagggaagtgagaggaaaagcccccaggaagtggggaggggtgcagtactgtggccagagaggacacctgggtgagcccagacccctccccggagcctctgccaggttatttgtttagctgtgtccagtcaaacc

SEQ ID NO: 64272 - DNA, 1715 bp, Homo sapiens
cagccccacatcgaacaaactctgcacccagcatgctgtgccctgctcagaatacccatctgtcacccaaagccacagggctcgtcttgtaactctgccccacaacactggacacccttcctggctttctatctccatggcccagggagggccctacccagacccctggctgccagcaaacggtggtgcccaggagaggtttaccttgccccaccacacagcacaagacacacgatctccaagactcacagccacaaccctgccccgacggcgcggcggttccggggccccagctcgccctgcgcaccccgcacaccccaactctggggcgctcggcggcccacccctccccctctctgcctggctcctacgccatcaccctcccagcagcttgcagcgcttgcccgggctcacacccgccccaccccacccccaatctgccccacggggggagggggccattaggctgcagaattaacccttcaaagagggagtgagcacctccccttccacggccccaggcgatcgcgtcccacggccgcccctcgctcggacgccataccagggcccccttagtcgccccccagcgtcgtgcgcgcccgggggcggggccaggctcagcccccgacccctgcgcccccaggtcaaccccaaaggagagcggtctgggcgcggggcgcggtcggggctcccgcagcgccgggcagcggagagggggcctggcagttggctccggtccgccctggccctgcccagttcgccccagggcccacctgactgcgatggcgccgcgtccgccaggcccggctcatcaccgtggccgcccccggccgctccggttttgcccgcctccagctccggctccggctccagctccggccctggcccccccagcgcctggccccggcccggccccgctgccgccgccgccgccgccgctgacatcatcggctccccccgccccggtcctacccccacccccacccccggaaacagtccccccccagcgccgccgccgccgccgccgagaggaggccggcgcagcgcagccgacaccgacacaaagctccgagcgcccgacggccttccccaggactgacccccgcggcatgacactgcgccgcgctgggccaccgggcgggtggacaccgagcggggcgcgggccgggctgcagcatcccggcaggggcgcaagaccaccgacccccagggaaagggctccctccgcccttcctcctgcacgcccttcactcagcggtgcacactgcctgaaagcataacacacaggctctcagggtgcagacatgacatggcagactcataatcaggcccggtgggactcacagacccagggtcggcacactcaaagagggccagccctggacacacacacacaccctctccaggaatgcgcaggaaagctcagcaggccgcggaaaaagaaggccctggccctgcatacggggcacacacgaacgaccaccagcgcaaatgaacacatgaagctggctgggtactttgtccccaccagcagatagatccacatctgtatacttgaacataaatgcagaggccttggtgtcggcctctggggacagcatcaacaaaacaccaggtggaagcacacacagaaaaaacacattcctgaaactccacagggacaatcccaagaactcctccctggtgctggaaaattaaaaactaaggagatggag

SEQ ID NO: 64273 - DNA, 2111 bp, Homo sapiens
acctggggccagcctgggaccaagggatgtggagaccaggctgggtcctggaatcagggcataactaaggggtaaagtctgaggagcagatccaaacggctgaggcagggaggccgtgggccacggggaggacttcactcagcagcaaagagaagagcattggggctggagtgttccggcaaagacagagccagcagctgcggtgggggaggggagcgtgcctccccacccctcccctcacggcaaaggtttcctttcctcgtgcttgtgccccccccttggggtggtgacgtgacattgacatcaaacaaggattactctgaatgtggcttgcagtggtgtcgtctctgctttggagggagagtggaaagtcctacgaccgttctcattggagaaccccttgggatccccgccccccattttattcctgaaatattctacaaagtggaggatttcctaatgttcagatgccttgaccccaaatcccccaggactttcgtggcccgccccatggctaatctgcttttctcggattgtcgcggtcccgtgatctctcccggacagtggccaccctccttccagagcaggcctcccagctgaagtctcttcgagaggctcaggccatggatctaggatcatggctcggtacagcgcggcattacaggccaggagatgcccacccgtctccgggggccgtttgacaaacatcggctacttccggacaagccactggtcctgccatcttggtttgttcatgcatattcagcaagagaactgcatattcatgagcaaccgcccttccccgggaggacccgccccgccccgccgccattaccgattcgcagagcagaccattttccagctggggggggctacgaatgagaggcttttgctgaagatgaaaccgttgtccaaactagaatgaaagcggcccaattttaccctcgagtcttcaaaccttaagcctcagtgcaaaagggagcagcgaggagaggcggtgggattaaagaaaaaaattcttctctccctgtcacttcaaaaggtcgcccaaccagcgagcggggggtttacccacgactctggctcgcaccccttgcgggcctgcgcaggcggccccgtagcgcaagggagggcgggaaaggaaggggcggggacgcgagggcgaatctataagaagcgtcgttcagcgagttcgctgctcagaagcgccgagagcgcggccgggacggttggagaagaaggcggctcccggaagggggagagacaaactgccgtaacctctgccgttcaggaacccggttacttatttattcgttaccctttttcttcttcctcccccaaaaaccttttccttttcccttctttttttttcctttttgggagctgaaaaatttccggtaagggaaagaagggctcctttcgctccttatttccccgcctccttccctcccccaccttcccctcctccggctttttcctcccaactcggggaggtccttcccggtggccgccctgacgaggtctgagcacctaggcggaggcggcgcaggctttttgtagtgaggtttgcgcctgcgcagcgcgcctgcctccgccatgcacgggggtggccccccctcgggggacagcgcatgcccgctgcgcaccatcaagagagtccagttcggagtcctgagtccggatgaactggtaagcggctctgtcctccccttcccccctcctcccctggcgggcggggccggacgggggctgcggaaacttggcgctttctcgctgcttatgggtgacgggccaggagcatggctcagcagcgccaaggccgtgtaggcgccagtctcgggcctcccagagttatattttgcaaagagttgagcaggcgtagcgctttgtccgagatggggggctggctggagggtgagaaggagggagagaaggatgactgatttcacactccagagttaccgacgttaaaggcgatccgacgaatcctagggagtctttacaagtttggttaagaagccaaacccgggtagcttcctcctcttctgtaatacaaatgttaactgagcacctgctctgttgaagacacaggagactcgggttacagaggt

SEQ ID NO: 64274 - DNA, 1199 bp, Homo sapiens
ttgataaatggatattaaatagaataagtcatagtctctctctttattggggctcaggggacactctcagggtagctgggggccacgtgaaggggggcgttgcggagcggcacagctggaactccgggatgatgttcaggcttgggggcggggacctccatgcctccagcccccaggtgggagcagaggtaggaaggcacactgcccaggaaaaaaatcaatcctccgcccaaggtacagcagaagcggcctccttggcctaggaggcagacttcctcctgcggggaaatcccttcctggctgggaggagcaggggcccttcctcttggtggcctcggacattcagcaggtgctggcacaggccctggctgggaggtggggcgggcaggagccagcctggaggaggggctgagagtcagcaggcacacgggaacccggaaccctgtgtgctggggaggaatcccgcagtggccggggggcttgaggccgctgctttgtctcttcgtccagagccttatgtaagagcttttctcgggaaacaggaagtcctgcttgccaatttcagcacagggagtagtgcaggccttattccaacacacccggcccagccttaaccccagaactcagccagtttcttgcttccgtgcccctggttctcctccccatcgagcccacccctcctttcccaccttcagtcacccctagtgaactgccccagcgatctctgctgtgcttgaccccgagggtcttccaccctcgccctgaccctggacactgcccagcttggccccccatcctgctcctggcacaatgccctctagccagccaaccttccctcccccaaccctggggccgccccagggttcctgcgcactgcctgttcctcctgggtgtcactggcagccctgtccttcctagagggactggaacctaattctcctgaggctgagggagggtggagggtctcaaggcaacgctggccccacgacggagtgccaggagcactaacagtacccttagcttgctttcctcctccctcctttttattttcaagttcctttttatttctccttgcgtaacaaccttcttcccttctgcaccactgcccgtacccttacccgccccgccacctccttgctaccccactcttgaaaccacagctgttggcagggtccccagctcatgccagcctcatctcc

SEQ ID NO: 64275 - DNA, 2518 bp, Homo sapiens
cgagaaggccaaggaaggcaggagactctattccgatgtataagaagtatgccctcccacccggaccgggcctacaacagctgctatagcgcaggtgagagccgtgtgggcagccgaaagcaggacgtctctgaccgggggtagcagtgcagggagctaccgctaggagggaggttggaaacctaaacagaggcgggtctgaggagtgaagtgcagaatgccgggtccttacaggaggcagaggaacggtggagctggagaaggcagggggaaacagggcatctggatggctgtgcttcactgcgaatctactttctctcttttctcaggtgtcttccatttacaccaaggggatattctgagtgtcataattccccgggcaagggcgaaacttaacctctctccacatggaaccttcctggggtttgtgaaactgtgattgtgttataaaaagtggctcccagcttggaagaccagggtgggtacatactggagacagccaagagctgagtatataaaggagagggaatgtgcaggaacagaggcgtcttcctgggtttggctccccgttcctcacttttcccttttcattcccaccccctagactttgattttacggatatcttgcttctgttccccatggagctccgaattcttgcgtgtgtgtagatgaggggcgggggacgggcgccaggcattgtccagacctggtcggggcccactggaagcatccagaacagcaccaccatctagcggccgctcgagggaagcacccgccggttggccgaagtccacgaagccgccctctgctagggaaaacccctggttctccatgccacacctctctccaggtgccctctgcctcttcaccccacaagaagccttatcctacgtccttctctccatctatcggaccccagtttccatcactatctccagagatgtagctattatgcgcccgtctacagggggtgcccgacgatgacggtgccttcgcagtcaaattactcttcgggtcccaaggtttggctttcacgcgctccattgccccggcgtggcaggccattccaagcccttccgggctggaactggtgtcggaggagcctcgggtgtatcgtacgccctggtgttggtgttgcctcactcctctgagctcttctttctgatcaagccctgcttaaagttaaataaaatagaatgaatgataccccggctccatttcccccactgcctcgcctcagcccggtcctcgtacggggatctcccgccctcctggctctcctgtggcgcgccccccgccggatcaaggtactggggatgccgctagggtcaggcccgcgagcgcggagaagacagagcgcggcgcaaaagggaaagtggcggggccgccacgcgcggccgggcggcggatgtgcgcaggcgcagcctcgcgtagcgctctgggctggccagtcccgtggcgccggcgtcctcgggtagacgggaccgcgcgcttggtggccgcgccggcgctcttcgccgggtgtgacgtactaatcgtgcgccaccgctgccggtgggcccggggctcgcgggaggggaaggaggagggggggaggagtggcggcggcggcggtggcgctggtggcggcggtggcggaggtggaggtggaggtggaagctgaagctgaagcagagccagaggcggcgcggcggggtgctcggcggcgcggcacgcggcccagaagcgttggaatcctgaattgagacggctgcgcctaaagacagcaggagtggcggggccgccgccgtcgccggagagatgagccgggaagcttgaggccggagacgcccgccttcgggcccgtccgcccggcttccccgctcccggtgaggacgccccctcccctccccccagccctgccttggcctctcccattcctgggcctcgctcccaccgaaccggggcccagaggcccgcataggggcttcttaaggcccgtgtgcgccgagccatccaagctcgtgggaccggactggtgccgggttgcattctggtccccgaggatgaagtaggagggggctgggccggcctggcttgtgcgctccgttctgtcccagcgtcttgattcggttctctttaagtttccttcaaagttcttccccgtttatcagcctctgccccctgaaccatatccctggcatctgcacttgagatgaccgcagccttcccatgccccccgttcatccagggtgttagagaactgtctcccattccagtccagtttccacgtgcaagttgcattctcctcaagtaccacggttatcatgtccctgaggaaagaaactgcccttgttgggccctcaaaggacagccctggtggtattaaaataaagacgtagaacctggcagtgctattgggtttggcctggtgatcttagaaataagatctctgaggcctgctgcttagccattttcccttgtctctggactggggagagatgatggcacagaccctgaagggccccttgtggaccg

SEQ ID NO: 64276 - DNA, 2762 bp, Homo sapiens
gtggtgggcggacaataggatcactgcctgccagatcttcaaacttttatatatatatatatatatatatatatatatatatatatatatatatatatatatatatatatatatatataaaaatatataaatgccacggtcctgctctggtcaataaaggatcctttgttgatacgtaagtggtggtcttccttaaggggcttcaaattagtggatatgcttagctcagaccttccagccagtctcttgagactaaagggttcagctttccatccctggctcaggcactgccaacaccttgtcttcacccaaacaaatccccgagatgggagcagagagcaggaaggagggaaagtagataagcctcaagaataagggcatccgagagggaagctggggaactggacacaagggactggggaggggaccaaccaggattcatgatagtaccccaaagccctttacagttttcttccatccctccaccatccagccaggggaatcctcccatccctacgatatcgctgttgattccttcatccctggcacacgtccaggcagtgtcgaatccatctctgctacaggggaaaacaaataacatttgagtccagtggagaccgggagcagaagtaaagggaagtgataacccccagagcccggaagcctctggaggctgagacctcgccccccttgcgtgatagggcctacggagccacatgaccaaggcactgtcgcctccgcacgtgtgagagtgcagggccccaagatggctgccaggcctcgaggcctgactcttctatgtcacttccgtaccggcgagaaaggcgggccctccagccaatgaggctgcggggcgggccttcaccttgataggcactcgagttatccaatggtgcctgcgggccggagcgactaggaactaacgtcatgccgagttgctgagcgccggcaggcggggccggggcggccaaaccaatgcgatggccggggcggagtcgggcgctctataagttgtcgataggcgggcactccgccctagtttctaaggatcatgtctgcgagccaggattcccggtaagaaaggcatttgcaagagattgtggctgcttattttgccgcccccttccgacgggcccgccgggggtagctgagaggcccaccagggttgcgggagaaaccgaaccgggtggggggagggtccgacttggaggggcgagggggaagacccacggccgacgcggccaccaggtcgaggcggagggtagggacagcccggctagggtcaggcgtgcgaggtctgttacgaggcctcgacccgaggcggtgccatgcgcgaagccccggcgctgagtggcgagacggggtcgcgacctggcgtgggaaagaaaggtggaggcggccgccactatgtgtggcccagagccggcaggtccggttgcctccctgtgccgggggagggacggcgcgcggggttccggagcattctgacggtaccactcgcgagaggcgggggtgcctggtccttagatccagtcacttcgtcgcggctaaaacacgggtcggggagaagaaaccggccgttcagtgtgctggttttcttgacggccaggactgagcctaaccccgaggagcggccgcgtgaggcaccaggagcccacccggcgccgggcgggcgggtccattttgccgcacaagccgggctattggcaaactgcggatgggcaggtccaccttccttcgggggtgagcggcctgaggtatgggagggcgacgctacttcgcgacgggggcgggcgggatgtggattgttcatggaggggtgggagacgccgccgggtggtcgagggagcgagcacatggtggcctgaggcgttcccctcccccagtctgcttcgcttctaagtgttgtgcaatctccccctttgctagctcggcttgggctcattgtgcgcgaggccgccaccgcccgcggcctcccacatccgggcaacgcgaggggggggcttcggctggagggagtgggggagggcgcgggcgggatgacgtggggggaaggggatgtcctaccctccgatctgggaggtgaagggcgggacttccagcgcgctggtgctgcggtgggaggtgcacgcgcttgggctttaagcggctgggtcgggcccacgtggacccggcggcaagcaccacctctgggcaccgtgagcgcggcggcacgcctgccggcctgtcttcagaaagggtcacccccttatgtcgggggtggcctggcctgagccgctgcctgcatggggcaaatgcctcagttttatagaaactcctcctttgggtattttttgggagctggtgggagttggatctgggacagcagattgatggcatcatgcaggccactcctgacagagcccggctgtcaggatttctgagtgcttcggtcgggcaggggacaaaacttatgctttaaaccaacagatccagagacaatggccccgatgggatggagcccgaaggcgtcatcgaggtgagactggagaaatggaattctgtcctcccccattacaactttcagccgtatagagttagagtggcctcttgattgatttcccagatcatctagaagcagctggtttccctaaagggaggagggttgtaagctctgaggcttttgttagtaggcaccagattctgtttgctcggagactacagctcagctccaccttttccatgactcaagctttaatttctttgcatcccctagagtaact

SEQ ID NO: 64277 - DNA, 1994 bp, Homo sapiens
ccctaacctagtaacctccagatcccagaggctctcctcacctcagctgagctcctttgaaagtgattcaagggactatgtcactcagcctcatttgctggaccaaatctggagggagaacccctaaaacccctaagtgaggttgcccagggggttgtccccaggtggggggaagcaggggagagaaaatggtagccatttttacattgttttgtatagtatttattgattcaggaaacaaacacaaaattctgaataaaatgacttggaaactgcctgtttgggcttctcatttcttacctccccttccctctcccacctgctactgggtgcatctctgctccccccttccccagcagatggttacctttgggctgttgctttcttgtcaccatctgagttctcagacgctggaaagccatgttctcggctctgtgaatgacaatgctgactggagtgctgcccctctgtaaagggctgggtgtggatggtcacaagcccctcacatgcctcagccaagaggaagtagtacaggggtcagcccagaggtccaggggaaaggagtggaaaccgatttccccaccaagggaggggcctgtacctcagctgttcccatagctacttgccacaactgccaagcaagtttcgctgagtttgacacatggatccctgtggatcaactgccctaggactccgtttgcacccatgtgacactgttgactttgccctgatgaagcagggccaacagtcccctaacttaattacaaaaactaatgactaagagagaggtggctagagctgaggcccctgagtcaggctgtgggtgggatcatctccagtacaggaagtgagactttcatttcctcctttccaagagagggctgagggagcagggttgagcaactggtgcagacagcctagctggactttgggtgaggcggttcagccatgaggctggctgtgcttttctcgggggccctgctggggctactggcaggtaaggaggaaggaggctgaggggagggggcccctgggagggagcctgccctgggttgctaaccatctcctctctgccaaaagcccaggggacagggaatgactgtcctcacaaaaaatcagctactttgctgccatccttcacggtgacacccacggttacagagagcactggaacaaccagccacaggactaccaagagccacaaaaccaccactcacaggacaaccaccacaggcaccaccagccacggacccacgactgccactcacaaccccaccaccaccagccatggaaacgtcacagttcatccaacaagcaatagcactgccaccagccagggaccctcaactgccactcacagtcctgccaccactagtcatggaaatgccacggttcatccaacaagcaacagcactgccaccagcccaggattcaccagttctgcccacccagaaccacctccaccctctccgagtcctagcccaacctccaaggagaccattggagactacacgtggaccaatggttcccagccctgtgtccacctccaagcccagattcagattcgagtcatgtacacaacccagggtggaggagaggtaaagctaaaactgggggatgagaggggagggaggcaggactggatataggctcagagggaagaaggaagaggggacagggaaccttggccggcatcgcatgcagtcttgtgaccttccagtctttaacttccgcaggcctggggcatctctgtactgaaccccaacaaaaccaaggtccagggaagctgtgagggtgcccatccccacctgcttctctcattcccctatggacacctcagctttggattcatgcaggtatagccatgacctcagtctcacccctcactcagcctcccggcgcccctcccctcccaatcccacacgctactccttcctctgtggagagggataccacctgcgccttcctcttcgccccacaggacctccagcaga

SEQ ID NO: 64278 - DNA, 2362 bp, Homo sapiens
ctgggggctcctgggaacagcatgccccccacacggggccacctgccaagcctaacttcatgcccccagtacttgagatgaggagtgtcactctcaggacagccaaggtccagattccagaaaggacctcccagatggccacagcctgcaccagcagtgagcgccagtcccacccattacagctggctacggcgcaatccctgggagccaggatgagcagcaccccccagccgtaggagccccaggaggcttccggcctccaaggcccagagactgccccacaagggcagccctcacctggcagggccccagcagccccacctctgcctgcagacatccgtgtgaccttgtagactttggaggggggccgccaaagggctgatccacagcggaatgacgcacgggtgggcaccgtgggttggcgtcccggcggtcggtaacgaagcacaacgcccccaccaggtagtccaaggtgccctttcccaagcagcgctgcagggtccactcggcctcgccgaagtctctgcccagcacgtggtgcgccctcgggccagcggggagggggcgaatcccgggactgcctcgccaggcctcggctccccggagactcttgggggtctgggccccaagggtgattcaggtgctgcccttccccgacctgggctcgcctcccccacctcctcctctgcttcactgtcccgggcccagcagttgccggcgcactcatgctccgaggcctgagccaaccggaggcgagacaagcacagggccctgcgcgcaacccggcacctaaggaggcctgcccggtgcagactctcctgctcccaccggcgcccttccctctagagacgctgagagaacgggagctagtagcgcccccacccaacgccacctcggagactccggctccttctctctcaacttcgaacaatacaaagtgtgctaggagaagacaagatggcgcccagcaggaggagcggagaaaggcaggggtgtaaatctggcttccaaactggaagcgtcaacaaaggcgtgggaggtctaaccgcgcaggcgtgcagcttcggcaagctttacaattccaacagcgcgtccaaaacgtggtccctgactgagacttattttacgccactagagtgagggtgggtagcgtcagaaagagcggggcacggggcgggccagcttcgccgcgggaaaagaacgggaggcggagtgtccgcagcgcgcacgcgcaacgaaagtcaatggcggtctggagagactggcggaagctagctttgcaatatggcggccgaggcggacggaccgcttaaacggctgctcgtgccgattcttttacctgagaaatgctacgaccaacttttcgttcagtgggacttgcttcacggtgagttttattcagcatccgatccaagtcctactcgagtgaccgtgggcccttagtccaagccttgatcggcgactaagtgacggcagtgactgccgccatgccgagctggacggaagtcacttctgagaagggcggaagtgtctcgggctccttagagggaggacaccatattagtgccagtggggaagtcaccgggtggaattacttctttgtggagtttgtgctgtagcgacaatgaaaaacgaagagtcaacttttataaaacaaaataaaaattaagtcaaatcatgccaacctttattagatcgctagcagggttaaacttaattcaaagcccctgatgaatcgggccttcattgcacccccaaaggctccgccaccctgattgctttctttccagcctccaggtttgctcatagtctgatttcggaataatttgcctcccttcctttttctgattgcgagacagctccacaagggtcaccgtcagaccgtttggggagcgtcagtctgcccctgtcagttcatggtacctctcttgagctcgtggggcactttgttttagccgcattcatgacccgtgagagtcagactcccactagaccaagttccttgaggggaaggcttcaaggctagagaagttgtggatggccagggcataaaagcaagccttgaaagggtaaggtttagtccctgagtaggggccagggacagtcagagtgttcaagaaagagtggtatggggcgggcacggtggctcacgcctgtaatcccagcactttgggaggccgaagcgggtggatcacctgaggtcaggcgttcgagaccagcctggccaatagggcgaaaccccgcctctactaaaaatacaaaaaattagccgggcgttgtggcaggcgcctgtaatcccagctactcgggaggctgaggcaggagaatcgcttaaacccgggagacagaggttacagtgagc

SEQ ID NO: 64279 - DNA, 2069 bp, Homo sapiens
taaacagaagggaacctcataagcttcctttcagagatccttttagagattatgactatgaagcttacatgcctcaagacgaagaaactatatgaatgacctgaaggtatctgaggtctaagtgagacctcaaatccattcctgagtagaatggtagagcagtgggtcttgagatcaaggtgtggtggggagagagacttgcgaaagatgccaccttatggctggctgggaagcaacttgactgatccaacccagggttcctgaggtcaaagatgccaaacgtcgtaaatggatctgaccatttctccttggcttgggaaccggaatataagatgaaagtggggtgagtgttccagagccagtaggcagaggcctctctgaggaagatgaaaggatcttttacgggacagagggccttcccaaagggaccgtgtggaagaaagacaattctccatgtgcttggatcgtggggaagatgtgattaaggtctaaggtatgtcttccaccagacaacggacacagtcaattagaagctgggtaaaggggtctctcctgcggagcggggagcgccaagccagggacaataatggcctgaagttcattctcccggagatgggggtagaagcaggtgcaggtgccttagaggggtcaaaaataagaggaacagggttcactctaagcggtctcccagggaaggctgcgggttggagcaagggtccaagattctaagggccaggactcagctccagaagctcgatcccgccccacgcgttcctgctccggccaggggagggggctaaggaccggcgtccccagtcggcgcgccgtctcaccttgtagaaggccccgttggagccgcgcacctcgacgggcagtcccggctccacatcccccccagaggccaggccgcccatggcgccgccaccgcctccgactcccccggcggcggctgcagcagcagtctgagtgcgggccgggccaggcccccggcgtctccccggaggaggagccggagggggagccgcggggggcgggagccgggccggccccacggcggccctgccacagccaacgagcagggggccggggccgggccgctccccgtccgccgccgccgccttggtctccgccaccgtgagggaaacggccgccgccgccgctgccttcgtcacctcagcttccgcccgccgccgcccccgctgctgcctcagtcccgggacccgctgctgccgctgccgctccacagcctccacctccccctgccaccgccgcctactgcgcaggcgcaccgggcacccgcccgctgcgcgcggggccccgagggccaccgcgcaggcgtcaaggttagagccccagctagcgccagctagcgcatcggggcttccacattccctttcactctctcactccccctcctggtcgcttgctagcgcttgcgcagaacaagattagccttctttcttcaccgctccaccgcccagccaccccgtctcttcctttccccgccccacaacactgagaaccaaccaatcagggggagggaggggccgggctcgctcagtccgattgggcggcgtccgcacagtcacacagcgctcaggccacacccactccgccgccgctggccccaccgggcttggacaagttagggatgggcatgcgcctgaacgactgcttggtcactttccccacctttgtctttcttggtgcgcacgctccaaaaagaaaaaaaaaagaagaggagtcgccgcaaggaaaaaggtgcttggtgcgcacgcgctgagctttaccctcttcgcgtatgcatcgccgatattttaagaatctgtaactctctactgtagtagatttaacagtcatggctcttaccttgaagagattgtgatacaatgaaagttttggccgggcgcggtggctcacgcctgtaatcccagcgctctgggaggccgaggcaggtggatcacctgaggtcctcggatcacctgaggtcaggggttcgagaccagcgtggccaaaatggtgaaacccacccccccccccaccccgcatctaataaaatacaaaaatta

SEQ ID NO: 64280 - DNA, 1838 bp, Homo sapiens
tgcctctccttgaaagcagaagaagtgccagccctcagcttccgtcagatcttgggctcctagggccttgtacaagtccatggccctctggttccagtccaggacggccaggcggaattgggagcagcccttatccaaggccacctgtgggagaagacaacactaacttttctggggtcaaaaaagaaaaaggttttctcactccctctttcaacccgggtcccccctccatatacccttgcttcttcaggtcctcacttgtcgccccacccatctcctcacctcagccacctttttgattattttggaaccaatcccttgacctgttgtggagagaaagaggcaaaaaatagctattgtttgagctgaaggggatcagaaaatgacaccggctgggctctggggacaggggataacagtggggtctgtggggtgctttgctcccaccccagcctcagcttctgcccagtaccccgatattccggcatcacatagatatcctccagataaatggtgcgtcccttccatgtactgtagatgaaatagtatatcccatagcccaccacgcagggccctgagagagagaaaaggggagtaaggcttctggaagcctgtggggagacctctgaggccggctggagaggtggacttctaagggccaggtgctcttacccagtagcttcccgggcgctggaagaatctctgctaccaaacagtgatagaaaggattgtctccaaagccatctgctctcagggctgccgagattggagttgtgacaaagagatagagaaagaggacgtgggtgtatgcccagcctggagctgtcgcctggggaacccatccctcatttcctccccagcctccgccagaacctgggcgctgagcccccaccttcttcactgatcttcacctgatccgagagtttttcgaattcggctagctcctaaggcgtgggtacggaagctagattagagcagaagggccccgctgctccccgagcaggttcccaaggcgagcccctccccctgcccccgcctcctacgaccccgctctggccgcgccactctgacccccgggttaccggcctgcagtcttcacccgaatcagcctcaggatatctccacagtctccctccttggcctctcggatccgcacggaagccatccggatccccgctgtctgggaccaaagtcccagggcctcgcaaacggcaactagaccccttaaagggcctacggacttggatcctgaagagcctgagagagcggggtggcgggagtcgggggggacggcggggtagccgcggcctggtaagtggagctgggattccggcgccgtacgggaggagagagtaggccagcgaggcgatcctctgtccgggcatagccccaccccctcgaattctgtcgcagcagggggcacaactgtcagccaatcagcttggagaacaggcacggccgcgtcccccccaagccccacccccgacagctggatcttgtgactgggctcctgggtagagttcaaggttggagtgaagcggcttccttgcggttgtgtgggtgtcccaacctgggtcgagataccccgcggttcaaaggctcccccgcagtgctttttaaattgacatatgcagtgataacctgctttagcctcaggctcactcacccgcccagaccctgggtaagccttaagaccctcagctctgaaagctgtttcctgcagctcttgagtagcatgaagtgttacctcttgggggcatttgcattttttaaatgttttatttttatatttatttatttatttatttttggagatggtgtattgctttgtcgcccag

SEQ ID NO: 64281 - DNA, 900 bp, Homo sapiens
ttgccggtaactacaccccaggggtggaaccctagccaagacttggtaaagcactgctgggtggctggccgtgggaatctaagtccacacttttagggagaagggaagggttgagagctgcaagggggaggccaaatgctcagaggggagtcaactgagggcagggaggtcgggactgcggctccgatgccctgatttctacatccccgtatcttatctctgtcacactccagctggttcctgccctggatggctgcctgcgccgggattcctggctggacaaacaggccgagatctcagcatctgcccccactagcctcagaagctgtgatgtagaatcaaatcccgggatatttctccctccagggactcaggcagaattcaatctccgaggtagatttcctcggagtctatttttcccaccctggccagctcagcctgcctctgtccccctctaccactggcccctttcctccttgagaccccagctttgaggcctcaggataatcatttctccccacagacattccccagcctcatgcagagccctgggccttctctttggacctgggactcaagcaggcagcaggctcaggccacctccttgctcttgggacaccagagaacccatcttggctcagtctccacctccaagatcaagtaaagggggacagtggggcattgcctgtattcagtggagcctggagcaatgagggaagaggggagtccaacatgtcaatattaggaaggtttccagcccagggaacataacaagactggctccacagaattgtttttcattaataattagccaggcatggtggtgcttgcctgtaatcccaggtgctggaggccaagaccagaggatcacttgaggccaggagtttgacaccagcctgg

SEQ ID NO: 64282 - DNA, 3853 bp, Homo sapiens
tcaaaaggccatcaaaaggacggatatacaatcgatggactatactaaatgaaaaggagcaaaatactgatatatacaacatgaacgaatgtcagacagtacattgaaggacagaagcccgacaaaaatgagcacataatgtatgattccccccttttttttgagacggagtttcgttcttgtcgcccaggctggagtgtagtggcacgatcttggctcactgcaacctctgcctcccgggttcaagcgattctcctgcctcaccctcccgaatagctgggattacaggcacccaccacgcccagctaatttttgtattttttagtagagacggggattcaccacgttggccacgctggtctggaactcctatcctcaagtaatccgcccgcctcggcctcccaaagtgcaggcgtgagccacagcgcccagcctgattccattctatatgaagttctccaacaggcaaaatggttatggagatcaaaataaaggtggggtcgggaatcgactgggaagagacgtgatgaaacgtttctgggacgatgaaaagggtctgtgacttggtaggcatcacggagcggttaggggccaaaactcatcttcctgtgcacttgctgtgtgcactggcgctgtgtgtaaatgccacctcgatttaggaaaaagatgacgtaagtacggcacaaagtggccggtacgcggcaggtgcatgggaagaaactgcggaatgaaacaaccgcgagctaagagatggggcagcgggagaaatgaattcgagttccgcctcctaccaggaagaaccggctcgggccggagggctgcacggaggaccacacggacgcctgcgggcccgccccttccgcttcacgacgttcagcctgcgtctggaactggaatggcctagcccaaagctagataacaggtagattgtttttccgacaaattatcaaacgacccatcattgcactctttcaaaatttgattctcagacgtacccattctttttttttttcctccgggaagatgagatatactcattcttgaaaatacctccgggcttgccttctgcacacttctttccctccctgtctcacgccatggtagcgtccgcctaggttgcaggcgacccgcggggtggggcacaccattcaaagaaggggagggattgaggtttgcatcaaaacaaatacccctgcctttgcaaaggccataactaagtaatccagaaaaagaaatgcaggcggagaatagcagcctccctctgccaagtaagaggaaccggcctaaaggacattttctctctctctcctcccctctcatcgggtgaatagtgagctgctccggcaaaaagaaaccggaaatgctgctgcaagaggcagaaatgtaaatgtggagccaaacaataacagggctgccgggcctctcagattgcgacggtcctcctcggcctggcgggcaaacccctggtttagcacttctcacttccacgactgacagccttcaattggattttctccatctagcggagccgggggctgcctggaaagatcgctccaggaaggacaaaggtccggaagttgtgggaccttagcagcttgggctccccggatcacccccaaatgatcatttcggaatggagccccagttttcactaggatgccatgggctctaaaatatacagctatgagttctcaatgtttcgagatccaaaagtctcagacctcaatgctttgtgcatcttttatttcagggattccctacgcccagcaccgggtggatgtgcaaagaagtacgctttaggccggctcaaggttccccaaagctccactcctctgcctaggcgttcaactttgagttcggatggtcctaacatccccatcatctacacccaggtctcccaacaatgcaactcctatgatgatccctctagccaagcttccatcccactcacccccaaactcgctaagtccccactgccccacccccagccccagcgattttcccgagctgaaaatacacggagccgagagcccgtgactcagagaggactcatcaagttcagtcaggagcttacccaatccagggaagcgtgtcaccgtcgtggaaagcacgctcccagcccgaacgcaaagtgtccccggagcccagcagctacctgctccctggacggtggctctagacttttgagaagctcaaaacttttagcgccagtcttgagcacatgggaggggaaaaccccaatcccatcaacccctgcgaggctcctggcacaaagctggacagtcgccatgacaagtaagggcaagtaatccgcctgccggaggaagcaaaggaaatggagttggggaggagggtgcagagtcaggattctcgccgacctggtgccgtagatactaacattttggggtggaaaattctgcaagccagagctgtgagggcagaattggtggaaatcattttggaggaatcctgcattgtgtcaaatatgaagggtggaaggaagaaagcttttgcgtttgctctcagctggatcctttcttctcatcagttaaaatgtcattttttaggaaggctttccgtaatatcacaccctaacgttttctcccagatactttatatcacaccatcttatttaatctccttcacaacccttatcactctgataagatttatttgttcattgctttcagtacatggaaacgtaagccttatgaggatatagaatttttctactatcttattcattgttgtattcctgagtgcctatatcagtgctgggtagcaagtaagagctcgataataaatattttttgaatgagggagacaggtctgaagcctggagaatgagatgcagaagaggtgcaagacctgctgcgccctctgcaggcggcgggggggcggtgcaggtgctttaagaattaccgcgggactcggtagggggagcgtaggcgcttctcgccaagatagaagcgttcagactacaactcccagcagccacgaggagccctagggcttgatgggaacgggaaaccttctaacctttcacgtcccggctccgcgggttccgtgggtcgcccgcgaaatctgatccgggatgcggcggcccaatcggaaggtggaccgaaatcccgcgacagcaagaggcccgtagcgacccgcggtgctaaggaacacagtgctttcaaaagaattggcgtccgctgttcgcctctcctcccgggagtcttctgcctactcccagaagaggagggaagcacaggtgggtttctttagctctgcgtcggatccctgagaacttcgaagccatcctggctgaggctaatctccgctgtgcttcctctgcagtatgaagactttggagactcaaccgttagctccggactgctgtccttcagaccaggacccagctccagcccatccttctccccacgcttccccgatgaataaaaatgcggactctgaactgatgccaccgcctcccgaaaggggggatccgccccggttgtccccagatcctgtggctggctcagctgtgtcccaggagctacgggagggggacccagtttctctctccactcccctggaaacagagtttggttcccctagtgagttgagtcctcgaatcgaggagcaagaactttctgaaaatacaagccttcctgcagaagaagcaaacgggagcctttctgaagaagaagcgaacgggccagagttggggtctggaaaagccatggaagatacctctggggaacccgctgcagaggacgagggagacacgtaagtggtgatggcagtggagtgtggagtctggggagatgaagtgtgaggtcgatctgtcctctggtcctgagac

SEQ ID NO: 64283 - DNA, 518 bp, Homo sapiens
ccagggagtccccgcctctcatcccccccaaaaaccagcgatgccttcgaaagccaatcctcagattcccaaaactccagttcccgtcttccctccctttccccgccccgcgccgcccccccgcaatcctagaccccaatccgaactaagaagggggaaggagcaggagggcaagggtgctccaggcccggtttttcccccggatccagctgcacccacggctgcctggaaatcctggaacgccttctacatcgcgaatatccctcgccggcctggcgcccggcgccatctgctggacccgttccggctggggcgcacagacctgggcgcggggtcgggcgattgggttctccctgccttttcaatgtcctgcggggcggtggctcactgtctctcgccccagcccttccagctgggtcctgacaccaggccccccgcacccttcggctcgccagatgtggctactttcctttagtcccggagccttcaagccctgggtccctgaggggtagacctgg

SEQ ID NO: 64284 - DNA, 6365 bp, Homo sapiens
catcccacacccgctcctgccctgctcctgccctgctctcccggaggctccaggggtctgacttctcctctcctttcccccaggcatgtactcctgcccctgctattactatcccaaccgggcaggcagctcagaccgagcctcctttgtcatcggcattgacctgcggtctggggccatgacacctgatcattggatcaagaggggcactgctctactcatgagcctggacagctgagacctcctcctcttctccgcttgagagagagggtcagggactccaggagctaagacagatgttgcacctaggactgaggccggacctcactcagactttgaccttggccgaatttgtgtgatgtggccctggagatacctagttgtgttagccataaaagtgaaagagttgtattggagctcagtgctgtaaaacacccgcgacaacaagccttaagtctctcaatgcaatggtgagggtctggggagggaggaagcccaggcctcacggaggacagagctactgcggagctgctactggacggggaaagaagcgagggaggtggggcggcctggagcggaacggaggcgtggccctgaacgaatgggcagggcggagccgcctgaagaggctgtggcttaagtctccgggcaggacttcagtgggtggggcggggcttaccttagaagggcgcgtgatccaaatgagtagggatttgtcaggcagggatcagggctgaaccccgtacactgcaccctgaggcccgcaccctgaagcccgcaccccgcacccggcatcctagccggcacccgccctgaggcgagcgggaccggcagaagacggggcggagccggagagggggactagagcgcgaggaggggcgggaccacaagggggcggggctggggagcgggggtgcgggtgtttgtgttggaaaatccaactgcgccactgggcggagcggcccccccagccccggcctgggagaagggggggccgctcgaccccctgggataccttggggagcctgaacacctgggaccccccccagaaccaggtaacggggagccgcgaggacgtctgtaaagagggaaaccctctccttgcagcagggcaggacgcctgagtctctggaggggtagagctggggatggacgtttgggtcttgggaagggcactgggaagaagactggggcggaggtcatgggtcccctagaagagagaacggcggggaaggaggaagaactgggaggcagatgtctcaggttccaaatgtccagaggggcctgaaaggactccccgttccccttgggctgggattccccttcccgactccagggcggggcggggcggggcgcggcggtccttactgaagggcaggactaaagggcagagtttgcagacaggtcaatgccatggcccagtaaggtcagatgtggtcagacttgggtgtgtcccggtcccaggactactttaagtctccctccagttctctgcacgggtgaggtgtagaagcctcagcctgaccttcccaccagcggccccgagagcttcccagcggtagccttcgccttcttcccaccacccccctgcgcctccctttcactccgtctcgccccgctagcctcctcatccctagtccttctcccactccgccgttcccgaaccctagcgcgccccgcacggcttctcggtgcggagccttcccaacgtagccacaagatggcgagggcgagacgcacccagggcaggtgggggatgtgaccgtgaaagtagctgaagccccccgccccggtccgagggaaaggtaggctgaggcccccacttgacttcctgtgatctgggccccctcacaggaaattgtgggcaggaggtcgcagcgcagaagacggggagggggctggggactcaatctccgcctctcccggctggggtaaatagtggggaggggggcacgcggggtggttgctaagcgacgtagattcgcttcctgtttgctgcagcttatgttgtgacactggtgggggttagagacagcggagggcctgaagactgtggggaaggccgagggcaggacgcctggttcccgggacaggaagagccctgggaggaaggcggggaggtagcgagctgcgccgcgaccgaaggggactcggtggttgtccggagggggttagggaccgaggcgcagcgttgacctcggctccccttccctcccctgggttgcttgtcctgttgccagagtaactggagggcgagacttgggagccggattcccgaactctcccgtccgcccaatccgctccagcggtcggccctgacgtcagggccctggcagccaatggggaagggggatgatagcgacaggaaagggagaggggaggggcagcggcggaggctgggaggcagcagctgcctgggacccgcacgtgcactcccacacgctcgcgcccaccccccgccctgcgccgcacgcgcccgagcacccccttgcgcctgcgcggcgagccgggcgcccccctcccctcgtggagtctgtgtaaagccgcctgaggctgcgctcttcagcccctggggacccacacgtctcggtcggtctgcaccgtttcgccggtcgcgaccataatgcccagcctggctcgggagggccgactacctgttccccacctccccccagctggcgccccacactcccaggtgggctgggcggagctgtggtttccggccccatctgctcggccgctgccttcccgggctctggcttaagttgctttcccaagagaaagcgagcgggtaccagcgccccttcccaaggcttctcccgcccgggcccagctgctgttggtggcggaggagggcactgcggggaagccccggacggcccaggtgattcttctgggccatcacgccccttcttcgcgtgaattcctgctctttgatgtgcaccaaaacccttcccattcctaacgtttcctcctcgttcgccccggcgttctttgcacctccctcggctcctttcgggctgtctgtccctgtctccactcgtccttcttcgcttctcccggttatataactcttcctctcgccgtgtcctggtttcaactccacagactccgccctggaacagcgcggggaggggcgggagagttggggacccagacagattccggctggcggccggctggggcacgggggatcctgcagatggaagacggagccccgcgggacccggtgcccccgtccccgcctgccggcccccaccgagatctcgcccaggagagagaaggcacagtatctccgaggggcgtgtcgggccgactcccgtcagaaatgtgggttgggaggtcagggctgcaggcggagaggaggagacaggcaagaggcctgagtccctgggattggagtcgtattaggggtaaaagagataaggacgcctgggtttcttcttatgtctcctttttgggttcccagaattcctaagggtgtttccagtgtttccaggaagcttagccagcacacccactccgccccgtaggggtcaaaggtctgtgttagaggtggcctgggatgatgtcactagtgcacgtgccccgggatggttgccaggcaatgaggcttcctcccccttctattccctcccacctctgccccgagtccagttccagtcccgtgccatctctttcccctctcccttcccgtggtcttagcatcctgcaggtgggaaaccccggcctggagttttgtgagggggaggggcacgggtgtggtgtggctgaaagactttgcccctttgctgggctgagggagccttgggtcacttttccctagattggcacagaagagcttcccctccaaggctccgcccccatagaaaaagctacctagccgtcattttactttcccacctgctgcatggccaagtgtcctattgcccccttccccagattgatttgaagtgggagtggttgaaagacggaagagttgtgtgtagtatgggggggggttcactacacaccagcttatccctgaaatccccataatggcacacccccatctgcaaacaatgaaaggaaaagggtcaagaaacagtattaggctgaaaagtcagggtctttattgtgtgtatgcgggtgaatcggtttgtagcctctcacttggtggagggggactcagttgattgctatggttgttcttctctattaagtcccagggttggtgatggtattggaatgaatcggtttgtgcttttatgtaccttagagcttgggctgtcagatcagacctggattctaattctagctctgtcacttagtggctactaggacttggagaggtcagaacctctctgagcctcgtatgttaatcttgaacatttaaatatcaacacctaccttgaaggccgctgggaggaaaaaaatgagataatttatgcaaatcacttagcacagtgcctggcacagaatgaacacagaatgagtgcttgttgttatgaaatacttttattattaaatggtgttagttactagtttattattattgctgtgggtctgctccaaaccagcggtaaccgtaggagtttgttaaggggtagtggatagtttgtgttaatttggagattggggttagggggctggggattagcttcaactgctttgtgcattttatttgatgaaggctttaggcagatttgtattgctttctttaggattatttttttttctcttggacaagaaatagctaagactattccgtgggccttgaaaataaaataattgtattatggttcttgattttgaagcaagaccccagccccctcccgtgttgatctctggagcctttcgttttgcagagggactccacagtttctctagtggggacagggctaggctgaggggtgtgtaaaaggttggggtgggtgggtggagagagactagtgctgggggctgggggggcgggtagttaaaggaagagaccggaagggaggaggagggagcctgctggtggggagggagggaggggaggaggaggtggaggaggaggaggaggaggagggagggggttggggagagcctgctacagttctttgtttgactccgggactcagggacggggaggaggagggagggaatagaagggggaggaagcccccccccccacacacacacaaacacacacaccccagctgttggacagatgaattacagcctccggcttggggccagggctggtgagggattaaagctctggggctggccctttaaatggctgttagcccctcccccactctgttgtccagacacccctcacacaccctctgaccccctaggcttccccctcactcctcctcttggtctgtcctaaagtctgcccactctgctctcgactagccctttcctagtccctccccccagcacaaccgcagaacacagatgccacagactatagatacacactctctgctcccaggttatgagcctccctgtcctggagagttctagcctgaagctcccttcccgagcagaagggccttgcctgcctgacctctaccacctacagctgaccactaccctggcttaggaaggaggccttggtgggtcacaaatagcacctccctgggggcagtgtcatcagcagccacagaagcttgcggaacattgcatcatggagactgggggctagaggcctgagtctctgaggcaaggggaaggatgggggccggaaggctagggaatatagagattagattgggaccccaagtgtttgggtccataagggcagagaactatgattaagggagcagaaaacataggtccctgaggagcgagtctgaggtgagggccaacttagctctgacccctgatggacacctgattcttggccttggacttatgctaaaagacctagcttcttgtctatgagggttgggaagggagtgggcctgtatcaccttcttaggccacataagaggaaggaggtgatggggaaacaggatattgccttggggttggcagggaggggaggcttgcagtggaggctacttccaggcttaggcccagagtcagagttcttgcaggggaggatggcccctccctgttgggcccgttcatctagtctggctacctgtgctgctagccaagacctgcctgcacccgcctgggggaagaagagggggcagagtccagagggtggggttgactgtctggtgtcttgataaggttggagaggacacagagctgaaggaagagggtctgcatgccctggtgctaggactcaggctggcttgtgtacagatgtcagggcagctggggcgactcaggccagggagtctcagcaggagcgtcctgtcagaagagggatcacgggtttg

SEQ ID NO: 64285 - DNA, 5792 bp, Homo sapiens
tcatgcccactcttcagaatggtccagtccaattctaagcaccccaccatgtggtgcttgagtggttcagccctcctggtttatggacctcccttctatctcctataaatggttcagccctgtacttcaccagcctctccactactaccaaaaaatcttttccccactatctccctagtgctacaactcagttgcttattgaaatgaagagggagtttgcaagctgaaaagtggatatgagctaccctggaggaattttttcttggtagggaaacagctttgtccctataggagttgttgaacaccctggcttttggagggtgttcagaatttatttggggagatagtggagatcactgccagccacagcagtcttggcatttcacctttccttccagatctctttcagtcccattctctccccactgcactatagcatttgcccccatacctaagtcttactcttctgcttccctctctccttctgtcagttctctgcctgaggccctgctttatttcccattcctttgtaggagaaaagggaagataatccctaagccaggggcttaagttctctctgtgttgttcttcctcattacatatggggtttctcgagtgggactgttttcttctatgtgtctctcactattttgcttgatgttttgcacattggggtgcatggtggatttgtgttgaataatgttaactgaatgagcttcattatgaagaacctatgacttctgagatttgctgcacagcctcctactttatcctctagaggacgtgagacattggggatggtaacatgggtagagctgaaaggaaggttgacccaggagatggcctgtgaggataaaaccaagggagggagagtaggacagaggcagtacataagagtggtaagaatgtggctctggaaagaagcctagctctttcattcttcacttgcagaatgactttggccaagtcacctagcctctctgggcctcaatttcctcatctgtaaaatgggggtaatcagagtacctcctatgtcaggttttggggaggagtaaaagaaatgcttgtaaaatacttaatacagtgcctggcatgtaacaaatattcacaaaatgctagcagttatcaccacagtgggagccacagggagctctgaggataagcagggatgtcgagggatgggacagaacttgattgaaggcagacagacctccaaattcttgactcagacagaatgatcactgatccagcgagacgtcaggatcgagaggagtgtagcaaggagtcaggagggtgggcctgcgccagtgtcgccccgactctgttcagtaacatgaaggcaaacacagaagggcatgtgcggagacacacgtgatcacgctagtgatgcagaggcagacccagacaaaagaccgagacaggagctaggcagacacacagacagagacagccccgcggagtcatgtagacagggataatgacaggaacgcgtcagacacaggcacagagggagacaagatgagcagatatgcaggtgcacgcggagacagacaccgggacccacgcacagccgaccgtgtcagacagactggtgaacacagcgcccagtcagaggcagacacaaggcctgcagtgacacatagcgggccggggccggcaccgtcactcctcggtggggggcggggaggggccggcagccgggggaaggctggggaagggaatcccgggcgggcggcctgcccgggtggctgagtcacagcggagcctcagccggcggccctcccctccgcctccccctcccccaggtaagaagcgagcgtgtaacccctcgcttccaccaggcgtgatgaggacgggcagggagcgggttgcgacgagggtcctggaccgccccacctcggcgcgcgcgcagcatgcccgctgattgccggctaggtaaaaccctatctgcgggctcttgtctctggccgtcacgtgagtttgcgtgcgcacttcaggcctcttaccacgcgtcccgcgcggctgcggcgctgcgcggaggggctcctcggctcaagcccagagagagttaagtgggtgtgattgatggagtgttctctcttggggctccagcgggggcggggggtagggggtcggttaaagtcccgagtccagggcccggatggagggggcggagctgggcttcgccgggagtgcccggatggagagggtgtggcctcggcgggagcggaattaaccctttcagagccgctggctcccgaggttgtgggtcgggtcgggagaggctggaatgtctgcctcagaagtatatcgatctcccagcctggctctggccgcgtgcgtctacctctcgcctgtcttcgaggagtctgtgggtgtcagtctttgtgcctgtccgtggttcccttcccttggttagtatagacaccgggagtcagggagggctattcttgccccagagcgagagtggaggtgagagtggagcgcgagctggcggcgactggggaacaggtgcaagcgccgcgtcggggctgcccggcacggggaggggccatcgtgggggaagacgagaggggaaattccgcgggaccggtggtgagccggtgtgtgggctgaggagttgtgtctgcctctgactgtgtgtctgtgtgtgttcagggaggcgggggctgagtcagtgggaagaggggaaggttttctgggtgactcacgctcccccaccccaagcctgaatcagaccccgagggagggctttgtacggggggcgggggggcgagtgaggagtccagcgcctgggtcccgggtgcggacaaggatccgaggtggctggcgagaatgagtgtgtgtttagtgtacaggaagttttgtcttcaagtgagggctttgtattcttgggtgctggcgtggggctttgtggataaaggtggaagagcagggagctggagggacggcactcactgacttagggaaagctgagtcagttccccgtgggaaaggggaagtggcagaggggaagtgtcatcatcgccgaaggggaagctgcctttcctggtaactggcggcgctctcgggaccacttcccaagcaggcatctgcccctctgttgtctggttccccggctccccctccacgtctggttcttgggtctcctccccgcccctgcctcggtactcgggtgggggcagtcacggagggccatacttgaccacagttcagcgccgtacctggcttggttactgatggaaaggatgctgcctctagtgaggagagagttctgacagtaataccacgtgaaccgcggagagggtccgcggggcccaagcgaccacaagggcttggcggagagtggcacgcagggacctgtagggtccaagcgcttccatgcaaacaaacgaccttgccccttcgggaaggaaggctcttttcaccagaaacccgtctgcccttgtgggctgggtggaaatttccccacagcgcagacttctctcaacgaacgcgaactttccagccacccccagcccctcgtcgcgcactctcccccggcttcctgcccggcgctcgctccagctggagcgctggccccgcccccgcggctttgtactcgacactcgcctctcgctgctctttgtactctagactctcaatggaccgatcccgggagccgagtcggctccctacctgcggggacgccgggtaggcaaggaggaggcgcggggacgcagctcctgggctcagagaggcgagaaggaagagctggggctaaagggaaggtgcccaagagaggggagcgctgtgccagtcgggggtccagtcggcaccaaagcgaaagggtggggggggcgtgaaggaggaagtgaaacgagttctgggttctttaagggagtgggtggtgagagtgggacaagggtgatgtcactgcctgtcgggccccgccctcctccctccctcaggacccccccccccgcagtacatttacacacaccgcttccgctgcgcaagtagccacgtcacgggcaacccccgaaatcccccctcccttggggggcgggggccacgtgggccgtggggaaccgcgtggccccggcggggaagggcagagaggatacgcgagccacgagagaggggccactcgggaccgcggtgcgcgacttctcggaagttgggggactaaaaggggtctgattttgggggtcggtcggtattgaagacccagaaagccaggggaagtagaggacctggaggaactgggtatgagactgggggcttgaccaaggtttgggtcggggtcaggcgttgggggtggagcgccgatagcggcgcggacgggtttgggtgccgtggaagtcgctgtggctggccagccctaagcagttaataggggcgctcggggtagggaggtctgtcactgggcgaggtgaagtgaggaaggggagggacgtcttttttgcgttctgcatccgtctgtcgtccgtcggtcttacggtggccgggcgtggggctactcgagcagcctggccgtggccaccggcggctctgggtgcttgaggcttgcgggtagcgccggcccccacgccggccggagcatgcgactaaccggcctcatccgcatgcgtcttgtcctggctgccttctggccctgacggccggagtgtcggatcctagatggggaccctaggtgggagccgcggggtcacatcggggtcaccccgggctgagctcgtctgaccggctcccgcgcccctcctcccccggccaccgctgccgggctcacctcgctcccattggttccggccaggctgttactgaggcggagacacgggtgatgattggctttctggggagagaggaagtcctgtgattggccagatctctggagcttgccgacgcggtgtgaggacgctcccacggaggccgggtaagcggccgctgcgttttgggtcggcccagtggctccggactggaagcctggcagcgcagccaccccgtccctctgaccggccttttggttccctgccacacacgtcctgactcccagccacactcctgggcctctagggagtggttgggccgggcctccctttggggaaagctaaggccgggccctttgcacaaatgacaaattggtggatgccacagtccgcccatcccagcccctgggccttgactgtgtgctggccagctcgtctcactccttttccttctctctagaattggctgtgaaaggactgaggcagccatctgggggtagcgggcactcttatcagagcggctggagccggaccatcgtcccagagagctggggcagggggccgtgcccaatctccagggctcctggggccactgctgacctggtaagggaaactctggggccgagctggctggatgtacactggcagctctggttttgcctccagtaagagcataatttcttatccccaactcaggctggatgcatcgggcagtggaccctccaggggcccgcgctgcacgggaagcctttgcccttgggggcctgagctgtgctggggcctggagctcctgcccgcctcatccccctcctcgtagcgcatggctgcctggaggcaggtgagaagttggggccctctgtctccaggcacacctctttccatctctgtatccctcaatctgtgtcattctccatgggttcctgtcattctgtgggcttccgtgcatcagccccctcctgcctaggtaggacaagactgctcctttttgccgtatataacagactccttctctctccagatgctcagccagcattgggcagcccc

SEQ ID NO: 64286 - DNA, 2830 bp, Homo sapiens
gcacaagtactatcacccctgccctgtgccgaggaacaggaaacatgtgccagggctacaaatgagcagagaggagcatccttgagccccctggccttatcgcttttgtccgttcttcctggccagacctcagagatctgttcctgaccccaggcacctccccctcaatagagtggaggggcccagcctcggccgcctgccgctgctccccttggggacctgagcccgttctctgaccccagcttagaggaactcggtgttgccaggccggggtgggaaacaatgggccttccggagcaggatgacaccccctcccgccacaattctggagcagcagccgtgggagggaagatgcaggggcccaccctggggcctgttggtccgtcattcagccctgccccccatctctacccctgaacttgagagaacctttggcacccctggacatcttggttgggagaggagggttgagggtgctcccgacttcagatgagccctttcctctagggatggggtgtgctatcctgcaccggcatcccagctacacacagacacaggcccattcggtcataagtttaatgaagtctgaaaggtaagcgccatcgtggtcagagatacggaggcccggtcagactctccctctgcacctcaatggaaacgatgtggtgtccgggtaccatggccaggcccagcacacggggctccccggcagagaaggaatctggaaagaaggatcagagcatcaggaaagtaggccagaatcagtcccgcccctctgagccacgaaaacgagccccagaaaacaagggttgcagccaggcccttaaggggaaatgccttgcgtaaggttccgccacattaccaggcgggtgtgcattccccgggcactgacccgacggcttgaggaactcctgcgccgagcccaggatgacattgcagtcacggtcagtgcagaggaagcagccgaccagtgtccgtccatctgtcatgcgaatgcgcatagtcttgttgagcagcgcctctagctgctgtcgggcgcgctcagccgccgagtcctcgcgctctccgtccgaatcctgcgcggggtgtaacaagcgctcagaccgcgcagcccaggctgcccgcccgcggaaccacagctcccggcagcccgcggggcactcacacaaagcccagaggctgccgggagctgcagttccccaccccctccatcttgctgcttgactgcccctcagtcccagaaccagagcccgtgctaaccccagcactggagctgctctgacgccgactgcaacagccattctcttctcgtagcagcatggtcggtccagctccggccatttgcccggaggcctcctctgggcctttcaacttcctaagcacctttcaggttgggtggtccgagatctcgcgagcgctcccgacctctttcctttcgcgagatcccctctcctccccctcctagtctcctcggcaacggcacagatctcgcgagcttctcctacttctctagcgctgtggctcactgaagcgtactacgccggatgtcttaagatatcgcgagacctttacctctggtttcttacacatcctttagaaactggaatttagcgagaatacattctttcatactgcctcctcccttgtttttctgtctcagagagatagtctgtcctaaatatcccatgtagcccaggccactgaattaaaacggagcgtattcgttctctgccccaccccgcaactcctgaaagcggcgcaactcaattacttgatccttatatgccccacgcgggactcatactacgtttcccgtgaacacgtgcagtccaaaccccgcccctgatatttatctcagtggacggtggccggaaaaggacaatggtttccatgtcagcggataaacgctctcccctcggctcccggacgcgacggaggtcgtagtagtagtgagtacgtgctgaggagcaaaggagtaaccaagagatccagtgaccgacagagcaagagccatgccgcgccggggcctggtggctgggccagacttggagtattttcagcgtcgctatttcacgccggcggaggtggcccaacataacaggcccgaagacctctgggtatcttacctgggacgcgtgtacgacctaacgtcattggcacaggaatacaagggtaagggccacacgttgggccggggccggagtgtgtgtgtgtgcacgcgcgcgtttgcctggttctcgaagggctggcattgacagtggctgtgctgctcttttcaagggaacctgctgctgaaacccatcgtggaagttgcaggccaggatatcagccactggtttgatccaaagaccagagacgtgagttatgctggaacctgggattgtgggtagaggaaatggagagcggggatgggaaggaaaggcggaggctagccagagcctaatggctgctctgacaccctcgccccaaaccctcctttaaagatccgcaagcacatagatccgctgaccggctgcctgaggtactgcaccccgcggggccgctttgtgcacgttccgcctcagctgccctgttcggactgggccaacgattttgggaagccctggtggcaggggtcgtattatgaggtggggcggctgtctgccaagacccggagcatccgcatcattaacacgctcacgtcgcaggagcacacactggaggtgagaactggtgacaaggagcaggttagaaggaatggggaatcccagcaaatctccaggccgatcttcagggcaacattttttccataaccggtgggagtgtattttctgtcctttacattgaggca

SEQ ID NO: 64287 - DNA, 1201 bp, Homo sapiens
ccctctgagggacgaggaggaggaggaggaggagatggtggtgtcggaggaggaagaagaggaggaagaagagggcgacgaggaggaggaggaggaggtggaggcggccgacgaggacgatgaggaggacgacgacgagggagtactcgggcgcgggccgggccacgaccggggccgcgaccgccacagcccccccggctgccacctcttcccgccgccgccgccgccgccgccaccgctgcccccgccgccgccgcccccgccgccaggtaagcgcccgccccgactccccccccaagcccgagtgggagccgcgggcgcgcgaagccgggcgggggcgaggcacccaccgcgcggccgagccgaggcgaatccggagcgcgaatccggggctcgggcccgtggccccgcggcggtccgggaggtcggggcgggcggtggcggctgcgaccgcggggccaggcctcctcccctcccccgccgcacccctcccccgccgccgccgccgccgccgccgccgccgccgccgccaccccggctggagagcgctgggcgcgagctgcgcgcgcggaccgggccactcggtcgcggctttcgggggaggaggaggaggaggttttttttttaccctcggcggggagggggtaggcaggaaacggccaaggcgaagccagggccccctccctggccgagcgagggaccgccgagaccctggcggccggacggcggcgtgggggaggggcacgtgggggaggggcggccgcgcgagcgcccctcgggctctggccccggtggggttggaccgagggagagtggggtttccccgcacggagcagccgacgggcctgccccctccgctcaggacttggacaggcagagtggggacggtgtccatcggacccccctccacccgcggagacttaggtgcccgccaactgaggggcatgcggtggcacgcgagggaggggtcttgtgaatgtttgtgggctgctgatgagtaggggcaggtggtggccacagtccacgcagaccacttcctggaataaggcaggagctcgtcccctcgctcccccagcctgtgcagggacagcagtccattcggattggggagcggagagaagagtgtctggggaaccagatacccccggctccacccccttcatctcgccggggctctgggctcttttgtgtcaagtgcggt

SEQ ID NO: 64288 - DNA, 1110 bp, Homo sapiens
gtcccagctaagaaaacagtctgtcttcttcccacggtaacgtaggctttgtttatatcatcccttggccactccatcctgaaaatgtaagactggcacagtcagtagatgggggcgagttcgtctaggagcctccccaactcagcatcaacacctcccagggcgttccctcctgccttcggctcatctctctcatcacatgccaatcctgggatctgagagagagtagtcttgacatcagcccccgcgaggctgcagctcccaccttccttcggctgtagcttccgagttcctcggttacaacgtgcaacgggtcaggtggccaatgtccttgatctccgcacagtagagcactgggggaaagaagaagggttagtggcagcaggagcatgccaacgaacctcggtattcctcggcgctctctcccctgcatcctccccgggcagcccctcaccgttgctaggcagcggacgccgccagcgccgcgcaggccccaggaccctgtcccagagccgccggagcgcgcgccacccagcactcctaggccccgcccccttctcgctctccccttcttcctccgcctctccgtcagcgtcgctgctttccttggccgggttcccagcctcatctcgttcgcacttggcccgcgctttttcctccaatcgcgaccacaagtccgagtcaagagccatctccgtgaggccgccgcgagggagctgcgagggcgcgcggcagaaggggcacgtgaccacgcggcgcaggcgcaccacgcgcgcggccgccccgccgccgtccccgcgcgccgccagctcgcggaggcaggcggtgcagatcgtgtggccgcagcgggcgcgcgccgttccgggcaggcggcggggcgcgcggcacccgaggttgaaaggacggtagcagatgttgcagtccagctcgccccgctccggaagagagggtaccctcaccaagagctgcatcgtgcccgccgcggactcgaggacgtcgctaacgcggccagctccgtgaacagaacgagcacactctcctggggccgggtcgggtcctggggccggcgccgcggcctctttcccctttaaataggggaataagtgaggc

SEQ ID NO: 64289 - DNA, 1460 bp, Homo sapiens
atccttcctgcagagatgaggagggtgttaaagaatgggagcagaatctctcccaaagagacacttctgatccccgcaaacatcgactccctctttatctaaacatatcctttgtagaagcctggttgagtaaagacatcgcccatcgtcacccctcaatttagcccccaccaacttctctactttcagaccctccccacccccactcctgccagctccagcactctcgctccggactcagcctctcttaagtaccctttcccccctctggaggccaatgctccttccacttcagaaagtttcccccatccccaaattcccaaggctagccctcctcccaacatcttctctgactccgcgtacatgtctagcggggacatcttgctgacaaacgagcggatagagaagagcatcccgtacatcagcttatactcctggagggagaggggcagagttagctctcggttgatgcgggagatggggtggggggtgggaacgagctggggtttggagaggaggggctgggttgggactataggtgtttggagatgagaggtcgcccgggctgcaccggggccctctcgtcacctcctccttgggaatccctgcttgcttcttgcggtgccattcgctgtagtgcagacacactccattccggtcaaacaggtacaggttgtggacagtcatctgcagggcagggagtgtgagcctcgctccggggccgcccccactccttgggctcgggttcccggacccacagccttccaaccaggtggggaccccacccacggactcaccggaactgctccgagtgcccgtcaagagttacttccggtttccacggagctccgccccttaggggggttctcgctcggccgcggctgggcattaactccgctccagtgctgcttgtcagactccgcctccctccctcagccaatctgtggccaccggagccgcgcacgcgcggccaggcgctcgggatacagaagtgatgtgagtgtctgcgagcgtggtctcgcgggcgggtgacgtcatcgaggcgagagaggcggagccgtggacagtgggcgggaggctgccaacggttttgagcgtagggggaggcgtgagagggggatctcaggggaggaggtcaatcgcttgccccccactttggcaaattggggactgaggactggaagggtggagagtaggcggaaccaggtggtcgtcggggcagaggatctcgggctaggcttgagggcggcgtgcttcttagggacgacttagggcgtgactgagggttcacaaggtttcttttggggtggtcgggagggagagattctagggaacaaggaagctcgctatggctttcttgccaggaggggtcgaagggaaagtacaagggagctggagctgaccctgggtagaacgggtgaagggatgggggagcgtgaggttccgccctctcttgagac

SEQ ID NO: 64290 - DNA, 701 bp, Homo sapiens
aaaggtctccccagtagagctccgcccagccccagctctaagcagcgggccccgggcatcagggtttcagggctgaggaatgtccagcgccgcccgatcgcgcctcgcttcctccatcactaaaccaccgggggactgactgcccgaggctggtgcagaagcgggtgcggaagcgggagagggaacgcgcgtggcgctccagccgccaccccaaccctgccacttccgcagctgcccgggcgccgctgcacccggaccactctgcggtctacccgctgcggccagaagaagagagactccggggagggtggccctgccgcaccctggccttcacagagcagggggcggaagagcccaggtgccctcggtgcctgcgcaacctgagccccggccgcctcgcgccttatccttggggctccccctggcggctaagccggtccctgcagggaaacgtgcccgttgtctcatctgcatccacttagcaccaagacggggtagctgagggggtcggcggaagaggagaggggaggcagcaaaagatgatccatgcggacgaccagggagcccacaccagcctccaagcgcgtcagcctccagctccactccccagggtgaagagtcaacggacaatcaccccgaagtaaggccctaccgcctcctgaaaaaggtggttaaagaagggcaatccgctaaagaataga

SEQ ID NO: 64291 - DNA, 1521 bp, Homo sapiens
tagtgggcagacgcggcttcaacaagcccatccccaaaccgcctgacctgcaaccggggtgaggggccggcctccgcggcagggcgagggacgagggacccctgcctcctgctctgtgtctgaccccccgcgcgcgaggcagcgatgacgtgggccctgccctcccacgccccattccccttccctgaggccaccgccccctccttgcaggtccagcaaccacggcatcagcctgcaggagatcccacccgagcggcgacggaagctggagaaggcgcggccgggccagttctcttgagaagtgaggcccggccccggacaggtactgccccctcagccccaaccccagctgccgcgtcccctctgctgcctgcagaacgtcccacccaagccaggtgtcccgatccctttctgacttagagagcccaggctggttcctaaaccccggggcttcccctgggagggaagcagccattgcaggaattttggttcagtagatctggagtggtttggaaatccaggcttaggaaactccgtaatcggggccttctgtggcccctcccctggccctatctcatccccagtgcataaacctggcttccgcagaagcctcacaggctgtgcactgcacaagagacaactctagggggcagcagtcaccagagaacaatgtgaaagcagaagccgtgcccactcccctcctgcaagaaactgacccgtgacccgctccttcctaggtgaacccccatgacccctttcctcgactcccctctgagatacccctcttttcttcaggattgttctggaaggtccttttcctgaaagttgctgctataggtgactggaagtctgtctaatgctggtggactctgcccagctctgcctcaaaggattttgggccttttacaagagctggttgcaaaaccagccatgtgaccttgggaaagtgtcacgcatgctctgctgtgatcccttcagtggcaaaatggggggtggcctaagtggttcccaaggcccctgtgcacctgacagctgggtggcttgtggccctcacccccaggagccctgagtccagcaggggatgtgagggtcagggattctccgcttcccagtgtctctcagggacccaggaaggaggatctgggattgatgcccgaccccagaggaagtggagttctgttccaccagagcagggtttgtcacatggcctgagggggcaagggctcctgtttagcctcaagcttcattcctatctccatctcccaccagtcagaaactggctgcttctcctgtgggtataatcagggaacttgcccaagtgcagagaaaagcttgcttcaatgctttgaggaaaggaaattgtgccacaccttgactgaccagaacatccaaagagcggcattctctgtttaactaggagctgctgagcaagcagttggacagaaaatcctctctgcttagaattttttctttttttttgagtctcactttgtcacccaggctggagtgcagtgcagtgac

SEQ ID NO: 64292 - DNA, 585 bp, Homo sapiens
tggggaacccccaccccagagttcacagatctagtgggagaagagaaggcaaaagatgaagcctcagcctcctctctgtgcctcagcctctcctttctctgttcctgcctccctttctgctctattctcctgtctttgtgtccccacagtcccctttctgcctggcagtctctgtctgcctttctctgcagtttccaccatttctctggaaatcttatttcctggacccagtcggttatccagtctcagggctctgctgactcaagtcctccccaccctgttcctgtggcctgggcaactcccagcgcatgagagcaccggggcctggcttggtcactgggcatcccccaccttcagatgtgtttacactacctctgccagctggcctgcgccaggagcccacacttgcggttgtccttgccttggagatggctctgtagctggcagagcagtgatggccaaagcagggacctctcatagctgctgcttcaatcccacggcagagactctacagcgtgtcccggggctcacctggcgccttttttttttttttttttttttttgtgcttctccttagggtctggg

SEQ ID NO: 64293 - DNA, 426 bp, Homo sapiens
tcaggaggctgaggcaagataatcgcttgaacccaggaggcagaggttgcagtgagccaaaatcgtgccactgcactccagcctgggtgacagagagagattccatcttaaaacaaaaacaaaaaaagaaacaaacaaaaatccaaaataccttatcactaatatcctcagagaaacaaggtcaaatatcgcaagcatgaaacacaaacagattactaataaaacaaatatacacaggctggacatggtggcccatgtctatattcccagctactcaggagggtgaggtaggaaggtcacttgagtctagcagttcaaggccagcatgggcaacatagcaagaccccaccagtgaaaaaaatatgataggaggaataatagctcaataggactagaggagaaagttgagaaaatctactagaaaac

SEQ ID NO: 64294 - DNA, 822 bp, Homo sapiens
catgtaatggagttggtggaatcatgcataaggctatgataatggttcaagccacgacagagttaaaagtgggaggtccaattaaaaacttttcaggcaattgttacaattgtgggcaatttggacacacaaaaaaggaacgtaagaacaaatcgaacaaacaggcaagatataatcaaataaaagaaccacctggcttatgtcccaggtgccagaagggtaaacattgggctaatcagtgtcacttcaaatttgacaaaaatggccaaccgttacaaccgcagtcgggaaacaggaagaggggccagcctcaggccccgctccaaacgggggcattctcactccagcagttggtccctcagtcggtcattgcctctagtccaaccaccatcattgtctcttgcccaaccaccacagtaacacaattggcgccagctacagcagggagtacaggcttagatttatgtttcccaaaagctatctctctgcttccagggaaatcccctcaaaaagtccccactggagtatttggccctttacctgatggacagttggacttgttttaggaacatctagtctaaacttaaaaggagttcagattcatactgggctgattgattcagattttgtgggagaaattcaattggttattagttccagtattccttggagtgcaaacccaggagatagaattgctcagctgttgttattaccttatgtaatagtagaaaaaagtacagtaaaaagagaaagtggttttggcagtactgacagtgaaggaaaagcagcctattgagtaaatcaagcttctaaaaacagacc

SEQ ID NO: 64295 - DNA, 3965 bp, Homo sapiens
ggttgcagtgacctgagatcacaccactgccctccagcctgggcaacaagagcaaaactccatctcaaaaagaaaagaaaaaggtgcccgagcacagtgggcactgcatttcactagcttcctaggccggctgggaactcttgtggaggccacctggggctggcagaggcaggcagatcccctcgataagaggaaacccaggctcagagaggggaagcgacttgcccaaagcccacggtcaattatgggaggagtttaggagccaggggaagtccctctactccctgtccaacgctccttcctctccacagtcctgcctggatggagttcatcatctccaggaaagacagggacctcaatagggaaggtgaggaggtcagggccggtatcctgagttcagcaggatctcaagagtccaggaggaatactcctcccgcctgcggcccctgcccctctgaggtcgcgcttccctgtctcctttgtactcaccgatccaggggcgaagtccctgcccattcgatctagccgctgcttggggctttcaccacacgtgcccaccagtgtgacagagatgttgtccagtgtgccggccctcaggtagggaccagtggtcacacacaggcggtacactgccatgatgggaaggaggaagggatgccccggcaacgctggccgcagcagcagccggcctggaggagaagagcggcacgccggacagggctgggtttctgggcggagggctaggggctgcggggctgggtagggctgaggatgggcccagctctctctgggatgttcctgggctttctctctccgaagctccctgctggcggctcgggcttcctctctccgcccacagtcttgcactctaatacttgtttgcttgcctctgacacagccggtccctctggctggctcacccagatggatatcaggagcctgggttccactgcggagggagggatcagatgctgagatggagaaaaggaggtaacgcctgtataattgggacactgccctccgcctggtcagcggcccggactgatgccctggagtgcttgtccgcccactccccaatgtcccccaagatctgttcctccccattcccaggcagagatgagcacagggcacctgcattcctacgtgtgaatcatccgtgtgaatcactaaacagtggagagttgcacttggtcataaatcacacgtgactgcagccacacgcaggtgagtcgcacacgcattccagcacatgtcaaatggtcaggaacagctccctgtcaccccatacaccgatccccccacgcatggccctctttgtccccagcctttggcacgcccgacctcattctctgctctggagtagggcaggtcaggaaagcgaaatacagcgccggcaaacagggtctgaatgccccgcgtggcattctttccgctccaggaccgccctgggcctgcaggatcctgggcgggagcccaggtgtccgggatctgggccactagggactggggaggaacctctcagagaagcccatagcccgcagcggccccgcgcggccggttccggcgccgcactgttccagcctctactatggtacagtccctgcgtcgcagcctcggcgggggctctaagaacgggaggcagaaaaagctcaatcagcagcaggcgagcttcacccgctgcttccaaatctgtgccaaaatattctatgctgcacagataaaatcctctgtcggttctacaagcctggcttttcctatagagaaccctcttataagcaaaaagtaaagctctcgtgaagagcccggatagctcagtcggtagagcatcagacttttaatctgagggtccagggttcaagtccctgttcgggcggcatgtctttgcttttgggtaccgcacttcgcataaaatggtaacaaaaatagttactagtttttaaagctaggtgatacagaaacttgatttccacaaaatacagcaaacgacggtggagggtaataaacatactttaaaacagtacaaacgcgagccgtattatcgaatttacattttctggtagccacattacaaagaataaaaagcaagcgaaattaatttcacggatctattttacttaccctaatataccaaaatcttattttaacatataatcaacattctaaaaatattaatgaaattttaagtctttttgtttgtacaaagccttccttcaaaagaagatgtgtatttagaagctggcaatacatctgaattcatatatttcaagtgctcgataacggtgtctaccatatccaacagcagactttgttttgttttcgttttaagtgacgggtgtggaagacacgcaaaatagaatgtccagtaatgtacacaatcttgaaagacaccacgagggaggttccatggtgtaatggttagcactctggactctgaatccagcgatccgagttcaaatctcggtggaaccttgaagcttttcttttaatatcagcatgttgaatattgttaattgattttcacagaggggatactcctatgacccaagataatacgacaaaaaaaaaaagtaaactaggacactaccaattatttgtgcttttcctaccggataattgagtcctataacacagtgttaagagaacgtacaataaattatttaaatatgttggaagttgagctaacatttgaaaacatgttaaaatagagatgttatgaagaaacgaaataatagagatgttatgaagaaacgaaatattgcttcagcagttaccatcaggtcttagcttctgggatggatgcaggcctatgatctctctggaagaccaaacacggaagatgatggtgaaaccattaccaggggaattcgtaaaattactttctgcatgtaaataggtgtaacctcacagaactgttaacagaactgtagcaggtgcgtaatccaccagaaaaactccagcctggcagcggtgggattcgaacccacgcctccgaagagactggagcctaaatccagcgccttagaccgctcggccacgctacctgcacgaaaacttactgtccccgttgtcctcctaagagactagaagtaaggaatggggcaaatcttaagagtgccaaattgattcgtctccttttccacatcttttagactggaaatgaagaaccatcgagactgtggaccgcatagcagcagatggcagaacagataaacgagaagagacaaaaacacacagaaatttacaacaaaactagtttatttgggtgggactatatctgggagtggggagcgcctgagccggaaacaccccccaagcgggcagccggagctctgcactcgctcgctcagccattttcggttgctctccctccctgttttttcgacccatgtgcgccctctctctcacctggctaacatgctttgcgcccgctacctctacctggcttggcctctgagatccaaaccgcgccctcctggcatgtcccgcccaagtcccttagccccgctccccaaccctgccccattcccactctagtacccgtaagctacaagacgccgccgttcgtcgggtggctctgtggcgcaatggatagcgcattggacttctagtgacgaatagagcaattcaaaggttgtgggttcgaatcccaccagagtcgattttatttcaatttttcctttttatccgtttttttcttaaaggcccccatcccttctccccctaccctatctctctctttccacctggtttcaatttcgatctcagttcccgctctgctctcttctttacttacctgtctgccccggggcttgggccatggagagcaggactgagggtgggagacagaagggaagggaaagtgggcgtggacgtcgagataaaggcaggcccctggctcggggacacacggggatttaataaccactttattccatgcactagggactcgggaagggactgggact

SEQ ID NO: 64296 - DNA, 701 bp, Homo sapiens
gtgtccccatcagcccccgccgcccccctccttgggaacctgggctcgggctgaatttttctcacctgcacgcgaggctgggggcccccggctgttcgcacccgggtgtggggccgcccctggccatatggggcggctttatggcccggtggccggatccggacgagaggaaggatgacttggcgctccacccacggcaaccattcgggaccacttccctggcctacaccgttgcctgtccgggtccgcctcaacctcttacaatctcagataggatccccgcagaatctttaagccgcgcattggtggttcagtggtagaattctcgcctgccacgcgggaggcccgggttcgattcccggccaatgcacgagtacagttttcttttctcccctccaaaaaaaggataatatatttggtagcatttctaagaaacatcttcacttaaatatttctaccaaatattaatcttaaccttttgactatagcagagtttgcagccccaggcctaaacgattccgcacgccctcgcactcccctcctcccagcatgggggtcctgcagcctccacacccccctccctccgtccccggcccgcacctccgcaggcgtgaccctgagaaaggacacagtgctcggatctcggccccccgcgggggaagggccaggtctccccgccccccactctacatcccttgttc

SEQ ID NO: 64297 - DNA, 6644 bp, Homo sapiens
ttctccggggccttccttcacatcccctgccaccatggcctgagcagtcaatgagaaccacggctgtagacaaaaacctggacacttcccattcccaagttcccattaggtgtccactctgcctgggcctccaaggcctcggagcaggaggtgagctggtcgcctcctatatttaggcctccaggctaattttatccgggggcggtgccacccccgctgcacatgcgcgccgacgtgcgcggccccaccacgcgcttccgccgccgccacggtcgccagggaaaccgacgtcagctgctgagctcagcggttgctggagggaccacaggagggcgggaggagcgacccctcccccatttcccggcggaagtgggggaacggcccactctcacactggtgggcgcggccgggggggtcacgcatcccttacatatccccagtcccaggatggctcggtggccgtaagaagtgggacggcctattaggatcccagggttggtcctggcttccccaggacgaagcacaacggccactgccctcggcgcaaaagcccctcaacctgactctcgcctggatcccagtcattctggtcaagacaacacaacctttccttctttagcccctgcgctgcttccccaccacaaggaccgaagccggcaacctgccatcgtcaaggacccgaggatcctctctcttcagtcccctacttttctggccagacccccccaccaaccccaagccttgggcagaagacacacaacagccaacagatctttcttcccctactccccgtccaaccacacccctactactgagcattttctgagcgccaggggaaaagggaaggttgtggccaacagcaggaaccagcgctgggaacgggatgttctagtccgaagtgggctgacatcacaggcggcgcagggccagggactggagaacagagacacggggagcgctgaaagcctaatagggtcctggtaccggggcaaacctggggcccctcgagtaacgagcaagaagaccggggcatgcccgctgagagtcggctgtggggccgggaaagctgggacggggaggtggggacaagctggaggtaagatgagtgggtcaggagtgcagactcccggtgcaagatttcgaggaggacttcggtccttgggggcagggagagggtgggtagcggtaaggacgacagtgtgccctctgcctgggccgaaagtagcccatcagattggaagtggcagcggtccggctcagggacggagatcggccccaggatggccgcagagatgcctacctggtcgcaggagtgtcctccgcacgcctgcccgccgccgctccagcccgcagccgagtggaagctccaccgggcgggcggggaggcgggttgcataatgccgggcactgccccctcattggcctcttgccgacggagccgcaggccccgcccccgattggctggggatctcttcccggcgcctgattggctagtggtctccactaaggtcagggctgtgtcacacacacgggcgcacgtggacctgggtgctggtgctgggctgaagagccccagacaccgcccagccaatgggcgcaggacgcttgcacattgaataatggaagggaggagagagggagatacgctgcgcctctttagggaaaaagcccggcccggggtaggtgctcaagacttgtctacttcctgaacgcactagccttgcagaacacaacatcttggcatcttcgcctttccaagggtgaggaaaaggaatggcgctgcaagttaggccacgctggatgagatgggtggtccttgagaggaggggagagacagaaacctgcctgggcctctcctgggttcctttcccaaccttgttccctcccaaccttcgttctacataatgaagccctttaaccgaagcacttcctctgacacttcaaatcctgggagaggacagttaagggtccacgtgtgaccggtgggtgagtgggtggaggaaggatgcggacaatggaaggggcaaccagagccaatagtggctgtgaagggaaacaatggcaggtgcttctatggccactcagagacaaggtctccgggcagcctacgtggtgtctagtactttcctccagaggacgcagccacccacagttaaagctgccccaaaagtgggggccaggaagccaggactacagagggaccaaggggatggcccagagaagaggccagctggggccctagacagagaaatgtggggtggcaagggcttcatatttccactgcttggaaaagagaaagccaaactccaggggcccagacggaacgtcatctgtctcattcactgtagtctccagagcccaggacaggacctgacacatggcaagtgatcgataaacatgatttttttttttttaaacaaggataggttggggaggtgggaaaagagtgtcaacaggagaaagggggctgggaattctgattctctaaaagagatgagtagtcctagaaagagaacaggggcacgatttgcaggcaataaaatgttagtctgggctcaggagagctgcagttacacagccccctccatccaggaccgtgatgagtagttcctcgcagggctccctggaaacgtgggtagtagatgaacaggcctccaagcagctgctgacataatcattgtgggggcactcccctcactgtcacgtggcctaagctttcctgaacaatgagggaagggtgaaggggagggctctgtggaaaagctgagacaagatcgtgttataaattaacccagaaaaatcgaaacaggaaaacaaaagattcaggagcctggaggccgggcgcggtggcctgtaatcccagcactttgggaggcccaggcaggcggatcacctgaggtagcgagttcgagaccagcctgaccaacatggagaaaccccgtctctattaaaaaaaaaaaaaaagattcaggagcttggattctcagtctcctctccctgaaaatgatcctctccaccccaactcatactgtggctttggccttatctcgtttgcagatacctcttccctggaaacatggtttttctcccccttcagggatttaggtgtgatctcccctaacccaggcagtccttgatctcccgcctccatctccctgtcttttgcatagacaaaaggctccagccctccagcagcccccgcttgctcccaagactcttgttgtcctgcttcaccgtccccacagtaaccaggccctgctgccgtcaatggaggcgagggggcgggagacagcagtgacgtcaaagcggaagaagggggcggggcgaagctgcctcggaatgtggggcagggaggctggagagactggagaggcagcggtttgggaggcggccagcccgagagggcggcggccagcgcacttgggaacatcatgttctcttggctggtggcccaggacatgcacccagcctgggcgcctcccccaacaaaacgacagccgtcctgtcccaaagccagggattcctggagagaggattagtaggaagggggccccctccccacacctccccccaccacgcctggctctcttttcaggactcccatctgcccgctcctcagcttgttcctgcagctctggcttttcctctctcccaaactgtacacatctgctggcctggtaccaaagacccagggcggagaagttggaggtcctgtctctgggagagaacacgacgcacctttgctaccttccagaagccccttcagagcctgaatctcttattatgacagcgggcggggggaaagggagaggggcgcggacagggaggagaaggggcctaggatgaaaaaatcaaactgggacagagcaagtggcccagtctagggcctggatcctgggagagggctagaagggaggaatgagggaatttggactgctgcctgaagaccaaaagagccaggaagagagaaatgggacgccatcaaaacttgcagaaaaacttgagaatatgagactagttcccagccacagcattcacataaatctctcaccataacccaggcattatgctaagcactttatattatcttatttcatccccagaacaaccccgtgagataggtattattatccccattccatgggggataactaaggcacggaagttactaaacttgtccagtgcctcataacatggtctcaagctcttaacaaatggagcccaggattcaaaaatctgaactctaataatggcttgtcattctggtttcttacccttgaggaacctgtgaggtgttaaccaacctgtaagctgcattccagcactggcaaacctggcctctcaaatatccagccaattctaagtttggtgccaggaacacagactccatccaacccctttctctgccttaggcctgatccgaagccactgtttgcactccccacacacttaacatcatagcccgttttcccaggctcacaaagtgcttgagatcacccaagcagccaccagccccaatgatttcctacgaagcccacttcctcacttttctactttacctcaggccaactttaccagacgcctggcctggttgtttgtacagacagataccaaaacaccctgttggtgcctccccacctctaggggctcaggaagacgtgcacagccaatctgcccaaaccccaaccctatcctctcaggactcaatagttgctaccccacgtctattctcaaggacgactctgaggcctaaacccttccgcttaacatgagaaagacgcccggagccgtaatgtgactagctctgggtctcacaaattaaaacaccatcctttctcatatcagcatgccaaccctttggtaccctccgacttgccctaccagggcctccctccggcctccgaacctctgcctctttcaagtgtttaaggagaccacccaaacaccctgggagcaggggctccttcagtcccgacctgagagggagctccctcaggtcgcagagggcttccgagcccttccccccgggcagtcaagtgtccagggactccacgggggcgagggatctgatgtcactaactcccaccccgtccctctagacctgagttcacggtccctattctccacaaccatcagagctcccaccgcagttatcacgtatttgcatgatcccacacacacacactctaacaccttcctaaccgaccacaccaccccggaaaagtccacaccgatcgccccgcatctctcccccatccccgagcactcaccgctcggcgcgcacgcacactccaaatttcttctaggacttctagcattacactggctcctccaaacccgcccacgggccgggctgccacgccccccacgcttattggcttaggggcgccgacccatgccccgtgccgcgtgcagccgccggcccccgcacagcctccattggcacctccggccgccatcgtcttctcattggtcagcaggccaacgggggcgggagagatacacgtgagagaggggccgccccaacgcggggattggaagcctgaccggaagccacgccctcgacacttctgaggttcttattggctggggaaataacccccgacctgccaagattggtgacgtaaatgccagtcccgctctccaagctttctcataggctgagaggtcttggagctgtagggtacacgtgccggcggtctcacgcggcaacttgtttacccagaagctggggattttccttgacgacactcttaaccacggctgctaaatctgcgcaggcgcagccgtgagcggtggcagcgtataaggcgcactttgtacagagacccgggcgtgactagggcgcctctggcgctggggttccggccctgggtcccaccgaggctccctgaagctggaaggtgagagtattagggtgaagcggtcttcagatctcagcacggtgtcttggtgacgatgaaaataagagagcctcttcctgattgttttctgcgggccaggccaggcgcttctcacaaactctgaggaggccagctcacatactccccccgcctcacaaatgagaccgagatgcaggggggttacgtaatctgttcgcctgtaacacgctagtcagtaacaaggcgaaaacttgaacccaagtccccgacaccataaagcaggcgggtcctggggcccatgggaactcttaaacctggaaggaatttgagttggcagtgcgaaatcctgagcactgcctggcatatagtaagacttcaatcaagttggacattctggtaatgattgtgtacctaattataagaatcacggtggctcacgcctgtaaccccagtactttggcaggctgaggtgggtggatcacttgaggtcacgagtttgagaccagcctggccaacatggtaaaaccctgtctcttctaaaaaaaaaaaaaaaaaaaaaaaaaaacgacggccgggcgcggtggctaacgcctgtattcccagcactttgggaggctgaggcgggctgatcacgaggtcaggagatcaagaccatcctggctaacacggtgaaaccccgtctctactaaaaatacaaaaaattagccgggcgaggtggcgggcgcctgtagttccagctactgcaggagaatggcgtgaacc

SEQ ID NO: 64298 - DNA, 2921 bp, Homo sapiens
tgtccacgttcaccctcatgatgtccaccacctgggagaagggcccacgaggcaggggggtgtgccaaggcccacctcagtgagggcaatcctcaaacatgtgcccaccgtgccacacatggaacatgcaccctgatactgccaggttaacatgccaaggacacacagaacatgcctagcacacctggggacatgcaaggagcacacatcaggggcatgctggtgacatctcagatgtcatagcaacaccctccctctatggaacctcaggcgctctgtccatcaccagagcacacctgcccaggctggcacaccccaggctagcaaagctgattaacacccccagcgcccttccaagtgcgtgctgacagggagacagggatggggcatggtatctttgtccgcaaacccacaggcgtgaactgtcatcactcccaaaccaacatgggcccctacacctatacgccaacccccagggtccctcctactgcttttgactccccccacactcacctcatccacctgggcctgggtctgctgcagtctcctgttactggtgaggtttggagggggtgcagggggaccaccctccccagccggggcagcagggggggccgtggcagcggtagcagacctgaggagcagggacggattaagacccagggcctgcagcctcccggccccgcagccagggctccgcccatccacctgtccatcctcgtccctccagtcctccttttcgggaggaaggccacccgatgtaagccctggtctcggtccagccctgccgccgatgagctgcgtgaccttgagcgaggcccccccggcctcagtttccccgcctgtcaactgagggcgacctcacagatgcgatccgggtcgacccgaaaagacaggcggccgcggtgacaggggcggggaggggcaggaggacactgggtccgctccttcccgcggccatcgcccgagccggccagcccgggacgcggggctcctcggccgcccgcgcgcagtcaccggcttgggcctggccccggggcgcggggaacgcaggagagaccccgggcactcccgacggccggttgccaagggcggcggccggcgcagggaagcgcggtgagggtggcgggcggccgactcacatggcgggggcagcgggtggaggacttggcagcggcagtgatggcggcggcggctcgcgctggctccgactggcgctggctgcccgggacggaaagatggcggccgcgcgtcacccgcatccgggcactgcgggcgggggcggggcgccgcgggagacgcgtcgcgagcggggccgcgggggcggggcgctgcggggcgctgcggggcgggggtcgtgccgggcaggaccacgggccccgcgccaccatgccccggcagctccctcggcactcgcgggaccccaaggcgggctgctgcggcttccccaaacccaccgccaccccaccctgtctgaccacagcccccccaaaccgcctgccgcctgccccttagagcacaacgcagcctggccctacacctaacccccagaccactccctcaatcgtgaacccagtaaaccagcctgcaccccacacagcccaaggtcttgccccgcgcccaggtcccagcacctagcgacccgccttcagcacttggaatgggctggagttgggaaatcagagagggccagtgcaggtgctggggcagtatcgagagcggggaccttactgctagggtggagaggagtgggggagattggtcccaacccatcaccgctggtggatgtctcagaggaagcctggggtccctggccactgggtaggagggtaggaagaaaagatgaggcaggctcttcccgcccaaacaagtccagggggcggaggacgggggagtgtctacagggtgtggggagggggctgccccgcctcacgattaaggttcagactaggggtacttaaccgctggagcaggcccgactgaggtggggtgagctgaggaccccgaggaggagggcacaaggctgccgggggtgatgggggcaggggctgcttcacgtggtggctgctgactggccaagacctagctttgccccaggcttaggtcagcgacccgactgcaggaaagggctcaggctttggtcccaggcacagggcctgggccaaaaaaaaaaaaaaagccttttttctttttctctcatttttttttctttagtagtaggcacagtgggcacaggttacaaggtgctgctttacatgcgtattcgcctcgcaggtgtgaccttggaccgttgccctcctctctctggaccccaaatacattgcatatgtaggtactaaatccatatttgttaaatggcttgatgtggataacataggagattatccctggctggtctccattaggccctctaagcacacccagcagctgtatacactcccacccagcttgtcagagaagatgggaccaggggagctgtcgctctggtggagtgcagggggtcaaagcaagcctcaagggtgcaggaggcattttaggcgaggccctttggccctggggtgggggtgcttactacatccctggaaggtgcagggaggctgatggccttgatctctaagacaaacaggaaccagcttcctccctcccccaccctggcttcccagggcctccgggtgtgagatcctcccccactgcagtgccccacccgctccccacagaagcccggagagtggctctgtcaccagaggtgtcatttcccagctgtctgtgggaggtgagtgagcagggaatgtgtgtgctgggtgtgggaactcagcccaatctaagagaagatactcttggcttcctccccctcagaggagcagccgcgtccctggtccttgtgcactgacagtcccgggtggctcagcctatgtgatgag

SEQ ID NO: 64299 - DNA, 1451 bp, Homo sapiens
aaaaaaaaaaaaaccaaaagaggggggtggtcaacataccatatgctgaagagaggtcaatctcaagtctgaaaagtgactctggatttgggaagaagtcattggtgatgatgagtttcttgggggtgtactggtagatttttaacaaccaactctccaaaaacaaatgtatccatgtatatacatctgcgccgtgcactcctgccttggcgacagaccaagaccctacctcaaggaaaaagaaatacagttcctattgaataccatcctgagggcaaccaccatgtgcacaagactgcagatatttactgatgtgcaatgtttcctgagaagtgaggattaaagttatcaaacgacaaaaaacaaagagcccatttgtattatttcactgcctaaattccagaaagcaacaaaaaccaaatcacaattttcaagaacaaacaaatttagcaagactgcaaaatagacaaacagcaatagcaagactgcaaaatagacaaacagcaaggttatcccagtcagaacttcatagctatgtttgtggatatctgctaatcagcataacacaaatgtaagtgatcgtcagaaagaatcagacaggagcaatcagggtgttgcaagtcctgattacgcagagacgttaatcacgtttcatgcatctccaatcatcatgttctaatctgccctccggaggaggaacaggtaaggattatcccacctgacgatacagacaaacagccgacattctgcactcagtgaaaaagattccgttacaagctagggtgagttcataacgcgctggtatgagcaatcctattatttagcgtccttccagttgttttgccatattagctcgcacatttttttaaatttttttttcattcggctgccgaaaaggaataaattacttcttcccagaatgctccgatcagttacgtgccggacgttctaactgtacgcactttctatttacatatctccgcccactcccttccgccaggcacctaccgtagtaaccaaaatagaagcgataccaagtatcttacggtctgcaggactagaaaacagcgttgttttttttttattcagtagttcagccatctcaattgtcccctaaaactgtatataagtcttaatgttactacaaaacatattttattacaaagcactaaatacaatgcggataatcccagactcaagacgtaattattccaacacatatcctccagcagaagcagtttccgaggggaaaaccgaagcctatgccttccttcttccaggaatacgaagcggcccttgcccctgtaggcttcgtccttaggttcccgtcatgaaggtaatcagaagggtttctttttcagcccaaagacggtgacgaataaagccatttcagtgacagctggaagggcactaccaaggcaagtggtagattcagaaaccctttcagtata

SEQ ID NO: 64300 - DNA, 877 bp, Homo sapiens
gatgcgccaggagcgtcaggaagcgagagggcacaagccctgagacccggcccatggccctcggggacaagggcggcggtctctgaggctggaagttcagagacagcgactcctgaagtctccccgcaagccgacaaatctagacgaacgcctccttcccgcccgctcaggcaccgcccagttgccttggtaaccgtgtacgcgggctcggcgccgcgttctcggaaatcctcgcgagcagtacattctccggctgctgcgggtctctcagggccagcgaaggtcaggggtacccgaaggcgcttctaacctaacggctgggtacccgcgcgcagccaggccctttgttcctcagagggtgcgaggtggcacagccccgcagcgcccgatctgcccacgcagggcggatgaacggaaacccaccctggcctagcttggggacaccaatgcttctgctgttgcccacgccgggagcggcccccagccccagctacgctgcccagttgtggatcacttgagaccgctgccaccaccacgccgggctgagttccccgccatgccgaagactcagacccgctccccttcccctcctctgcatgcctttagcttcccaccaagctgggcctgagaaacaagggacccgaacctggagaggccggtgttcctggactgctctgcagtcacagattgtcacggagcccctggttgtctgaggaccccaggcctgaaccttccttgaggaagactgatttctttcagactactttgctcagtttggtgagggatttgcagagtgcaaaaaatggccagcgtccttaaactagcatggggataagagcagagcaaggtggctggaaagagtgggagtggacgaagg

SEQ ID NO: 64301 - DNA, 2361 bp, Homo sapiens
tccgaacccgggggttgtgcgtgggtacattcgaagtctccgcaggcaattacaaaagtgcaaccggggaggagacctgctgctgggggagcaaatctcttaccacttcaggtgccctaggctctggcactgctctgtcacgttccgtctggttcccatccttccatccgtttctaggcaggtccgtccccactgggctgtaagctttgggatcccctggcgatcagctcgggaccctctatctgggcgttggcaggacgccgggggccgggagggacagaccgctaagcctggatcccatagtcactgccctggggtgccactcgcccggctcgtcctacagggctggctcggcgagcgcagatacgaccccgcagctgttcagaggggcagaaatgccctaggtgcccatccatgcctcgattcatgaccctggcctccagggcgcacagtggtcatggggagacctgagctgccgagtggccggccgacctcgtggcgcaacggtagcgcgtctgactccagatcagaaggttgcgtgttcaaatcacgtcggggtcagcggctatttttcttcggtttttattaaccccctttattttaaactacggtcgagcttcagcgttcaggtcattgaagaagcaatatctccttggggcctgaaggagaggggtttctggaagttccaaggccgccccgtctggacagcccaaccatcgcgcggggatttttgcgatggatccgggtaccgtaattctgggcggataacgcgggtcctaagacaggagcagttctagacctctcagcagagggacgagggtcgggccatcacgcatggaagaagtcggtctctgatctacgagttctctttccagtgccgagcggattccttccaaatgtgcagccttcacgacgtaggcgagccccacctgcaggaagttcaggttccagagaagtgagatgcggagggcagtctgaacagcgagggctgtctgcagacgaggtggccgagtggttaaggcgatggactgctaatccattgtgctctgcacgcgtgggttcgaatcccatcctcgtcggctaaggaagtcctgtgctcagttttgtagcatcaaaactaggatttctcttgttacccccagtcactccattcagttttcgtgtctttcccagctgcatccatcctttcctcattttcgtatgcagccgactttttgtgacatctttgtattcattctctgcaattcagctgacctggccaaggaaacaagatcctaagcgtctttccggcggcgccgtggcttagttggttaaagcgcctgtctagtaaacaggagatcctgggttcgaatcccagcggtgcctccgtgtttcccccacgcttttgccaacattaaacattgtgaggacagttgcagaaactcataacttccatcctacatggtttactcacgtacccatctatcctctcccggtgcatctgccacacgctgttgggtttttgctcttcgtgcacatggtacttgcgcctcgacctgcagttacaccagtcgcatcatctgtacttgccagtactgtctgttactcgtctaggtgctcagttagtcagtgtttgtgttctgttttcatttctcataaagcagtcccacaactgaaggtttttcccgagagaactgaacagtattgtaactaaatagatttatttcaagcttttcgtagcaactggccggttagctcagttggttagagcgtggtgctaataacgccaaggtcgcgggttcgatccccgtacgggccaggattgaaacttttcgaaagtacgattactgcactccgttttagagccaagtaacgtctctggggaaaaacagcgccacatttccaatcccagaacagggagcgtattggagcgcattctaaagtgggcgtgtcttgagaggaagggattgagagaaaccggggttgtttcgtgatctttgcttctacatcttatggccacaatatatggctcctgaacttactgtgtgaactgtaaacaaaaggctttgggacaaatttgtctcaaaccacgtggcactgatctgcagagtgtgggaaatggtcaggaatagagctgacaagtgttcccagtcttcccccagaggtaagatgtccgtccaatccacccagcccctgcctattcatgaggacctgagaagacaatttcttccccttctcttctagagcatcttttttacgtttctgtggttaccggatctctgggcccctgtgagtgattatctgtgtcctcacatttcccctcagaccagatgcttaagagcaagaaccatatctttccccacggagcctgagacatctcca

SEQ ID NO: 64302 - DNA, 1473 bp, Homo sapiens
cagagtacgtcggatatcccggacttggcgcgccagcccctgaaccggctgcagagcccgctccagctcctcgcagcgcgccagcagggtgtacatgcccttgatgctcatgtccacggcttcacctaaggagtccacagcatcgcggtaggtctggatgcaacccacgctcagcgccgtcagctcctgcaccgcgccacccagaccgcgaagcagacggtccacccggcctcccagctcccgactcaaccgctccagatcccgcagcacctcggggtcgattgggggaatggccggtgtgggtgtgggtgcaggcgctgggcagggccgcgcaggggcagaaggcgggggtggaggcgcgccgctcagacggatcttgagttgcaggttgttggcgacaaagtgggtaaggtcgccgtggcggctcactgtgccttcgagctccaggggactggagatggtggcgcggcgtccgccgcccgcgccggactcggcactccctgaggacccggcgccaccgcacgcctcgctcagcccgtccaggctgcggctgtcctgaagacggctggagaacgagcggccggctctgctgcccgcggccgcctcctcgtcgttgtcttcctcctcctgctgctcaacatccatcccgccgcctggtccccctcgacggcagtccctcccggaggagggcttgccctcgggcggcgccgggttcttgtgccgggaggacagggaaggttcgtgctctgcacccggcgcccccctgcggctcccggccccagacagcgtcccttgagggccgggctcgttctccagagcctcccgttccggccggtggacgacgccgcagcttgacgtcttcggggacgtcctggggtggcggttcgcgcccccaacgttctcggtctcttcctccccggacacccggaggcctgcgggcggctcagaggacgttcggcccggcccgccgccaaagactagggcctgatgttccgctacagccagaaggtccgtctcgggcccgggccgcccccgagacgactccatactgcaggtgggggccgcaacggaggaattggttcgccccggctccggaggcagtggctgcgcctttaaggggcgttggtagaggcgagccgattggcagcggctgacaatggtaaggacaggaaaagcattttgattggtcgcggcgaccaggaagtcccggaagaagagctgttactgcacagcggaacacacgtgaacgccggcagggtggagagaaggaggtgacagctgctcccgtcgccccgccctttctgaaagctgatggggcagatcttaaagaccaaggtcctcaaattcctgagtcccgaggggtggggctcagatcctttctgcctgtaattgtaccccccccaacagtgattgcttagcaaaaataccaagtggggagcccacttggggttcctagagaggttcttaggatga

SEQ ID NO: 64303 - DNA, 1073 bp, Homo sapiens
gggtccaaggcactgctactctcccggccgcccgcaaacaactgaatctgccacgccgcgccctggccaaggacttttcaaatctcccgccccggccccattgggcaagctcgtcgcccatgcctagttcccattggctcgatgtcctgtgacgtaagtcatgggaacccaatggaagaggcggaatgagaagggctcacgcttggcttccagtttaggaaagtttccccaaattcccccagtgaattatcttgctttttcttttctttttttttttccttttttgagacaggtctctctctgtcgctcaggctggagtataatggtgctatctgggcttgctgcaacctctgcctcccgggttcaagcgattctcgtgcctcagccacccgagtagctgggattacaagcgcccgccaccacgcctggctaatttttgtatttttattagagacgggttttcgctgtgttggccaatctggtctcgaactcctgtcctcaggtgatccacccgcctcggcttcccaaaatgctgggattacaggcgtgagccaccgtgcccggccttcttctttttataaaaaaaattaaatctttaatgtaactggagtttatccttatgcatgtatgagctggggtctaacttctctgcccgatggagcgccagttatgtcaacaccatttgttaaacaaactgccccaacagaatttaaatgctgcccttgatatataatgttagcatatttacttgtgtctatttctagactttgtattccgttgtttgctcatttgcctgtgtgtttattcttgtgtcattactatgtcgttcttaaaagttctgacattcctgggaggagtttttccaccaatagacctttcgttgcaagatctctgttagctgccgtgttgtttgggcccactttcatttttcctccttcctgccacacttccttcttttctgctcttcctaaccctcagatttcattactgggttaaataaatacatttttgggccttctatgaaataaccagtggatatttattaagtatgtactgtccagcactcttctcct

SEQ ID NO: 64304 - DNA, 4359 bp, Homo sapiens
agagattattaaaaacatttaaaaaggccgggcacagtggctcacgccactaaaatacaaaattatccgggcgtggtggtgcatgcctgtaatcccagctactcgggacgctgaggcaggagaatccctttgaacccgtgggcggaggttgcggtgagccgcgatagtgccattgcattccagcctgggcaacaagagagaaactccgtctcaagggaaaaaaaaatacaaacaaaaaataataatttaaaaaattatttaacaatttccatacaacagggaatttttttatttttaaatttatttttacttttatagaccttagggatacatgcgcagttttgccacagggatatatcacataatgttgaaagtctgcacccaacttctgaataacgttcatatttgtctcattcccctcctatccttctactgaggaggctttttttttttcctatcctgaaaaatgtcaccgtaggtctatttgattagggaaaacaatgttttgtttgaccccgacgtgatttgaacacgcaaccttctgatctggagtcagacgcgctaccgttgcgccacgaggcctgtccaacagcgtgacttgatgggtctgttgagcagcaataacgggcggacttttgtcatgaagccccacctttaagatttgtcagcgcatttctctgaggcaccagctgacgagatgtgggcgcatgtacgtaggaattaaattcatcctctggataaataatagagaggcaagttgcgtttaggcgcatttggcttaaggcccaattccttaactggaatcacattgagctcgttgagctcactctacagagaagccatttttatgtgtctaggcctttttttttgttttctggagatgataaatcatggtgtcgctgcagttctcgccccctggacaaatcttagacgtaatcccagctctgccggtgactcagcttccctggatcttggtttcctcgtctgtagactgggcataaccctacaggttcatgtggggtgggtggcgcgcgctagcggtgaaggtcactcacaattgcgcgctgggcagacgacggcagccattacttttacctcgatcgctgttttcctggatccgcacgggtccaacccgactcatcccaaccaacctgaggtatgaaaaccaggaaagagagctagcaccggagcgttggtggtatagtggtaagcatagctgccttccaagcagttgacccgggttcgattcccggccaacgcaagtcgttttgggtgttttttcccccccccgccttttccttttcgtgttttctgggccccagcatcgttgagggttttcgtgaggttttcctgaggaaacttccgctccgaaaggacccactttccgctacacccgcgaccacggctggaccaccgcgctcctgacggatgcgccctgcaagcccctccaggcgagagcagcgcgtcggaatctcggcccggggttgcctactgttcccggatcgcagtgcgaatccacaaaaagcagggaggcgaaaggaaacaaaagcccgggctctgcaccctggacggctgggggccaaagctacttgcccaggttcaagcagagactggaaatgcgcacttccgtcaaggagggagcaagctaggccaagtctgagcgctaatgagcatactgagcagagcagataatggccactttaggtacacgtttgaactctaagttgcttgaagtaaaatggaaacttagaatgcgagctggagaggaaggccaaactctcctcccctcctcctttccctcttttttatagctccatcccagggaccaggacggatttaatgaaagcaaaaagatagaagtttcaaaactgctagtactctccccgtcggggaatcgaaccccggtctcccgcgtgacaggcggggatactcaccactatactaacgaggagggacctgtagagacctttctccgaatccttgatctgagactttacactctgcgtgctgacagcagggttcctaggggttctgttcttccaaccactgataaacgctgaccagaaaccgtaggtgtatttcaggcaccaatcgtcagatggagtgaccgaaagagacagagtgccttcaggactgcagagaaccaagttttgacagttcctgggctctcccgaacactgtcatccacaactatagattgacgcgtgtcaatcaaagcgaaaccaggctgtggtggccgagttgagacaccaggaaggaagtcaggaagcagaaagggagggacctgcccaagtctgggcgtgcctcgtctcttcctgacatgccaggcgggtctggggattgagatgctttctgctaccgcggtgccacaaaagagcttactgtacattgatgacttacagtcaagcctcctgcagcgctggtcaggtaacctattccttgaagacactcttgtctcagtaaaaggtaaaggagggctcgtccgggatttgaacccgggacctctcgcacccgaagcgagaatcatacccctagaccaacgagccgacgtgcggacgttgccgcgaaccgccttagaggtcgtgccaggcttgctgtagtgctgggtccactatgcatggcggaacggtccgggcgcacgctcacggaccagcctcccccaggccgagtattttggagcactgggctgggaatctcttggctccgggccgcgagctccggctcctcccaggaaatagcgtcaaggaagtgggagggagtggcctcggcctcgcccccgcgccgccttgcacgactgccttgaacacccgggttgttgcttcctttggttaccgacttggtgccattccgtaacctgggatcttgacacttcctgcctccgcctgcggtccttggacctagctcttcgttgcagagctttgaagagaagcggtggaattgcttgctttcgggacgggcaggagaaatcactaggggaacaccagtgccccgtgtctgtctatcctcctgggctaacgggcagggcaaaccctgggccagacccatcgatagtccacgggttccccagaccgcatggcagtacccaagcgagggaaagagggaacgatttctggggcccagaagacccacggaagagggcgttattgagctgggtgactggagggggacaggctttccaccctgcagtggggcggggcgcaaggccaggcgactagtctcatggcttccggactgtaagatcaggttacccctaccctacagtctaacctctgctccccagtcccctcctagaatggcctagaagggagaccctcctgcctgcctcctaagaccccccgaaggctctgaggcacgtggccgcatgaatgtggtcgaaggcctgtagacccggtttggggacttagcagtgtccccgggactgcccagtgagcctctgcgctcttaaacactcaccatgctgctcttactccggagctgcccagagtcccagcaagatctggtggggtcggtagcagaccacgtgtcctgcctttcctcagctcagtgcctgttctggggagtcctcccagcggggttctggcctgcatcggccctggaccagcctggtgtcatctgtggaaccattttgttctacaccccagttgtgtgatttgtggggccaggccgttcctaatgcccaacccatagatacgatgacggggctttcagtgaaggattcagctcctatttgtctttcccaggttcccctggacagacagtggggaagggcagcagaagttagcccagcctttcccattagtgtcccaagtctttgagatgggtaaagaggttctcagggctgatctggcatctcctcccccattcctacccttttccaattcctgtctccctccccttgggccccagctttctctgcaaaataatccagtcacctcttccctggcctcaggcacttaaacgctgcagaaggggaggcctaaatcctttatgacccttatgaaagctatgtccctcttcaccgggcacagtggctcacacctgtaatcccagcactttgggaggctgaggtgggtggatcacaaggtcaggagttcaagaccagcctgaccaaaatggtgaaaccccgtctctactaaatatacaaaaattagccaggcgtggtggcgggcgcctgtaatcccagctactcgggagactgaggcaggagaattgcttgaacccgggaagcggaggttgcagtgagtcaatattgtgccattgcactccagcctgggtgacagaatgagactccctccgtctcaaaaaaaaaaaaaaaaaaaaaaagctatggccctcttcctaaacatgtatacaatccag

SEQ ID NO: 64305 - DNA, 685 bp, Homo sapiens
cagtaagtaccaagttttttttttttttttaatgcctgtattcaatgtctcaatggtgttaagatgaatgatttctttggtcatctccacaagtgagcgtggcagttttttaaaaggtcacatacaatctaaaagctgtgtgctcaagtgagttgcacagcgggaaagtctactccctaactctatgcacaaacatttcccggaatcttctcccaacagcgctattccagaaaacagctctccccagctgtcctcctttcctacatggctcctcctatgatgctatctttcctactgaaagttctaccaccctcccccacttccatggctgaaatgaccccagtcctcacctgcacgatgatggacacgtgggtgacagctgggtgtgatctaccaagagacaggatgaagtaagctttctgtttacttttcaccagagcactcaatcgaactagactcccagccaggtttcgctgcacacctctgagcttgtttctaagaaggaagaaaaagccctgtaatcccagctactcaggaggctgagggaggagaatcacttgaacctgaaaggcagaggttgcagtaagctgagatcccgccattggactccagcctgggcagcaggagtgaaactacgtctcaaaaaaaaaaaaaaaaaaaaaaaaaaaaaaaaaaaaagcagcag

SEQ ID NO: 64306 - DNA, 2985 bp, Homo sapiens
ctgttgcccaggctggagtgctgtggcacaatctcagctcactgcagcctccgtctacccggttcaagcgattctcctgcctcaaccttctgagtagctggaattacaggtgcgcgccaccacgcccggctaatttttgtatttttagtagagatgaggtttcaccatgttggtcaggctggtctcgaactcctgacctcaagtaatccgcccgcctccgcctcccacagtgctggattacaagcgtgagccaccacacccagcccctttcggcgctttttgccttctacacgcacttcgggtctcagacgcttttacttattatggttgcccttttcccctacagctccgtcaagggtcttctccaggaacccacagccccatagttcccccattaacctgctcctggtttcccaccaggattaaaccctagagagtgaacggagaccagtttaaggctcacagcgggcgccgcgtgaatgagggaataaacattcgcagaaccagtaagaggtaggagcggaccgactcacaaccccctcacccatgggccggacgcggccagcgagcccagagagacaaggcagaggaaataggaagagaaagagtatctgtgacaaacaagaaaaaaggaacaagagacgtaatagcagcactcacggaggaagggacctgggcccggccagccgccatgatgcgccggagctccgcccccgggaggggcaggtgctcgcttgggggtggggatgggggtgggggggcgctcggtgacgtcaccggtgagcgggtttcctcgccacctccagctccttctcgctgctcaccccctcgcttcctagagactccgcgaggcgcctcggtgcaccatcccaactcccgacacccctgtctcttttctctgatttttttttttttaagacgaagcctggttctgtcgcccaggctggagtgcagtggcgcgatctcggctcactgcaacccccgcctcccaggttcaagggattttccggcctcagcctcctgagtagctaggattacaggcacctgccaccaccacgcccggctaatttttttttttttttttttttttgtatttttagtagagacggggtttcaccatgtggccaggctggtctcaaactcctgacctcaggtgatccacccgcctcagcctcccaaagtgctgggattacaggcgtgaaacacagcccctggccctctctgatttttttgagacgaggtctcgctctatcgcccaggctggagtgcagcggcgccatctcggttcactgcagcctcgacctcccgggctcaagcgatcctcccacctcagcccaccaagtagctgggatcgcaggcttgcaccgccacacccggctaatttttgtatttttctgtagcgacatggtttcgccatgttgcccagactggtctcgaactcctgggctcaagcgatctgcccgcctcgggctcccaaagtgctcggattacaggcgggagccaccgcgcccagcctccgtctccctcctaagtgacatcctgtccggcatcccgcaggccttcagatggatggggtagcagagctcaggaactcaaacacagcccgcctggtggatgacttctaagcatctttcagtctccctgatcttgccaagcagagaagggcttcctcgtaatgccaccaaagcacaactttcacatgcttgctttatggccttaactaactgatgtcattacttaactgtccccgcggggacggggaactgaatgtattttcacaaacgtcagttcaagacagatttgtgggagaaaccacctggggataaacctctccccaccaagaacctagaattcggccgggtggctggggaaaagtgggcggggcgtagtcgccccggcgctggcaggtccagtctctgcccgcggcgcacgcggatgacgtaacaaacgcgcgcgacgattcgaggtgctctgtggccgcgagtgcatcttccacgtgagtatagttaccgcgtgcggacctggatcctcctccaggtgcagcgtttcgtcatctagcccaagcttggtctggcggcttcagtatccccaccgggccgagctgtgtctacttggtgcccgcgtatttgctttagtggaggcgtccattcgtcctatcttgcgtgcgttccgcagaccccaggcatggccgacccccatgtaaatttagccccattgtcccattcatggattcagctaacagaaagactgccggccgcctactttatatcaggcaccatgctggtcatggaatacagccctcatgcacgcaaaccctgtctctgagctcttgaagcttatattttactgggaatgatagacggaaatcaagtggcttaataaacaaaatgccttcaggaagactgtcctgaaagttggggaggggctgaagagtggtgagaatcaagagttcattaagtcattccacaagttttagaatttttttgcgtttcaagccctggtattgttctaagccttggtaattcaatggaaacgaagcagcaacatcccatgcccacgtagagattttttttctagtggggaatatagagcgaaaaataaaaacatccaatagtgataagcgctttacaggaaattaaaatagggccggccatctgatagtaactacttgagtggctagtgaagccttttccacgaaggcgaatcaccagaaatctaaataacaagagctagccatgcatatgtcagggtgaaaaaaatgccttccaggactgagcttggcaagttagagaaataaaaaagaagctaatgtgtggttggtgcattgtgggtgaaaaagagaatggtgtgagatagggttggaaaggtaggccagagagtggccagacttggtaaaccaggatgctgagttggaatttataccatgtgtaatgggaagccataatccactttatgctgatgtgtgacaaatgaattgtggttatg

SEQ ID NO: 64307 - DNA, 1029 bp, Homo sapiens
cccgccccatttctacaagtaattaaaaatttagccgggcgtggtggcgggagcaggagccactcaagaggctgaggcaggagtatcacttgagtcctggaggtggagactgcagtgagcggtgatcgcgccactgcattacagcctgggcgacacagcgagacctgtcaatcaatcaatcaatcaatcaatcaagaggaggctggcgggagcatgctcgtgaccaccgggggcgacatagaccctaaccctaagtccaaccccaaggcagaccccaccgtcccgccaggcgcactcctaagagcgcggcttccggagcaaagccgctgacccccgcccccagggtcttggcgccgattggccaacgagagcgcagggcggagccaaatcttaaaggatccgggagctaagccagacccgggtggcggtggcagctgcgaaacccagggagccgatgccacgtgacccaatgtggacttcttttaaacctttctaatgcccataacccagcctcagacccatggagcccacgagagactgcccgctgttcgggggcgccttttccgccatcctccccatgggggccattgacgtaaggtgagaaggccggggcgcccaggggcggctgactgggtgggttgtgggaagagaccggggtcaaccagggtctgcctcgcctcactccagcgacctccgaccggtcccggacaatcaagaagttttctgccatcccgtgacggaccagagcctgatagtggaacttctcgagctgcaggcccacgtacggggcgaagcggctgcgcggtgagggaatggcccccggctggccaatggcaggggcggggtcggaccagtgggcggggcccgcggccgacggttaatccgggcggtgagaccacgcacgggccgggagccaggcctgcaacttaaagatgctcccggggaggcgaccagagatgtcccttcctgaccccgcttccctactccaggtaccactttgaggatgttggtggcgtgcagggggctagg

SEQ ID NO: 64308 - DNA, 1365 bp, Homo sapiens
gggaaggcctgtttcagcagtacaggttgcagaagataagaatttagatttgcagtcaagggtgtcagggtcaaatgtcaagtggtcaaacgtcagctggaatttgggagtcaagagctggcaagcagggaagagatagaaatctaggagattctggtgagaagcttaaggcaggaccctctgaggtcaaggaggggcaaaagacagaaggttgcaggtgggatggctcaggatggcgggcgacgggagcacgggagtagaggagggaatcgcggggttgggagatggaagccagggaggcaggaagaagaaagccagcaagtgagagaagaaaaggatccgggagaagagccggtgatttcctcgagccagcaacgagatctcgatccgagaaagaagtcaggactctggccaggaatgagcgtccctgagcgtccccaggcagccaccggagctcgcagtagcttcaaccccgggtagcctgcggaggccgggccgccacactcctgccactggagcgcggggccaatggggagccttcaagagccacaaccgaggccctcagccaatcagcgccgagccggctccgcggccaaagggaggagctctcggcgctcctgtccccggaatcacccggaggcggttggaattaactgtccaggctccgccaccagcgctcggccgccgactccggctccggaagggaggcccgggacgcggcggttttgttattggcagggaagagacctgggttcccgatcgaacacagaggccgagcgcagcagtcccccactggggtgctgggaccgcccctcgggtgggcggacggctttagcttcctaccccgggttgtgaccgggtggggtcacataagttcaggtccacgccctgctcggtgccggcgccaggagagccaggaagacgcggcccggcttgcggggggtagagggacacacttgcgctgcgggaccagtctcctgaggctgcacgggttggtgcttggttaattaaatccttagtccttaggctctttatttttattttttattttttttgagacggagtctcgctctgtcgcccaggctggagtgcagtggcgcgatcttagctcactgagagctccgcctcccgggttcacgccattctcctgcctcagcctcccaagtagctgggactacaggtgcccgccaccacgcccggcttattttttgtatttttaatagagaccaccgtgttagccaggatggtctcgatctcctgacctcgtgatccacccgcctcagcctcccaaagtgctgggattacaggcgtgagccaccatccctggcctggagttctttcatatgagatatttgtctctactcc

SEQ ID NO: 64309 - DNA, 1251 bp, Homo sapiens
gtagagacggggtctcattatgttgcccgaggcttcagtatcttttccaaagcaacatgaaagaaatgtgaccgtaaatcaatcagcttcttggtgtgatctatgtgacggctaggtgataaacgagttggtcagagaaaactggaaatatttccaaagccatgtttactcccttcacccacctgtgagtcttcgccttggctgtttccgactcggaatgtcctcgcattgatcctcccaatcacagccagctgaaaccagcctccttcctgacgtattcagtaactttagctgattgccatctctccttcatctcaacaacctgtaccacactcactggagcacttcgctttgcatctttagtcgaccagttcagatatatacaacctataaggtagggacggaggcttctacctgcctgtaccccctttggagggcccacgaatacagagctgagcacaaaagatgtttaaaggacattttgtcaaaaatgtcgcttacaggtaggtcgttattagcaaggtagagcagcggtacggccgagtctacgcttgggaattcatttgctgactcttatcatttactgactaaagcaaagttactgaggcctcagtttcctcatctacaacccggggagatgaccagtacccatcacaatcgattgctatgaagattcaatgataatgcagataaggcacttaatacagtgtcccctcaccgtccacaccacacgggcacgcccgcttattcctgaggaccgggctgggatgtcgcctcctttgtgtagccttcctaccctgacttcgcagactgctcccaccgcctggatccatgcccgtccacccgccagctcagggctgaacggctgaggcgggcgcgcggtggagaaaagagctgcagactgaggaaggtcaggaaggagaaagggacacaccagacgcggcgtctgaatccccctccacccagaggcccccgagcagcaactccgccccacctcccgcccgctccgccggaagccggtcagcgccagccggaagccccgccccctagaggcaccgcggacaccgtgcagcgctgttcacccagatgccagctgtgaccttggctaagccagtgacttaactcgggcccgttccccattcccacgttgttgccaagtctccagcctggaaagtaaacgggcttcaggtgtcctgtttagatgcttaaaatgaggaacggcaggagcacacacactgctgccacctcaca

SEQ ID NO: 64310 - DNA, 2297 bp, Homo sapiens
tgcaatctctcttctaagctaagtgcgtaaaatatccatcaagacaacgagaacaagtagggatacacacctgaacttcatcatcctttcggatgggcatggatcgcacgttgtacttctgtctcagctctttggaaagaggggaagacataatcttccttcgaatgtgggaaggtgcattgaaatgccttttgcgattcttgcttcggtcggaagtcacaaagggattaaacttcattttggctaaataaaaagttaaaaagactcttaaatgaccaaaatctcatccagcttccaaacaaataaccgcaatgattttatcttgatagtctagaatgatcataggcagtgtcatgttgtgcaacttcaacaaaaactgtttgatcggaagggcctatcaaccgaagctcgaaactttttattttttgttttattcgggtgttttctgtatatgtttacggactaaagacttttgcatcaaaaacacttgtcctagttataagaccttttagttacactctcccaactcctcaagtagtgcctgaggaaatcaagactggacttacatctctgctgagcagaccgacaacgcaattctcttaactataacctcacgttttagaaggtacaatcaacgttcatcttctacaggcttaagagtgaatacgtatagccccgccaaaatgaataaggcccaccaacccgaacctggaaaagcctgcacacgtctcgggtcctaaaagcctcccagtgggcaagtgtggtctggaaattccgtgaagactttaccgagaagttacttcgagaccattctctaggaaacgacactacccagactccagtctatttccacaggctcccttccctcagctcgttttcgagttcccaaatccccggtccctccatccatctccggcccggcggcccttgatttaagaaagcaacagataaaaaaccatcccagtctctccttcctggctgctactcggccgacaagagactctcggggtccccgcggtcggaagccaccatgcccaagaacggatggctgctgattacacccgcttgcccgccgaatccttacccgctcccgcttcggtgatggccgcaaaagggaagagaactacacgctgcttccggttctgtaagtttaccaaagatctcgcgagacctatgtctctcggagcgagaggggcgcggagtttgagcgaggggagtaaactgggaaataaatttatggctagtgtcacctagtggctaggaggggaactgcgagggattgcaaaactcccctcctccaggtcctagtgtctcccttccgagacccgggtgctgccgctgaatcctctgggaagggtagtcccggggctattggctaaggctgctcagggtccaactgcccctgggggtgatgaaggaacgagcggccccaggagaccgcccaggagacccgctggtaccttcactcccaggtgccggggcgggggccggcaccccttagccggggaagcgcaggccctgcttctggccgccaggaggcgcggggacgccggccggccggtcgcctgggtccctgcactcaccgtcccctcccgcccgtggcgtgggcgcggccagcgtgccggtactttaacgagctccaccgcgacgccggccaccgcccctgcacctgggcgtctgctgaccgcacagcagggcccgccagagattcagttctgggtggtgaggggccttgcgaggaccagggccaccgatcgccgcctgcccccgcggaaataggtccaaggccgcgtttccaaggcgcccccagtgctgtgggaggtgctggtccagaccacgcttcgaaggagccaggcgagaggaagcctctcggtgcggggagctgcgcgggtttctaaatgctcggcctgtttgcgtccagttcaggaccagacggaagccgtgcgctccctgcaaatggtttcttttcttcttcttcgtgtgtgtgtgtgtgtgtgtgtgtgtgtgtgtgtgtgtgtgtgtgtgtgtgtgtgtgtgtgtgtgtctttttcttctttttgagacagtttcgctcttgttgctcaggctggagcgcactggcacgatctccactcactgcaacctccgcctcccgggttctcctgcctcagcctcctgagtagctgggattacaggcgcccgccaccacgcccggctaatttttgtagttttagtagagacgagggttcaccatgttggccaggctggtctcgaactcccgacctcaggcaatccgcccgcctcagcctcccaaagtg

SEQ ID NO: 64311 - DNA, 721 bp, Homo sapiens
tggctccccggcctcttctgggaactgtatatggccccaatttgtgggaacctcatagtcaggactgcccagaggatggtcagcaacgaacatgcgttttcatgatttaaaaatagttgtgttcttaaatatgctgtgaaggaagtagccctagattttattcatcactgaaaaattcagcaagaattcctctgctgcgactcttttcaacaaatatttatgaggcttctttcctgggccagccctgaaactagacactggcgatgcaaaataggtcaaagtttgtgccttcaggaagtttactgtctacaagaaaagatagacaagggaatcaacagccacgagaccacaggaaaagtgctcgctgagccagctgcccttgctgtctctgtgattcaggagcagaagggagctctggggtcagggaagacttctgaggtgaggtcagcattgactggaattggaagaatgttagcattcgctccacaaggcagtaggaattgcttgaaggaaggcttggaggtgtgaagcagcgtgactcgtgttttccaggaaccaggtccttgccgctgaagagaggcatttagacgggagcccaggggctctagggctgagctgagtgtgatttgggtctggaagtcctagggagctgccgaaggtgcctgccttccttccttgccttgcctttctggccttcacgttgtcactccttctctttctt

SEQ ID NO: 64312 - DNA, 1160 bp, Homo sapiens
aggaatgaggagaataaagaagcagatcacccgagaaataatagcttaacggagagaaaaatccaaagacacagactggtctaagagctgaagacctgaattctgtccctgagtcggccactaacgcagtctcatgtgtccttgggcagatggctcaacacttccctggttttcttatgtggcagattatttcaaggttctcttctacgtctgagggtctatgaatgctgaccttgtcatactagctgtgtgaccttggagacgttgcttaacctctctaggactgggtttcctcatctgtaaagtgggaacatgaatagctgcttcatagcattgttgtgaatgagtgtttgtaaagcacttacgagagttaagttctctgagcctgctctggttcaagaggctgcccccccaaaataaaaaataaaacacttcacacagggcctgtcccatactaaatattcaataaatgatagctatttttttaaattgcatgctgactgttatgtaagaagaggacaattacatcatcccacactctgtgtacagaaaggactcttggcttctcaaaagtggtttcaaagttcaatttgcatctgggacagatgccaaagggcaaactacaaagtcaccactggccactgacctccattctcagcttattcttccctggggcctggacgctgtccagatgtaggtcaagtaaacaggctgctgtttaacacagataagtcagatgtatgaatgctggttgacaggggaagcaaagggaagccctttatataagcccttgtaagtctcattatatatttttcaaatataaaatacctatgagtgtaagagaaggagaaccaagccttagattatatgaatcatcaatgttagggatgctattaaggaaaagctgacgtactttgaagttgtcattgatgagcatggagacaggaagcagaagttgtgggtgtagctgaagttttgctctttgctggtgtgtattcttggacaaattacccttttctgtaaattcagtaggctggactatatttttattccctaagtgatggtctgtgtactactggtgacaggcagattgatgttaagtggtaagagatgcacatttgaaatttcaatagttaggtatttattttagggaatgttag

SEQ ID NO: 64313 - DNA, 1427 bp, Homo sapiens
actagctagggttcgggcttgtacccagatctctcttagggtagccggtcaacctccacccttcccagtggtggaatctggcctctgtttcctgaatctcagagtttgtgacaggagagatgttgggatcctcatgcatgctctcagggactgtgacattaacctctttggctcaatccaagaaagaccttgtactgggacccatgcctcggcaaaccccttcctaatgatttataaaggcagagggtagggcagccctcactcaccttttttaccaccacaagggctggttttataacttctgttccctttcggggctgatttccatcttcctttccactttattttttctggatttggtatattggaagcaggggctggggcaaaggttgctgatggttaattgccatgcccagcccctgggcccatctcccagggagaaagctcaaccacaagggggaaggaattacatcagtttgggcccttcggcacctcttagaatcctgccaggcaaagcccgttcattaagataaggccaatagtccagtcctgacaaacaccagttttgggtccaggccgcgtgggaggggtggcagcttggaagatgatgccaacattttccgaggggcctggcctgccattagatgactcagtgcgtttcccagcacctcagccaggaggcagggagagagccgcagcccttattaatttttttcctcttgggataggactgttttgtcttggcaccaggtccacaggaaagccttcattcatcccctccctgtctgtgatctcatcagccagagcacagcttcacccagggaagcagagccccagagcctgaacgagctgtaccagtccattgtcccaggccactggccttgaagtaagacctacttgagtttaagccctagctcctctgggtctcagtttacaatatgtacaatggaagcaataatcacagcctcacaggctcattgtgaggactgagggagggaaagcatgtaaagcacttagcacagtgctctagcccaatacatggtagtaattgctaatactcccccttcttgagtagcaatataatagttgttaatagtgtgttttctggagagttagacaattcgaacagggtgggtttgaggcttgaggcctcatctttctagttgagagactttgggaaacttcatcttgctgagtctgtttcctcatttaaaaaatgggaataacactacctatctcatgggattactgtgaggatgaaattaagcagaccaagtgtttagcacagttgccagtgcatacaagagaacttcggaaagttcatagaaaaatggaattaaaagataaaattaaaagatataaactttatttctcaacgtaagctccctcaaggtcaagacacctttttttttttttttgaaacaggc

SEQ ID NO: 64314 - DNA, 2148 bp, Homo sapiens
cctgggcaacaagagcgaaactccgtctcaaaaacaaacaaacaaacaaacaaacaaaaaccaagatggattgtaagaggtatatatatacacataggactccatttcttgggggacctggaggggagaaagtcacacccatacacacacgtacacgcatgtatacaaaaatgaatatatgctcagatatatacaatatataaatgggcaaatataaaatcccctttgtgccaacgaatccattcattcattcatcaaatatttgagcgtccactttgcctagaaccaagttatctgttgggatgagcaaggcataagaggttctagctctcatagaacttagaattctactggaggaagatgagaacaaatacaaaatgtaaacagtggaagttctgtaaaaacaacacagagctttgtgagagtgatgcttagaatgctcctgatgttccattgggtgttcgagcagggggaatggactcggaggtgaactatgagccgagattcattttataaacgggaacacagacacatggacacttgaagggccttggtggccagaaaactgaaggcaggttcccatccgtcttggcaccactctcccgaatagcagtttcagggaactgcacaagccaaaaccagccggtcgcagagtccaggagcgcctgcgcaagaggacgcctgcgcaagaggacgccgtcagcttggcgtcagcgcgccgggctctggcccgccccctgtgacaccagccccgccccaccccgccccgcatacccgtgcgctgccgcgcatgctccgagccccgcccccgtgcgtcacagaatggcctcggacacccaggcagtccctgacgtgtcggggaggagccgggcgcggaggtacgctgagtggagctcggggctgcgtaggggagctgagccgagcggctgggcgggcctggccgggccggcggaggggagacgtcggttgagcggcggcgaacatgcgcttttgacacattggaggtgagcctgcagcgcggggccgctccctaaggggctgcgctgggccggcggcgccgaggcctgcccttggggagccttcccggcccggggccgtgtctgaggctccgccggggcgggccgggccgggttccggggcggccagcctgggggcaactgttccaaccgctctaactgtcccctcccttccctggtccgatgtgtggccccccaggggcgcctgcaagggaacgattccggtggcctccggaagatgtgccccgttccgggtagggtgagggctggcggtgacggaggccgggacgtggcaccgtgggctggggcgctggcggcgcaaggagtggcccagtcggaggtggcagcggcgcgcccagcccgcctcctcctaccccctcttcgaaattccttcatttgcgagggtggcttggagcggggttgcattttgatctctcagtgcctctctcccatggggggcgagagcgcgagcagcccacgttgggctcggattggcattctcctgactcccgcccggaactgctaatcatcctccccctggagttcggcaaagtgtcaccaacgggctcgggttacttgtgctcgactcttttcttgctgtaagccatgagatgaccctttaagttttgcaaaggaggtgagagttctgtcaccactgattattaccttctatttacgtagcacctttacacgtttcagagcactcttcttcctatctttttctaaccgcatcaccttgtggttgcaactgattatgttatcgccatttcgatgggtaaatggagctgggatgggggtaattatttatacttaggttcaaccaactggtgagtggtttagcttggatcataatttacatttctaggctcggagttctggtttcttttcgtgggatttttatacccttctcagctacaaaacaaggcagaaaatgtgacttgccaaagatatgccagaagctggtagattacttactcaattatttttgagaaaactcacctaggataaaaacggctgctcagtcatgagaaaaatcttcctgtgaagcttgttcaggagttgctggttaattgctttgctaaatcgtgaagttgatgggcacagtgcagcgttaagtcatgggctgaagaga

SEQ ID NO: 64315 - DNA, 681 bp, Homo sapiens
cccttttggacccttcattcctgagccacacaggcactggtcagtgcttcgtgggtccagcgcacaccaccctcaactgtgctccgtgttgctaggccccaagggtgggggtgggaagggaaggccaggttgcctgactgaatgaatgaagttggggagggttcgggccaaaggcagtgaaatcctcagatccatccacctttctggccagtgtctgcagtgtgaagtctcaccaggcagagggcagggagcgggagggagggtatagctgcccacgctgcaatcagggcaggcctgacccacagttcaaagtcctgcggaacattccctgtgtacttagaaaagggggcctggatgcagacgctgaagctcactcgggtgcagcgtgcagtacctttgtcttcccttcactttctattcagtatctcctgtgcccaccctacacccagccagtatctcatgactgccagcaatatccagaaactatactaggcattagggagataacagggagcaaaacaggcagaaatccctgtactcacgaagcacacattctagtggaggaagcaggagctttacagttcagtccaggcctcactgaacttgcttcctgacctgctctccccgccctcctgtgtctcgggtactgggagtgcccaccaggaacatggaacagcccac

SEQ ID NO: 64316 - DNA, 793 bp, Homo sapiens
tctctctatccagagtgagcagtgataaatcctccaccttagaaccctctttaaccttctgtgcctgccactgctttctgtatgaaacaaactgtcctcaaaattggacaaacatggtactgcttctctgcctgctcctcaccctgaagaacagtgcctcccaacagtgagtggcctctgagatcttctccgtcactcagatgaaactaactgtccacctaagctgaagagcgacagcacctcctgctaagagcagcattatcaggagagcaaacatgtaggagtattccagagcagaggctagcagagccaaagcaaacctggggtagataagatatcccttggcttattttgacaagaatggccaaatgcactcccaacggcatatctctggaaagacaagggccataaatagggctgtgcaaacatggcatctgtgagtcagagctgtggactaagtacagatgaatggggctcacaccagggctgaaggagctcagcaaggcttacagtttcctctaagcatttctgtaatgaaatcaataactttcccgtatctcttaaatggaagacacaaaagtgcaggtaaggagtctccagacagggtcctacctgtaagacatagcatctgtgatctgtaatttgtatgacatcccagcctcccacctccatccttgcccaccaaatcttatatacctacagcttctgacctattgttgccaaagccctctccagtatctggggctggtgagaccttaaattaaagaagaaaggaaggaggaagtaggaagct

SEQ ID NO: 64317 - DNA, 1620 bp, Homo sapiens
aaggtaaagagaaagaacatactgtctatggctgcattactgaactgctaaaatgaaaagataataaacttaatatgctaactgaatgctctgcaagtaaaacaattcagttcttattagtgaatggttaaggactataaataaataaatgagacagtaagaaaaagaagaaaaacaaaggcttggaaaaaccagaggcaaaggaaggcgaacaaggtggtgggcgcgcttctgaagctggggtggagaatgcatttggttctgtcccactccactgtcactcaggctgtgggctctaaggtgaggtaggaaaagagtcatctttactgcatggaattgctgagagctcagccaggcctggcacatggaatgcgcttagtatgagactctctatcgtttctctaagcattcccttcccttatcaaatgtttgacctttgcaataccaaaagtgatattggactgccctcataaagtgaatttaggcatttttcatatgttattgtcatttctgttccttctctgtgaactctgcccattttttaagagaaaaattgattgggcgaatgcatagatgggtgaattaataggtataattttcttaatcatcctatacactagaagtgctcaacctctttcctgcttctatactgttcacacagctgcatgtgcccataaataacctctttcattataaaaagtgattttcaattaaagaggatttaacccatctccaaggagttgatttacagtctgaaaaagccactccaatcttttccattctccagaagctgttaaattcactatttcagaatgaggtcatgcaaggagggcaggggcagtgcttgccttgctcaacactgtatttctggcacgcatgacaagcctcatatttacagactgccggattctgcttattcatgttcatgtaggtgaactttgctttgcctcaggatgatgacatcctattgctctatttagcctgggccattacaaagaaggttttttttttttttttaggagtctcgttctcttgcccaggctggagtacagtggcacaatcttggctcactgcaacctccgcctcccgggttcaagcaattctctgcctcagccttcggagtagctgagattacaggcatctgccaccaagcccagctaatttttgtatttttagtagagacagggtttcaccatcttggacaggctggtcttgaactcctgacctcgtgatccacctgcctcggcctcccaaagtgctgggattacaggcgtgagccaccacgcccggccaagaatggtatttttaaaaatgaatttctacttgtcttccatatttaaactaccaattataattttaattgatttttaaatcaataatgcatggtagaaaattcaaagtgtacaaagaattgcaccagtttcacttcaatgaaacttacttgttctccctattatcaaccagtatctcctatttttgtgatctttccagaaatatgctatgcattaagaaatgtgtgtatgtgtgtgaccctgattttttttaacttaacaatgtatcttgttatgttgtgggatctttccttagtgtataaagccagcccattctttataatggatg

SEQ ID NO: 64318 - DNA, 1432 bp, Homo sapiens
aaactgtcccccagccctgggccgtgcactcggacccgggtagccgcacctctcaccttcagccgaagatggtggcgcgggcgcacgtccccagccgcgaccacagatccagcgcctcagtcccaaacccaccgctgcctccgccgggctcctttagcactgctgctcggggctgccccacccacccctaccctcattgggccagctccacgcccatcaccgccgcccccagacccactggttggtttgcgcgcccatctccaagggaagacgttagcaacccgaacgaagctaccttcccgagtccggctccctccacccacctggaatgacgctcattggctcccgctcccagcccaggccacagaggccccaatctcatgggctggctcttacgcccgtcataggctccgggaggtgcggccggggcagtggcgcgggattggctggctcgtgcgtagatggacagctgaggctggctgaacgcccggcgatcccgcgaggctgcgggtgcgggccccgcggcggccggcgcgctgcgctgacattggctgtgcgggccgcggggcaggtgggccgcggcaggaggctggcgctctgactgcagactcctcgtcctagcgtcaggcagccgccgcagccgcagcacattcgagcgcccggtcgccccctgtgcttgcggcagccggcatgtaccgcagcgggacggggttccaccgcggagtcgcgggccctcagcgttgcctgcaggggcggggcggagcgcggtccagagtcctgacgtcacccccggggctgcgcggggttggggccgcggcgctgcgactcacctgcagtgggggaaggaacgcgggggagggcgctgctccgcccatgcgcacagggtttggcccgggacccggctgcgctccacgctgcggccactgtcccgaccccggccccaggcggactctgccgggatcggccgagcgccaggcgcaggacacggtcctccaaggtcgcagttttggtgttagcggggtgagaggctctcctgcccagcctccaggcaaggctgagattccagaagaatgagaagagaaccgaccttggagagaaaacttggaagaaactttattcacctcattcattcactcgttcagtcgctccttcattcattcatcagagctccctacgtgaagggctatgagaggttcttaagaatataaggctggattcctgtagcgctgtcatatcccctagggcttatgaaaacgttggagactgaaaaacagtggccccaaaataacgaaaggaaactggaaaaatcaaagtaaataaaatttaatgaaatgtctgcagaatctaggcaactgcaacaaaactcttgcataattatatataaatataataaagtctaaatcacatgaacaaaatgaattattcatacaaa

SEQ ID NO: 64319 - DNA, 806 bp, Homo sapiens
aaagaggtgatgaatgactcaggcgctccgacatgccttccagagcatatctaattttagatggtggcttctctgtcttcctggtcccatctgtgtgacttttatactttaaggcaggagagaatccaaacaggactcctgcagaaagtctatttactgtcctaagagttggttgaccttgaactctggaagtacagggtgtcacaaacctaggaaggaactaatgactcccaagtctgttcctatggctgacaaatgtctgaagttcctccagtagatgaaaaacagctcattcctaagccatgatttcttcagaaatcattttattatctctaagacttgtgaagtctaaagagagtagaatttgaaagaatgttgaattccatctggttcaaagagctttagtgttagacataaacaactttaccagtttgaaaaaccaaagatgagcaaaatcaaatcaggtggtagagcttcctgggtaggggtgtaacatacaacttaaatctaggtgtcctggtctatgtggcactttgtttgaattatggggtcattgacacagcaagatagataaggcagagtagttgttatgtaatctcaggagagtggagaaggcactcccaaaactggaaatgatgttacattttccttggtgagaatcttttaaccccaggagggtttaaaattaagtatagaaagtttaagggaatcatgatattaatgttttcatgtaaaagaatctaggcatgtttatgtatatataatgcttactagaatttagcctatttacagaaaaaaatgtcaaa

SEQ ID NO: 64320 - DNA, 1703 bp, Homo sapiens
cggcctacagggtcccacagatgatggagtttgagactccacagaaggtggctggagacaggttgggcggctcaggacgatgtgctggggcagttatgggagatgtggttacctagcaacaggctgcctggttctgtggccggcacgtggagtccaggcgctgccctctgccccctgccccctgcccccattggtcctccccttgctggggtcctgctctctgctcctgccctttgccctcaggaacttctgggaaggcattaggcctggttagatgctggttgccatggagcccagggccagaggcagtttctggtgagtgtggctgagaaggggcatcgggtggaggagcggccttgtgcgggcgccctgctcttagggcctccctggggttcaggtgtgggtgagggtgagggaggggccgggccttggtgaagaagagcagagaaagaaaggaggtgcttagcggcggcaggggtggagtcgcgaggaggcgcgaggttagaaaccaggcggcgggcccagcacgcggtggggccgggtggggaaggggggacgggcggggggtgcgcggggacaggcacaggaggagggcccaggccaggcccctcagaagaagagactcggggcctgcgccagttttttgttttgttttggttttggttttggttttggtttttttttgagacggagtctcgctctgtcgcccaggctggagtgcaatggcgggatctcagctcactgcaacctctgcctcccgggttcaagcgattctcttgcctcagcctctcgagtagctgggactacaagcgcctgccacaacacccggctaatttttgtacttttggtagagatggggtttctccatgttggctaggctggtctcgaactcctgacctcaggtgatccacccgcctccgcctcccaaagtgccgggattacaggcatgagccaccgcgcccggccctgcgcgtttttgtttgcataaacttaaaacgggaagaaatgtcaaaacacggtaacggaaatgaccctatttaaaatgttgactccgtggtggccgccttccttgatcccgtcaggctgcgtgcattaactcatctggctggaggtcggacgtcttcgcgtgggacggcgggtgtgcggagggcgccctggggtctccggctggactctggccgggaccttgagctcgctcccgccaggcgcaggctccctcttctctctgcctccctccctcccacgcccgctactgccgccacgcccgccacaccgcccgttccgcttctctctgtctgggagggggagcggggtggggtgcgtgggttgtggtgggctaggggtctcgggcgggggcgtgtcccgagcgcggccagtccgccccgccgcattgccggtcgtctggcgccccctgctggccgtctgccgcgccctccatcccggcccaccccagccctgctcccctcccacgctccgccggagcctcccctccagagcggaccatcacacacacctgtcgcttccacctagtccggtgggctcagcagagaaagcaagacagtccctaccccacgcagaacacacccacacaatggccaccccaaccctaaacaagaggtggttctccaccggagccccggaggaacacgcccagcagggcgacaataagaccgccaagaacgattcaagctcctcggaggggc

SEQ ID NO: 64321 - DNA, 1844 bp, Homo sapiens
cagaggtcacatcctcctcctcttcctcacgctcccgggctgcgtgcccacaggggcacagccctgtgcgcggtgccaccgggggccatcaggctgggttagaggaaggcccgacctccgcgcagcaaagaaaacaaacacagatgtgtttggctgggaccgggagggagaaagtggcccccttcccccgcccgcgcgctcccccgggcgtgaggctctccgggcggcgcggggcgcgggcgaggctgacagtccccggcggcccctcctcccccacggggtgcgcgcctggcccggcccagccccctctccggggtttccccgggtgctctcctcgctttctctttgtctctgctgttctttctcgggctcccgggttcccacccgcctgtgctctccctctcgggcgtccgggccggttccctttaactttcttctttcccggggtgaaaactttgctcggagctggcggcagctcgcggacgttattggccggcgccccgcccggcggccccgccccccgcccccgcgctcccctccgcccctcactcccagcgcgagtggcggcggcggcggagccttcgggggcgagcgcgcgtgtgtgtgagtgcgcgccggccagcgtgagtgtgtgtgcgccccgggcgcgggcagggcagcactccgagctcggcgggagcggcgggagccgggcggccgcgtagtcactcgggcgagagaggcggcggcggggccgggaccggggctggggctggggcagcggcggccgcgccgggcatggagctggcaagcccgcgctgaggcgggacgcgcctgctagcagcgagcgagaggctctccggcgaccggcgcgcgggctccccggaggggccaggcaaacttttctttctcttttgccccctccagaggtaaagtcccgaacgcggactttccggcggggacgcgatcggggggcatctgagagggaccccgggctgcgagacgaaggggcgcgggccgtgcagagtcggggtcccccagctctcctgcgcccgaaacttggggtgcgaggggggctggtcgcggacggggagaccggctcaggcatgcccctcgggcggcgtgggggcggcggtggcggggaagcagagcgttctcccgccgggcggggaagaaggggcgcgagcggtgcggacttggagggccccggcttcgccgcccgcgggactttgggggagagaggcgggcagtcggctgcggggtgggtgcccaggaagccgggcgttctcccgcatctccgctcgccaccccgccgagagctggagggcgcggggcgggctggctgagcgcagctcccttctctccgcaggcgccttctgcggcaggcggacagatcctcggcgcggcagggccggggcaagctggacgcagcatgatgcgcgcagtgtgggaggcgctggcggcgctggcggcggtggcgtgcctggtgggcgcggtgcgcggcgggcccgggctcagcatgttcgcgggccaggcggcgcagcccgatccctgctcggacgagaacggccacccgcgccgctgcatcccggactttgtcaatgcggccttcggcaaggacgtgcgcgtgtccagcacctgcggccggcccccggcgcgctactgcgtggtgagcgagcgcggcgaggagcggctgcgctcgtgccacctctgcaacgcgtccgaccccaagaaggcgcacccgcccgccttcctcaccgacctcaacaacccgcacaacctgacgtgctggcagtccgagaactacctgcagttcccgcacaacgtcacgctcacactgtccctcggcaagaagttcgaagtga

SEQ ID NO: 64322 - DNA, 1227 bp, Homo sapiens
agtgtgtggggtgctgagtgatggcctggggtagtttggggccgaggaagggcactcgtgttctatgagcaccgtccagaatgaggccacagcccagctcactggaaacgtgccctggagtgtgatggcctgggtagtgatgtgagcacttaacccaggctctgctcagagtccagaagcaggggctccaccccgtgagatgtggcaatggctttttgaaggaagaactgatggggcgtgggactggtccagcatgaaggatgaaaagacgctggagagatgagatagtaaagacaacgcctttcgtgcctgcgtgcttgctgtgtgccccccgtctcgtcccttcaacagaggcccccctgtgatgttatcagggcaagcgcttttcatccttaggattctttctccatgcaaaatcttatttggaaactcagtgtggaaaacaggcaaaactcgggctgctttggctgaagaaggtgttgttgaggtgggggctggagtgtacccccttctccccctcaccccgcagagccctgtcctcttctttttgccccccacccccacttcaccctcagcatgaccaaaggacccctgtggtccccagggacacagtttctcaagagaggcctgggaccaacatgtacagcattatttttgctcccactgaatttgctgtacaaacaactggcaattggggtatgttggctgaaataatttcatcacttaatcctcaattttacgtgtgactggttgattgcacacagatcctgtgacccctgagtctgtttcctagtgattgcccgggcttatcactatattgtttgctttctgctcttccccggggtttgctttccaggggcagttgtgtgacctgcctgcctcttggtgacctccttttcactctggtgaacactccttcatctccccgttttcattgatttctcgggtattttccattctgtaatactttggctgctgtttcttccttgtttttataaaattcatctgctggttgctgtttacaaaacatctcctttaaaccatcaggcacgaaggcaggattgctgccccactgggaagccggccccacaatcaggttccacgtaaggacgttttccagaaaatgacacgtggctcctttaagtgcaacacttttaatttcatgagaatcgtatttttacaggtccaatattatagacttgtttggccagggaaaaacattgccag

SEQ ID NO: 64323 - DNA, 1166 bp, Homo sapiens
gagaccatcctggccaacatggtgaaacgccatctctactaaaaatacaaaaattaactgggcatggtggcgcgtgcctgtagtccaagctactcgggaggctgaggcaggagaatcacttgaacctgggaggcggaggttgcagtgagccgagattgtaccattgcattccagcctggtgacagagcaagactctgtctcaaaaaaaaaaaaaaaaagtaggcaacaaaggtttaggatgaaggtataatttaaaaagcatgaagttgaaaaaattactcaaccacagtgaccttggttgaatcaccttaggttgtttgctttgcacaggggaaagatcatcatgttcttttgtagtgatagagcattctgatccaaccaacagagccccatggtttctagggaggtggagaaggcctggtggaggaggaaggggagggctcagttcctttctagaacttgagtgtcagttgaaaatagagtgaggaaggtggcagttgaaaatagagtgaggaaggtggctgattctaggcaggtgagtggaatgagtgacagtggcccaaagggtaagggggggtctggcctttctagagaacatgtgtcaatgagacagttggctggaaccttggctcccagtaggagcataggaggagatggagcagagaccgggtatgggcaaggtggtggccaggctaaggaaggtggggtttatctagacaagtggttgtcacattttggcctgcttcagagtcacagattgctgggcccttcctcaaagataggtttggagtggggccctaggatttgatatctaacaagtgcccaggtggtgttgatattgctagtctgtccacatttggagaaccactggtaagcgatgggcatccaggagcagtttttttgttgttgttgttgtttttgttttattttgttttgttttgtttttttgagacggattctcgctctgtcgcccagaccagagtccagtggcgtggtcttggctcactgaaacctccacctcccgggttcaagcaattctcctgcctcagcctcccaagtggctgggattacaggtgcctgccaccacgctgagctaattttttgtatttttagtaaagacggtgtttcaccatgttggccaggctggtcttgaactcctgacctcg

SEQ ID NO: 64324 - DNA, 1693 bp, Homo sapiens
acttcaggtctcaccgatcccattcactgttagagttaagaggtggatggttccagttatccatctctgttccagtctctctagaagcatccagtagtgttatctctaacttagaacatttgaaatctcattgtaatattgcgaaatgtatatttggtcttggtccctgtttcttggcatacaactcctaaaatccttggaatcttcaaagggatcagatgtcttttgtgtgctaaggattggttggtggctggcagcctccaggtagcttcaggatggaggatggttaccagaaagaccatggcagggtgagagggcttggactttccctctccctgccccacctccggtgaagcaagaggggttgaaggttgaaggttgggctgatcacccgtggccaatgatttaatcagtcatgcctgtgtaatgaagcctccataaaaactcagaaggacagcgtttggagagcttctgatagctgatcatgtggaggttcctagagggtgatggtcccagggagggcatggaagctcctcgcccttcccacatgtctcaccctatgtatctcttcacctgtattctctgtaatatcctttataattaaccggcaaatgtgtttccctgagccactctagcaaattaactgaacctgaggaggggctctagggaaccttgacttatagctggttggtcagaagcacaagtaaaacaacgtggggcttgtgattggcatcagaagtgctgggggcagtcttatgcgactgagccctcaacagatgggatttgacactatatccagatacatagtgtcagaattaaattggaggacacccagctggtgtccattgcacaattgtttgcttggttgttggagaaaaaaattccctcacacttcttggtgaccagaggtattgattgttgtggggtgagtgtgaggagaagctgttttttgtacagactcatcttaatgactgaaacgtacttcctctgtggttatctctgtgccaatgaagatcacccaggagcccatcttaatctttgacgtctcaaccagtcacctaatcttgttgattttccccatgtgatgttccatttgcacctgtttcattccatttatcaccaacacccaagctctgttcacatggagaccttcatacccacccagatagtctcctcacctctcgtcctccacccccaaacccacctgccccacccgtccacacatcctgccatgaagtactacctttcatcacaacaggttaacgaggaagccgactgctgtcgcagagagagctctggcctcaggtgggcctttctcaatatcttcactcccgggaagaggagattgatgacagtcccttgcagatatgaatggcaggaggctgggggtcaggggtgggatagccatagaggaagcactttcatgccttaaggttgccttcaaccttaagttaatagttggctgcacattgaagaaagtcagataaatatttaaaaattcacttttaaccttacataaggcctggaagagcacttccatttgccaacttgctgcagggccaagacgttttctccgagtttgggtctgctgggtgggttctgtgttgtctcttgcacaaaccttgtctccagtctgcagttggtttcatgaaagtggtgtgattcctcagacaagcctgaagttatctgggtt

SEQ ID NO: 64325 - DNA, 840 bp, Homo sapiens
ttaaaaatggttaaggtggtaaatttcttgtgcattttaccatagtacaaagataggtgattgcaatagatgattgcagataataacacaacatacatacagacaaagacacacgagcagaagcaatgggccgtacaaagcttcctgtgcttcggggcctgggaaggagcccggcaggggagctgtgagggcagagcagagggggtctggaaaactgggaaaggacccagcgtgaccttggaggtagcaatagggtcagccctgctgggcacaaggctgacctgcaggcccgacacatttgagggtgctcgggccagctggcatgaagccgctctctcttgctggcacgtcaaagctgaatgtccaacaccatgacaccctggtctggcctttttttgaacttgcacagctttcccgtcaggtcctggagacagggagactttaggcggggcgatttggcccacggaagggaaggatttcccacgtgggctttattctagggagtgcgaggttggccacagtcctgacctgacagccagggacctgctgctcacaggacatttcagagtcagagccagattcctcaacacttacgaggtgttcctgtaccaggccgaggcccctgtgatggtgagtgcctctgagtggggcaggggtggggtgacccatggctgggtctcaccgtgggagcaggctgctggccatgtggggcccgtgagagacccggcagtccaaggacaggtgttttgttttgagcgtccatttcagaatgaaaagacgtggtgttagcccctttaccagcagggacattcccaaagaatgctgccctctgacacctgg

SEQ ID NO: 64326 - DNA, 1498 bp, Homo sapiens
acagttcaggctccacctctggaggcaagacatttactctcagtagcctcagctttcttatctgcaaatgggaagaatagtccctcctccctcctagggctatggtgcagattaaatgagatgatgtggaggatgtccgggcatgtagcatgcgttccatgtatggcagctattatgattatttgtgcaagtcagagaaaacagaaacactagaaccctctgccattgtcagcacacacacaaagcagagacactttctttgaccctctggttgctttggttctttcggtgagtggtggccctcaggagaaccggcccctcttgcttgaagggctcagccccagtgtggacttggcagccaattcccacaggactgggcagggccccaggggttggccctaatgctgttgcacactctcaataaaggatttccatgctttgggagcaaagatgacaagtcgaagggcagagatgtgcccagcagctgcttgtggagacccagcacagagaggtgggggcgggctgtgcacatccagatttggctctggaagtgccaaggaagaccaggcagcatctgagggactccttgactggactgggacttagggctgttgggaggcctgagctggcctgagctgcctcacctgtggcacagacacaggacccaggttcctgctcctgccccactgtgtcgtacagccctattcctgccccaagctcttgtgacacacacacacacacacacactcacacacacacactgggaatcatttgcaagacctgtcttttctccttggctgtaaaacaggtgcaggaagactatagttaactagatcacggagtgtcaaataacccagtttgggattacggggctcccctccccccaacttcctgccgcctgcaccttgatccgaaagtggcagggaaaggataggttgtgcaacttgaaacatttattcttttgtgcctcgttagcaactgctggggcaaaggaaagcatagcttcagaggaggttgacacagacagctgaaatgacgtttggggattatcttcagatttcagtgatcctccctcccttgttaacacagagaatgtaagagtggagagtgcaggggcattggattgcggatgacctaggatgtgaggggactgtcatcccacctgccccctcattctttcctccagatgtgcaggggcagcaacatgcccccctctccccaccaggaaaggacggcagattggcctgagttacatccagattggtaacaagattgtttgttcatttgattcaccacatgtttgtgtaacgcttattgcatgctagacatgggcccttggagcttgctttttgatgggaggttgacaataaacaaagaagaaaaaggaagataatgatggattgtggtgagttacatggaggaaagcagcagggtggaaggagagagtaactgggcaagctgcgctacaaggtggccctggaggggcttctcgcggaca

SEQ ID NO: 64327 - DNA, 1205 bp, Homo sapiens
catctcacatggtcagtgcagcccccaacctctcccagcccggccaccccacccctgagccaggctgcagactgccctgccctcggggggagggggctggggcggctcaggtagaaaaagcctggcaggcttgccccctcccagaagtccaccccagcgtgcctctccgtgccttccctttgggggtcccggtgcactaggcaggaatgacacgggatgggcttccaggccaggcagcctgggaggggatttcatcctcaggaggtcacccagcctcggaaccttcctggctcctcctgtgagagctgccctcagaatccaatgccccatatttttaaatctgcaaatatattttcatcataaggcagtggatttaggatctgtgttattaaagtccaaacaaaacaccaaagcccttcaaacctccctggagagggaagatttatcggctcctgctctcctccccaggcacggagccacactctccaagcttcgctttttaagttttgcagcattttccaaaattgcctttttctgcccttccgattcctgcttggagcctttacttttcggctgtttacagagactcgagcctggtgacttccacctttggagtatgggagtgccggaattgctcggctgagggtcactttgtctgccgcacagtggtggcagctgcgcccgtttttattgaacttgctcaacaaatatttattgagggcttgttatgtgtcccgggccctggggatacagcagtgaagacttcactttggggaggaagagatacaataaacaaaccaaactgaaaaatgtatcactgcacagggtgacaagtgccgtgaaggaaccacatccgctacagatggagttgcttttcagaacagccagaggtcagccattattcagtgaatcaaggacatacttgagtgagaaatatctttgggtttaaaataattggatgtgccagtaatacaataaaattgcttttctgccatggctcctaaactagagtaaagataatgagagccaacattttttagtgcctgtcatgtcgggcttcatctcgctggaactttaaaagattgttacaaacgctcacccccgcttaataaatgaggaatcggaggttcagagaagtgcagcaatgtgtccaaggacacacagctttgtaagtcacagagccagcattttgagttccttggtcg

SEQ ID NO: 64328 - DNA, 1377 bp, Homo sapiens
cctagtggtcctgaaacttcccctccctggaggagggatcgtccccactgcccccactcacttcctgcttatttgttctctggtctttgtcactgtgtcctcctcccttttttcaggacttttctgctcatcagacaaagagctgtgtcctgaggtaaaacctgaacaggttttgcttagtccaccaccatctgcctttaattactagagattgctcccagatcccagcgttgggtcatcatcagtttcgtttttggcactagtgtgaatgttcaggtttcctcattgtctttatggctgttttggaacaaaacaaggaggagctacatgagaggctgccaaatagatgccagtttgaagaaggagtcaaagctgcattttaaaggtgtggtttgtccatcttgaagcactctctgtagctttgtgtgtaccatagagagagaacatacggtaacattttccttattcgggggccattgtccagtgacctcagctatctggaatacaacctaaacaaagagtccacaagcagccaaatagctgtcacagtgtccatgttctgaaggttattcactttacctaagggagaacatttcagcctctccttccaagcctagttacctgtattttacatacaattctagcaagcttggtctttgttttcctagcaaatctgaagggcataggggacattttgcaacaagcacactgatctgacaagaatttccagctgacagaaaggaaagacaccaaaaaaaaaaaaaaaaaaaaaagcaaacgcaactccaaatgctcagagggtgatgtcattttctgtaagggcaagcagcctgaggttctccctgtgagcactctccagtttgactcagcagccaccttctctggatctttcctctgccacactgggtgctctgtgcaaatcatgggtgtggagactgtccccatctctcacagttggttcagactgtggttctaaccctggctgtgctttagaaccatctggggaacattaaaacttcagacactccggccattccctaagacaaagaaatcagaaagtcctgggagtgggacccaggcatcgtgatgccactgcatagccaggactgggagcaggaggttaagagcagggactgggctgccagactgcctcattgggcacacgaccttgagctggtgagtcaccaatgtctctgtgccttagattctcatctgtaaaatggggcctgattgaagggccaagacgagttcatcaaccgtgagaacagtgcccagcgcctcattagtttcgtgagagtagctgccattagtgaggtacagactggatattcatggtgatgactgtgatttgtcaagcagggcctgtgagtgcaatgt

SEQ ID NO: 64329 - DNA, 1762 bp, Homo sapiens
acatcatctccgtgtataagcagggcacgagccgcatccgccgcggtgaccagagcctgtggatccgctcgcgggacatcgcctgcaagtgtcccaaaatcaagcccctcaagaagtacctgctgctgggcaacgcggaggactctccggaccagagcggcatcgtggccgataaaagcagcctggtgatccagtggcgggacacgtgggcgcggcggctgcgcaagttccagcagcgtgagaagaagggcaagtgcaagaaggcctagcgccgaggcagcgggcgggcgggcgggcgggcgccagggcggggccgagcgagagcgggcgccttggcccggccgccgcggacttggcccgcgagggctttcccaggtggggggagggagggggcggggccgcacggcgcggggggcgggaccctcggcggcccctccccctacccccaccctgcgcgctctgggcgggagccgcgtgcacgcggggcggggtgcgccgccggccgggccctggagaaatgacgagacgtagctacctcacggggctccttccagagcagagacgcgcttccctgggcctgggcgcggccgccgtggaggggctgggggcagcctgccctggggcccgggggcgggcgcagaatcgcacaactggggccccaggcgcggggcgtggatggcgcggagacgtggacgggaggagaactgtgaattctcaagcccgtagtgtgggcggggcgcggagcacccaccaaaccaccacccgacacgcagccgacgggatccccccctttctccccggccccttctagcagttccccgcgggccacctggctgtcacagcctggactcctccatctgaaggggcctggcagcatttggggagtggacagctcctgtccagccagcatgccccaggcggcctctgtctccactgctacctgctgagtgggtcctactgggtgggggcttggggtcggtgagtggttcacctgtggagagaggagaggaagcccctgctgctgcctgtctctgcccctgcccctgcccctgcccagcgtggggctggcccatccggaaggcagtgggcccagggacacccctgagaagcccaagccgggtggtcaccgcctcatgctggagctgcctgttggaggaggcatcgcaaacgcaaaacctcccagagagtttccttttggaaacttggaaccagccctttttatgacgttttccagggggagggggaggggcactggctgggtttacggcagtgacactatttatgtaaatgacatcagctcccgcaaggcccctcagcaatgtcaacagctggaaagggcctgaacgggcttggagtctgcaggctgcgaaggcacttgggcctggcttggggccgggggcttgtttgagctgggatggggtttgctggctcagtgaagtaccagagtgcctgagccatgggtgggcaggggcacaggaatgaccaggttcctgggggccaaggaggccatgctggcttctccaagggaaggcacagaggctgccggcctgccccctacagctgtcttgggtctggcctgggccacaccttgaccgtgcctttccagacggtctttgtggagtctgcccgtgccctccactgtgccccagccctccttccaaaatctcctagagacacggtcctcaagcaggcagccccttttgttctgacctcctcacacagggtccattcctgtgccctggggcctcctggctccctgcct

SEQ ID NO: 64330 - DNA, 1001 bp, Homo sapiens
gcaggagaatcacttgagcccaggaggtcaagactagcctaggtgatatagtgagtgtctgtctctcaataaatgaatgtttgttagctggggatgcagcaggagcatcttctgaaagaagggcaagttgggaccccactgtatcttaagcggtgttcctataaacaaagttattccatgtacctagcaagggtggaccaagtggttacctaaatagagatgacctgatgggtaaaaagaagtcctttcttttcccaagtgtcttccccaaacagcttcaggatacccaaaattccactgctggtagattcctgtttgtcacagtcagcctcctcctccgttcccatttaaaatggaaatgtcactggctgggaaagcacactctgtttctgacgtgggagcatggatgaactgatgggagtcctttcctcttgagcagaagaagatggacagtaaaagtgtcagtgactgaaggaagcatggatgtgagcacatgtggagcgtgagttggcggaggtggaactttctgacctctgtactttggccagcccagccctggcacccacaggcacaggagagttcctggcaatggaaaggctgatgaggaaatcagctcaggttttcctaagtgctcttccaacatcttccttccactgccacgtgcactcctgctttgtctttccctcttccaagtaactctctgtgagcaaatgtacttctgttattccactttaaaaaccaaaaaaaccgggccagccatggtggctcacgcctgtaatcccagtactttgggaggccaaggtgggtagatcacctgaggtcaggagactgagaccatcctggccaacatggtgaaaccccgtctctactaaaaatacaaaaattagccgggtgtggtggcggacatctgtaatcccagctactcaggagactgaggcagaagaattgcttgaaaccagaaggcggaggttgcagtgagccgagatcacgccactgcactc

SEQ ID NO: 64331 - DNA, 1431 bp, Homo sapiens
gtgccatcgcagctcactgcaacctctgcctcccgggttcaagcgattctcctgcctcagcctcccgagtagctgggattacagtcgtgcaccaccacgcccagctcatttttgttatttttagtagagatgaggtttcaccatgttggccaggctggtctcgaactcctgacctcaggtgatctgcctgcctcggcctcccaaagtgctgggattacagtgttgagctaccatctctactatatttactcactttcaaaagaacccttttctgttttccttccagataagttataccagccaaaatatcaacaaaatggtgaaaaatcttaattccctgtctgcaagaaaaaaaatatttattagtgttaaaaaaaaaaaaaaaaagactgtagaaatccaaaagtcattttgaaagcaacgaccgttttaagggccaaaagagaaatacgggctgtttcgagcgtgaatcaaagtgtcaaagaacatttggaggctgctcggtagacatgcactctctcaaggacaactgagatgcatgcctgactgagtcacggctgagcacccagcgctcagcagtcagctccagagctgcagaaagtaacccagtgagacccgcggtgccggctacaggtccctgacagctgatacccaacttcaatacaaagatcaatttgctgctagtccagagaaattgaccttcgtgttcagactcatgggcagaaaaagtcaacagtgatttaaaaatgaaccccaaatcaattattctaaggaatttaacgctggttcaatgactgaaaattgtcattgcctggctctgaaatagaaaggaaaggtgagccaaaaaataaataccgagtcattggtaaggttctgttggagtcaattaatggatccctagagctgattaaagaaaaaaaaattattaatgcaacatctggagttaagttatttaaaagctaataccagggcttatgccactgaatttccaagggacttggcaaaggagaattatctatttattttctaaataccacagattcctttaaattacccaacctctcttgcttcattcaaacatgtgcagcttcaagtgggcgtctactgcattagattagataagtcacaagggcagagtctctggactgcaggcgttgctttgcagttgagctgctctcttcacatgggtaccaccataatgtatgctccagggtgaagagcagcaggagtagggatttactcacggacagaacaatcaatgtggccaacagagatgctttgtacagaattactaattagtgcagcaaggtattaattattataatttctaaaaatattacaattccatctttaattttgtttagttccattcaacttttaacagtgattgtttcttgtaagcaacgttagatgtcacaactaacatgaaag

SEQ ID NO: 64332 - DNA, 583 bp, Homo sapiens
ggatacttagaatgtttctatatttctaaataatgagtctataaattctttcctccattatcattggttctttttaatcatttccttaacaaagtgtgattatgactgcctcataaactttgaaacagattgccaaattactttttaatagacttatactgccactgttggtttgatgggattcattccacttgtcagttatgacctcagaagatttcctaggccagagagccttggggaattcccactctgcagaccaggcactaccaaggtgggaatttccctaaccacagtctattaagagcaaattaaatacaggtttcagagtataggttgtgaaacaaccagctgactagttcagattcctgactgtagagcctccaaagagaaactgataccctgcttcctggtcagtacttgcatttggtttcacgaaggagcttatatttcaatcacatgttaatctgagatatcgagtgacattccagcacagaatggacaaaatggaacaacgtaaagtataccacaaaatgacagcatcacaaggattaagaaatattatatgatgtcaaaatacccgact

SEQ ID NO: 64333 - DNA, 1194 bp, Homo sapiens
aggatgtgggcaacttaaacaattataaactatattagaaataacaacataagacacatattccaacaagaacgttatagagctgtaatatgtttttaattattaagcagaaaggtcaagtctatgttcaataacaatacgttccttgggatcaaacaatatgttccttgggatcaaaagttgcatctttcatcatgcagtccttgggattaactgctaaataaatcacccttatcagctattgttttactgcagaagctactgctaaaggaaaagacttcatgatattaactcaagaaagtgcaaaatgccttataaacaagtgcacaatttccctcccaggttcctgtatctggaagggcccccaagatctaggtcttagccccagctggttactaactggctggtggccatggattctgaacctcggtttctccacctgtgaaataagggggtttaccgggatggactgacatgctacaaaaacgttatttcgacttcacttttataggagtccagggaagcctgcaccagccagctagctccaaaaccaggatgggcgggaaatccccgcaacgagatgcagcccagaaaagctaaaggaatattcagagatttggcgtaagtcctcagctctccagcggaccacctggtctccttcccgggccacccttgcaaggaccaagtgtggcgggatgtggctgagccccctcagtaaaggaaaggtctcgctgcccctcccctcatcccgaaaggccaccagcggcaatgcgaagtgattgcctgctctccggaagcccggcctccccgaaggtccctccacgcaccgccgccctcacccgggactcaccaggggtccggtgccatcctgcagactccgcccgccgctcggactcttcctgctcttagcagctgactacggcggcccgcgcggctcactccccgcagttcgtcccgtgcgcgaccggagcctggagtttgcaaagtgagtagctagggcctcagaactataatcagagaaagcaaagcgctcccctgcggacagtacactggagcaatctactcccaccaagagacgcgaactgctaagctcagttaaaattgttaaatagaaacaaagcattttcccaggaaggtgggagcgctgcaagacctctctgtagcagttacttaaaaatttatcctgcttcaaaa

SEQ ID NO: 64334 - DNA, 2013 bp, Homo sapiens
tgtatttttagtcgagacggggtttcaccatgttggccaggctggtcttgaactcctgacctcaggtgatccgcccgtctcggcctcccaaggtgctgggattacaggcgtgagccaccgcgcccggccaggatcaagaatatttaataaatgatgatcacttattaaacaacaagtaacatttcagagcgttagaatactgcatctcacatggtgctgatctcttcctgagctagaaattgacgagaaagtcattttgcaagaccttgcctgattaattataaacctgacagttgcatgggataaagtgaggggtgggggaggggcccagggttacccagggaatcaagggcggggcaaggccaaactaattctgattgggcaatcattcaacaaggatcgtgcgttaaggagtgaaccagaaaccgcgtagggggcgcgcctgagagcctgaaaacttcctggttagcaaatactgaggctggaaagggcctgaacttggcagtccatagatccaggtcgagttccggtttccctgcttacggatcgggcggcctccctacgttgcgataacctctctgagcccccttccttgccgattaaagcaagggtgatcaagtcttgcaagtttttggaaaatgattctaacccaatctgtggtgtaaaaaagcaaaccacaaccactcgggggcttttttcacagggcaacacgtggctcccagttcaggtcccgggttggcgggtgcaggcacagactctgcctccccccaaggggcagacggtctggaaggaggtggcgacacctgtccgcacacacctgagcctgcggaggaaccagcggtgcacaaaagcgctccccacccccacacagcgcccagcgcgcgcctctcaccacgcccgaggctgtgctctggagatgcctgccttgcccttttcttcctgcagtagccaggcctttaccatttactaggcgctttcagaatgttcatttctccgtaatttccactgcttgaaggctgctcgaggaacaggagcagcggcgaaacccaggtctgtcggtttacgaggtaaggaagggtggggaatccgaccacgaagactcccagtcagcgcagcgggggcggcaccaggcaggggtaggggtggcccggcgctgccctggagggggctggtcgtgccgccggattcccgcgcggggcggggctgccccgcccttggctccgcctccgccccgtccccgcacacctggcccgcaggtagccggcaccaggagccttagagaagctgtagggcctgctggccgctcgtccgcctcgcgcccgggggctccgcgcctggagctgcgccggcggcagccatggacctgggccccggggacgcggcaggagggggaccgctcgcgccccggccccgccgccgccgctccctgcgccgcctgttcagccgcttcctgctggcgctgggcagccgctcacgccccggggactcaccgccccggccccagccgggacactgtgatggcgacggtgaggggggcttcgcctgcgccccgggcccagttccagcggcccccgggagccccggggaggaacgcccgcccggaccccagccccagctccagctccccgccggcgatggggcgcggccgccgggcgctcagggcttgaagaaccacggcaacacctgtttcatgaacgcggtggtgcagtgtctcagcaacaccgacctgctggccgagttcctggcgctggggcgctaccgggcggctccgggccgcgccgaggtcaccgagcagctggcggcgctggtgcgcgcgctctggactcgcgaatacacgccccaactttccgcggagttcaaggtaggcagcgctgcgccgccgaccgccctgtccccctggtttcgcctcttgaaaagtgtgtgcacgatcaggaaagggttttcttggggccttctttaaatgccgttgaccagttcagccccggattaccggctttgttttgagtcgatgtg

SEQ ID NO: 64335 - DNA, 1219 bp, Homo sapiens
gagagggctgcagtagtttgaaaacacttcgaaattggccgagcgcggtggctcacgcctgtaatcccagcactttgggaggccgaggcgggtggatcacgaggtcaggagagcgagaccatcctggctaacacggtgaaaccccgtctttactaaaaatccaaaaaaaaaaaaaaaaaaaaaaattagccggacgtggtggcgggcgcctgtagtcccagctactggggaggctggggcaggagaatggcgtgaacctgggaggcggagcttgcagtgagccgagattgcgccactgcactccagcctgggcaacagagcgagactccgtctcaaaaaagcaaagcaaaacaaaacaaaaaactccgaaattagtaatcaccctcaatgactcaccagaattccctatctctctcccgctgtcaaatccccagggcctgggagctcccagtaagcctcagggaattgaaggataatcaagtttgtaatatgttaatgagggagatacaatctggaatttcctgggatttttgggtagtcagctttggagggaggagtggaggatcccagaatccaggctttaaatattatggattgaaatctaggtgagctcttcttattttacagatggggaaacattcgttcaacaaatatttattgaatgtccagagagtagactaggaatgcatggaatgcatgatgagtgatgagtacaaacccagattctggggctgctctccaggagcttatggtctagaggtagaaatggatgttaatgaaataatcacacaggcacatgattggaacagaaacatgttagaaaggacaaatacaaggtgctatgacagttacagcaggaaaatgtgattggattgggggagatcctgtggggtgggcagggaaagcttccctggagaggtaaccaaccgctgagttgaattttgaaggattaggtgtcaatgaagggcttgggaagatgggagagtgcattccaggacctgggaactggaatgccaaccagggaaggaggtggggccgagagaccttcagttcaataaatgaataaaagcccacttggctggggaggaaaggctggagaattagttgcagacacaccacacaaggttttcttaaggagtcttgtcttttcctttctctttctgtttctctttctctctctcttttccttccttccttcctctttctttctttttctttc

SEQ ID NO: 64336 - DNA, 1464 bp, Homo sapiens
tccaggttcttgagtgtcaccttggtcttcccctctaagagccagcggttcctgcgggttggcctggccgtgccgatcctcagcacagtggcagccctgaggaagatggttgcagaggaaggaggcgtccctgcagatgaggtgtgatagaattgcactggggcctggtcattggatgatagaatgctaactgagccagctgtctaggctgtttaggccaatttgtggttcccaggtgactccagtatgactcatgggtttctggttgattagtaatgcctgctgtctgggatgactgggccttgacttttccctgcattgacacagaatgaccagaaaagaacacctttgccttccgagaaggcaatgacaattatgatcataataattccagcaatagctacccctaggtagtgcttactaagtgtggggcactattctgtgaactttctattcatgcctgatttaatcacaggcgtcctgtgaagtagacattacaattatcctcatcttactaatggggaataaagaagccctgagaggttaagtgacttgcccaacgtcactagctagtaagtggctgagccaggatttggatttcgatggtttgacttcatagcccaagtcaccattgtatattttcagtcttggcaatataaaccaggacagtaaaggaacagtaaatgaagcaggaggacctgctgagagaactgaggatgtataacatgagagagaacatctggcggaagctgggatggctgtgttctacctgttttcttttcaaacgagtcttagtaaagcgattggattcacagtgcctggaggggccctcatgaggaatagggaggaggccgtggtggcgccaagccacatggcaggatgggagcggccctcagggtgattcagtagctccctaggtttctgaccctggacacagtatgtgattggctctgtgtccttaactgtgacatggaaattgacacttccctgactatctcatgggattttttcaaatcaaaaaatatttttaaccttgttgggaaggcatgccacacatacaataacgtctacctatctgaagattgtggtttgctggctttctctacgttcatagctacattcctataacctccacgcttcctgagcctccccatcaccccagtgggctcctttctgcccctgcccaatcaatccctctgacctctatcgctacctcatagaatatttatgactctctcaaatagcaggggaaatgtgtgtatcttgctttgtaaactttaaagtgcactatggggagttactgaaagagacggagagagagggggacagtgggtgagagtcctggggagaaagtgacagtaagaaaagatcaaaagggagaagtctatgagagggagcgtttgaataattaagagtgtgaaaaatctggcaggaatttgagaggtgtgatgtgttggttcaggg

SEQ ID NO: 64337 - DNA, 778 bp, Homo sapiens
gtcagccacgtgcccaccactttctcttctgcatggcatgagcctcaggaagagatgccccacctagcaagcatcaggagcccagattggcatctcccagctgggctgaaccttggagggcttataacatcactgagtcaccagaggctgttctaactccagagactttgggtaaacacagcagacattagcagaccatggtgtgttacaaaattgagaagcttccatgttttcctttccatcccaaataaacagtgaggatgttaatgagcccccaaaaggggaaatgaaaatcccttctccctgggattttccacagctctgtggcatgctcaggggaacgggctgtgtgttctgacctttcctccagagctttgtttactttcagagagctcaggaagggcctacagacactgcttggctcaggggacttggcagacgatagagaacgccacggatatttggcaggatgactccgaatgctccgagaaccacagcttcaagcaaaacgtgagtttgctcagctcagtgaggaggcatccagggtccaaaccaccctccttcgggacaccccagtggcctgctggctccaggggccacacaaagaggcttctccagcgcctctccccggggaagctaaggaaggtcccgcaaagcagcaacccttgtggcggccatggaatttcttccactactaggctgacatgcaaaatcctaagagaagtcagtcttccaggattgatcctggcatttgtgcttgctgttccccgtgcctgga

SEQ ID NO: 64338 - DNA, 550 bp, Homo sapiens
gagggtgggggtgaggagcagccttggtgcctgaggaatggtgtaggaaacatccttaccctggaggagtggaagtgaattctttctgcattgagatgaatacatgttcgtgttcccatggcaacaaagcatgctcactgttgtccatacctggaactgtgtgactcatttttggcagtgcaggagtcccgtccacagtcattagctaatcagcctggaatgtgtgcatgacagcactgatcatatctggggagataagcggggtctatgagtgtccccctgcaactctgaaggccaggattatgtctccttcattttcacccggcattcccgatccttggcatggtctctgttaccgaaccattgttaaggaatctgggtttgttctgggcttcctcaatcggcagaaagaatggtgacagagtttgagtgaaagccaaaggtagggtagggaatgaaacatggcatgaaaagggaagaaattggggttgtacaagctgttaaaatcactaggaactgctgggaggtgcagaattctgatttcagacca

SEQ ID NO: 64339 - DNA, 654 bp, Homo sapiens
ttgagccccattccagacctgagaatcagaacctggaaggtggggtctggtgaggtgggtttcagccaacaagccctgcagagcattccgaggcatgttcaagtttgagaatcactgatttagagccatgcttctcaaaccccgctgtgcctgccagtcacccagggatctcattagaaagcagattctgatccagtcgcctagggagggttctaagactttgcagttctgacaagctcccaggtgacacaatactgctggtctttggaaaactttgtgtagcagagatctaggcctgcatttcccagacaagctttatgatgaaagtcacctgggtgcttattaactatacaagttaccaggtctctcccctggaaattcccgttttgtggatctggctttgggcccaggaatccgctttttaaaacaactgctctaagagtttacctttaggcagatgattagaatcaccagggaacgtttcaatgcagattccccagctccaacccaacctactgactcagaatctctgacggtgcagccctaaattctgaatttttttttaaagaaagtaaaccaggcagccaggcatggtggctcacgtctataatcctagcactttgggaggcctaagcgagtggataacaaggtcag

SEQ ID NO: 64340 - DNA, 2602 bp, Homo sapiens
gggaggttaacttaactctggcttccagaagtaacaatgccaaagtagaagaggaatctaaaagtggagcttcttgcaaattacacccattatttctttgtacccttattcaactccccaaatgaagatgatgttggccaactagactaggcctaactcattaaccttcccgtagctccaaaaacccacttctcttaccacagggtagtggctctcaagttatttctgggtcagaattagaactcgagagaaccccaagaaaaaggcagatccacacataactaagttccactttttgtttcaatttcaacgtatacatggaactctggatggggctcaagtgacaaattataaaagtcctctgacttctcaatcacggtaaactttaggttcatacccttaagaaaacctgaaacttaattttttttttttttttgatggaaacgctaacataaaatccaagtcggggcatccagccacgtggagagggtgtaaagtctcaagttctctgtggagaactgggactacccgcaaggcacgggaaatgtaggatgaaattccatgacccaggtaaggcgcgcaagctaaggacaactttaggggaggcggagtagtgtctgaggttacgaccaagtgggatgtggccgctgggctggccgacagccgcgacgagcaccagaagggttccaggtgtgcactcaccccgggcttcgaggggcgcgtggagtctccggggcccttctgcgaccacgggggtggcggcctcgcagtgctgaggggccgggttcccaggcaatagccagggcgccccgaggcacgccacgcctccgcttgccgcgcgcagaactgcctcagcaagactctcgcagtcccctcggctgggccccaaaactcgagtccgcgaggcaagaagcgccaaagttggccacccagaggccgcataactcgtccgggtactaggaccagcatcgccatgagcctcggagaccgggtctcctttgaccctccccgcgatttccggtagcgttccgcttcctccggaagtcggaaggagtcgctctgtccgtcccgctcgttggtggcgctgttacatagcccgtagtcagaggcctttcagcccaggggccggcgcacggtaggtagttccctgcggctggaggcgggtctggcgcgggctgggcggtgctgcggggccgcgggacagcggagcgccgggaagggggctgccttaggggtccaggtgcgcggctgggccgaggcaaggcggccccaagcgctgggggcccccgctttggtcgtgggcttcggtgaccacagctagctcctcgcgccggggacacccccacctcggaagagagaacacactgcctagagacccacgggactgggcagcccccataaccctaccttgtctggccgactttgtcaacctcgtcctgccggccaagaggaagtgccagaatgttgactcctttacatctttgaaatagaaaccgacccattgcgattgaaatagtctttaacttaaaaaaaattgctaattaggataatttgagtggttagggcggtctggaagaactttaaatgcccagcgcttctagttatttaacattataatgtaacctaattaataaagcatagcagtgtgtaaagaaatatagacagcatgatatcccatccgttaacttagtcttcctgggtcccagtttcttaaaatactctcacggactcccttgctccctacagtttcgttatttgaagtttgttatgggttcctcatctggaactgcttatgttccttgttaatgaggccaagagcattcgtaggtttttcgttctttgtgaaagtctaacttcatttcatctgcctttatttatatcttaatatccgcaatattaaccactccctccccgcccctacctcggtggttgctttacaaaatacagagaaataaaaaaaggaaaatcgtcctctaattatcttccttaactacagatcccgctcctgtgtggcttttttttcccccatgggaccgactctgagtaggagaaactcgtgctctgatgattgttggaccagagcatggttggtttgcttgttttctatgagttagccaaactagccaactgttctgttctctaacccagtaacggaacatagtgttacctgtgtttcttgattcgcggttggactagaattttcagaaatttctgccaaagttcttaaatgtttgttcagcacttcaagtcgttaatcaaactatttttttctatcttatagttgcctgtgggtaggatttttgctcttttatctttgtgtatttgtttgcccagggataattttttcttgtaattgacaaaaagacataaaagtaccttgtgtagtcaggcagatagcatacaaaattattgttcatctctgattgcccaattgtaggttacctgatcagccacccaaattaagattgaagtcagtgtttctacctgatctattaaattttatttgctaaagtgcttcttttagtagcaacttcttcatattaattttataatattaaataaaatgctatcattgaaaacagttcttggggccagatgtggt

SEQ ID NO: 64341 - DNA, 1465 bp, Homo sapiens
caaggaaggcggatcacgaggtcaggagttcaagaccaggctgaccaacgtgataaaactctgtatctactaaaaatacaaaaattagctggccgtggtggcacgcacctgtaatcccagctactcaggaggctgaggcagaagaatagcttgaacctgggagacggaagttgtagtgagcagagatcgcgccactgcactccagcctgggtgacagagcaagactccgtttcaaaaaaaaaaaaaaaaggactgacctctgagatggctgctcatacttgtagataagattctggcttaaaccagaactgaatttgaggctgacagagttatcaccatattagatcggactgagtattactgtatcataccgttgctagttacaagggggccaaagtccaacggcctgacagtaatataatgtaatatgtagtgactgccactagcagtgataatgaagcctgatagatggggctgggtttgaatcctggctccattatttcctcagtttcatcaggttataaagaagataataccttgcctcctccacagggtacactgggggaattcagttatcattgtgcacagatgaggtgttgcaaacacgattccttagttctatcccacagttctatccctccacagggtaaccgtcaccgctcacctgccttcttcctcatgtaagatgttctgttgtgtacgatgcaagaggtaggacgccaagccaacagcccacaccgtacaaaagagtatgtgtattgcagagatacttttccaaataacattacctaaaaatagatgttctgatgttgttaaccacggaatcacagcccacagaaaaaaaaaatgatctttttgtatgttttgccatagtctgctttcagaaaagacattcagactccctcagccccatcgcccctttttgttttaggacaacacagaggtcacagcactaattataaacttcagtggccatttcttgtttgggttgttcagcagctccccttcctaggatgattacccttattttctctggggatccaccatgtccacactcacagtccatgtttcccagtgaactggactttggctaggtcaatcaatacatgttatctcctcagccacagtgatttggatcagcacaaacggacaagcaatcagagccagcaactgcattctgagactttggtagagtgaagaaacacagtccatattccactggacgtggcatcgtgaagatgtgaatggggggctgcagggccactgtgtggagcccaagagtgaagttagcatgacagatggtggaactgagaggtggagagaaggtaaagttccgagtccaccagtctgaagccagcaccacccttcaccttttcagtaaactgtaccaataccttttcttctcagctcatagcacatttgagttattttctagcttgtatctaaaggagccctaactgatcta

SEQ ID NO: 64342 - DNA, 3104 bp, Homo sapiens
gcgtgagccaccttgcccagccaggagttaatactttctagaaatataagtcactgaattagcagaacctcagaacttaagcctgttattttccggtcaaaggtttgcattgagtgtctggctagaaactcataaggaattgttcaactgatcttgagaggcctactctaggtcctcaagaaagtcctcagttgggccatctaaccaaagggaatactgcagaaagacctgtttccagaaagttcgaaattcacacacacattacattagaactctgatcctgcctattaatattttaggaaaaagcgcttcccaagggtttgatttttaagtttctcagaaaattaagcagggaggaggggtaaagacataaaaccgtgtgttttgtgccgttccccaattcttccaaacggaggaaagcctggaagcggctcatactcaccacccacacctctgcatctgggtcatttacctggaacgccagaataccaaggtgttagcagacatcctgtgctgttccattccttttaaattcatttaagcacattttttattaatttgttaagtgccagacactgcaataggcatcgagggtacaaaatctgaacaggatatagtccagatgaggacgggtgaaggggtttctggctgacacaacagatgtttttaacaggcagccacacatttttgaaaagccttcacgggagctctggagaggactcgccaacccagaacgggtattttaagggccctccacccccaccagtctcaagaaatgagggaaatgattatgaagggggtccccaagccgactaaaaagtttaatgatgctataaagggttttggtcggcttcgtctcctaggccctgagatatgttcagtgtcgtccgcgggccggacgttaacgcaggagccagggccgcttcttctgaggtcccctgggaagttccacgcgcggaaccagccccttccagggtgtgagccctggtatgggactcgcttccatgaacacatccgcgtctcttagacgggggagaaagtgggggctccccaagcagaaagcccaagtcccgtcctccccactaactgtgcgcccctgcgactctgcccgctagtcagttacacggcccgctaggccagggggcggagctgggagccgggcgggtccccctcccaccgcggccgcctgacctgcaccaaggccgccagcgcgaagaaggcggccatgagtccgttgcaggcccgccacagcgctggcgccatggctcggagaacacggcgcggggcggtgagtcctgccacgtgcggggcggtgagtcctgccacgtacggtccgccttcctccttgcgcggagggaccgagacccccgcctcggtttcggtgccttggggacactgccgtggccgtcgctccgcccgggggcggggagcgaagggcgtgggtgtagcccccactcagcgacccattcagcccgccccgaacgccgcggggtgtaggcggcgccgtcctggtttcgcggatgggaaagcgagtccctcagggagcgcaggtctcggtggtggacggaagtcgaatttgaacccgtataggttcaactccaaaccctgttttcactaaagctaccttcctcacaaaaaaaaaaaaaaagaagaaagaaaaaaaagaaggaaaaaaggaaggaaggcaggcgggaggggagagaggaagaaagagaaagaaagaaaaagaaagaaggaaagaaagggctgggcgcagtggctcacgcctgtaatcccagcactgtgggaggccgaggtgggcggatcacctgaggtcaggagttcgaaagcagcctggccaacatggtgaaaccccgtatctctactaaaaatacgaaaaaattagtcgggcgtggtggcgggagcctgtaatcccagctactcaggaggctgaggcaggagaattgcttgaacccgggcggcggaggttgcagtgagcccagattgtgccactgcactccagcctgggcaacaaagcgagactcctcaaaaaaaaaaggataaaaattgtttttacaaaaataagaaagagaaagaaaaagagatgtgtgtgtgtgtgtgtgtgtgtgtgtgtgtgtgtgtgtgtgtgttctgtttagtatttatgcatttccttccaaagctcaggaactttcaaatccctgtaagcattatggtaatttctagagtgacgacagttatattaacatcttatacggctcacagcttttcggcagacaggctcatttatcttcatgggcttttattataaaagatatttacatattatacatatttacaattctctcccaccaccaaaaccaacaaaatttccaaaattgctcatgaatttcttatgaaccgaagacactgaaatattcactgttctcccctagtctgtctggtctttttctgttttgtaattcgcccttctgcttagttcctccccgggctcatttacacatccataggcctcatttctgctgttctaaagagtctttatcgcttcaaatcaggagcttctgtgcctgtcctcttttcctttgagctaaatctcctaaaactgtctagttttttttttctttccctctcagtttcattcttttcacgaaacacttatttcaagaacgttgtctgctctgtgcctggtgctgggaccgtgaaggtcccgtgccgggactaggcagggagcctggcggctggcgggggtgggcacccgtgtttgcagaggtggggtggggacagcggggaccagcactgggtggagttccacagctaaatcagccctgggattggaaacaagcgaagactattctcactgtgcttttccttacataaaagaaaaaaatgagagcgagagtgctaggggctgacttgcattccccctgcacccccaattcatatgctgaagccctaacccccagtgcctcaaaatgggactgcatttgcagacagggacttgacagagatgattaagttaaaatgaggttatagggtggaccctaatccaatatgactagtgtcctgatacgaagaggggacagttacagagggaagaccacatgggcacacagggagaagacggc

SEQ ID NO: 64343 - DNA, 1464 bp, Homo sapiens
ttttatggatagagaaacaaaggcatacactagcttttaagtaccctggttaagcaataagtgagtcagaaattagacttcttcaagctcatggtgaggccttctgcaggtttatgaagggagtgagtgaagtgggctctctctcccatgagagtggagcatttaactcaacagctaccctgtttccatgaactggagagggtggaaggggtcatctgtagaccaggggctcaattctccaaaggctgaaggggtgatgtttgaggtcctcctttgatgccattcttcttatgtcttagctattttaaagaccaggaagattctccactcatgcccttgacttttagagccaattagatgaagctgtatttggaggtaggaagagaagttgagtgactttgaagccatcttctctctgatcttgactttctgattttggcctgggctgttggaattgtatgtgtccacaagatggcggacttctgctgggaatggagtcgtgcgggcatggaacgaaggaggggaggagggaagagtgggctgtgcctccccttggctctcccaggaagcctgtgatgtagacttctgggtgggtacgaggttggcatcagctggaggtgaagaagtgcaaacagagctttacacttgatcttaaccaataggcggagaagtgattcaaatagaactttgtaccaggaaatattcatccccaaacaagggtgttgcaagaaaagagctaagctttgctgtggtgctggcagagcttgaaactgccaccccagtactccaggaaattcagatatgcttgagaggagcaatcacttctaatgtaggcgtactctaaaagtaaatgatgataacaactatgaattgatgagtatttactgtaagcccagctacggccctttcacctcctgatatctgaaagccaccacaatttctgaatttttacgtgtaaactcatacccaccctcctatcccacaagacctgagcccctccggtttccctctctcacccattcaagtgctccttgttatcagttgcttagggctgccttagcaaattatcaccagcttgccttaaaagtaggggaatttattctttcacagttctgtaggccaggtacccaaagtcaaagtgtcagcaggactgcactccctctgagggctctggggtaaagtcctttcttgctttgacagcttccagtggctccttgtggccacatgactccaatctcttcacgttaccttctctgtgtctgtccttctgctcttcttttataaggcaatgtatcatcagattcaggacccacttggacaatgcaggatgtctcatcttgagatcctcaatgtaatgtttgcaaagacccttttgccaaataaggtcccattcacaggtcccaggggttaggatgtagacatctctttatgggagccaccatgatcattgtagaaacctggaag

SEQ ID NO: 64344 - DNA, 603 bp, Homo sapiens
agatgaggttttgctatggggcctgcgtgcatttctttgaaatgaccctgagcatgctaccacccagtgattccacccctaaggcataaagctttccagtggctgcaatgcaagaccctgtcttaaaaaaaaaaaaaaaaaaaaaaaaagacagcgctgttacacatttcaacagagccgtttaaaagacatttatcagaattctgctgagcaggctttgaaattagttctgctcagatattggaacttcttatctccgcagacaaatagatacagccccgtgtactgtgggcaggaagtgggcctttgatctctgtggggagacctgctttatatatagcactttaaaaaatcgaattatgttctgtgtaagtttattttgaggacgtcatactctatggaaacaagtaggattcctttatcagaaaggagattgtaggttctacaatcacagaacaaatatacggtgcctgctctgctgatcatacagtgactgtttgatgaagttcaaatacttgatggaaaggagcaaaacagaggaggatattgatacacacacacacacacacacacacacacgcacacataggcatagattgtggg

SEQ ID NO: 64345 - DNA, 1989 bp, Homo sapiens
ccctttctcttcttctcgccctctcttttttcctttctccctccctctctcttacccttcctcctcctctctctccctctcccctttctccctctctttctccctttctctctcttcctctctaccctttttctttctctctctctccctttctctgtccccctcccccctccttttcctttcttccccctctttcccttcctctctctctctctctctctctctgtctctctctcgggtttccctgcctttctatatcaccttgttctccctacccagactgctgtcctctaggcttagctgagcccttctcatcctgggagcctcgcctgggccctgtgtctggggttggccccctccatgctcctccaccccacctgctgccaccttgagtcttctctctgtgtctcctaatagtcaatgtctcactgccctggaggcccctctgtggcttagaacctggcatatggtgggagttctgagtttgccagtcctgccttccttccctccctctccttcggcccccttggtctctttcagcagtgttctcaagctttagcaagcatcagagtcacctggaaggcctgtcaaaacacacattgctgggccccacccccagggtttcctattcagtgcaggggaggagtagatgatttgcaattctaacaatttcccagatgataatgacccactctgagagccactgctttagagaagggtgtttcaatccaggcactatggacatgctgggctggataattccttgttgtgtgccctgtcctgtgcactgtaggatgttgggcagcatccctggcctctacccaccagatgccagtagtaaccctcctccacatgccacaaccagaaatgtctccaaacctggccagatatctcctatgggggcaaaatcaccccaacattgagaaccactgctctagaactctttgtcctgggggtggagtggactctgtggggacttggcaaggccaagttctaaattactgtcctcaagccaaatcaggccagccacctgtttttataaataagggctcactggaacacacagccccacccattcattgtcatcttctttctgctgctttcttgctacaagggtggaactgagtagttgcgacagaggccatctggtctgcaaagtctgagacattcactatctggctcttttcagaaaaagtctaccgacccctttcagaccctgaaggggtctggtagaatgtgatgtggtagaaggaccggggcaggtgggcccacccactctcttccatccaaaggaagggtagtcctccaggctgaagctaaataaagggcgtcttctatccccaggagtttcctatgctgggaagggggttgggggtggcattgggcccggcagcctggggccaggctgggattttccaccactgcctggttcacggccatgtggtcacctccctttgaccagacctgggctctgcttatctacagggtaaacaagagctccgcacacagccccagggagaaggaaccaagcgggtagattctgaggcagagtggaagtgtacatagcatttgggtctgatatgtcaaggggaggactggggaagagggacgttgggctggttctttcattcatttgacatttatggagcatctgctgaacccaaggcaccatgtaaaaggcacagtgaacaagatactgttcttgtcctcttggattttcagagtttggggaaaacaagcaaggaagggataattacccttggggaagcacaggggtgacacagaggaggctctaacccagtcctgctggtgtggtttgagggggctttgaagacaagacattcaatacctatttttgagtcacaagtctactctgttccccttcctttaatgggacagcttttaagccccccagattccttcctaagtgctccagctatgtatcagctcaagtctgtgccctgattgtcatacctccttgagctaagc

SEQ ID NO: 64346 - DNA, 517 bp, Homo sapiens
ggcctcaagtgatcctctggccttggccttcaaaagtgctgggatgacaggcatgagctatcatgcccggcctcaacctcatcttacagagcctctgaaggctgagctaggaatgtgggcatcagctctgaatgcagggagcccacattctttccttttaccccgctctgagaatgagagagctggcaaagccagttacaatctgcccgtaaatcgtgaatgtgtctggaattgacatataggccaaaggtcgtaggctgtaggggaagtgagacgagctgcttttcaaatattttttggcatcagaaacttgtgttcatgtaaagtcttacgtgccagtttaatgtgcaaagctgctgagagctccactgttctgggtgaaatgtgtgttacggggtgggtagggctgctggactcctgtcccctcactctgcccctcaccccaggcccaattcccttccagggacattggcagaacacagtttgaaacctcccttggaaaccacatctttttttt

SEQ ID NO: 64347 - DNA, 1216 bp, Homo sapiens
tatgcaaagcaattactcaacttaggcagcccagggagggaccaccatcttccaactgctccacctcccactacgtttgtctttgcctcctttcccttcccatcagggttcatgaccaaggagacgcaattctgtgagcctaagtctctgctggtctggtcctcttggctctcttgagagacccaagtacaggtgacttccctgactctggctgggctccgtaagctgtcttgaggctacgcagcgtctaaggcgttatccttaacctccagctccctccggctttgcttttctctctcttcttgactcttctgaagtttttccttgttcctgtctctcttcctcctgtctgctgcagcctcacacaccagacagttctcaagatgtccttcgggggagcctccaggaaggtctgtcccttctctttctcggtgcatataattgagcagtgacgtgggagacagcagccccctgggctctgcgccgggagccgggagcgctaaagcgagggcaattgtgtatggggaggtggggacggggagctggggacgtgaagaatgaagagactggtggagtttacaagaagtaggagtgggagtggcggaggaaggagcgtctttcttcggggaagttcccagggcaatcgttatctgctggcccctgcccctcctgggggggggggcgtcccaggaaggagctggggctgagtgggacgcggtgcccaagggcggggctgtggtcgagggcggaggtggcctcctcttggggtgtgcctgccacctagtggtgaacttggagcagtgctgctatctgaagtcgacttcaattattccttcgcgatctgtgtctggcctggtaattcacggtggactggaaattagaaaatcgaatcttacacattgctgataaatactatctcacggtaatattcattgcaatttcaaaatgtcaaataattaagacctactagtttttaaataatttaaaagactcatgtagtcatgtatgcatctcaccatcaaatattgattatataggtctcttatataccagacactgttttaggttaggcattggaaataaagagaactatacaatttatgtgaaaaaacaggcaactgaatcaacaattccaatccagaagcaaaaactcttcaatacagccatgtctgtgctgcgcaattgagaatacaaaggagaggcttggcaagacagg

SEQ ID NO: 64348 - DNA, 941 bp, Homo sapiens
gattccaaaagtgagacagtgtaagtaccgccagcctggccatatgggcctctgagatatgggagatgctggttatcagaatgttttccttacaacttttctgttcctgactctgcacatctcctcgttctgcacacaagcctactgtctgctctgtttgccgacaccctcagactgtggactgtgtgtttaccctggttactccctggcccagccactgcatgaagtcttccaaggctattacagcaatatggcctttttttcctttcagaatcatttcagggctgagcgcaaccacactagctttccgtattttgcttatcaggatagtgtctcatcattggcaaagacccaggtccagtctgggaggcaggcatgcctcttcccagtgtttactcagtacataatgtcacagaactatcgctgccggctcttgttacagttccagactctcctcccccagcagctgaagactttttacaggtcctggggatttttttctcttttcaaatagtagcaaatctggctttgttgggacctggctttgttgggagttcatgcctcctgcccctgagtaggccttaaaaccccaggcttgtctccttttagaagttgaatccaccgtcagcttctgtttaccatgctgactttcgagttttctttgtttctatcccttgggaattcttttcccctttcaagccaggctatgcatataaatattaatagtatattttgctatatttcatccagcatctctatgtgcttgtggcaacggacagccttcctacatgagctcggtctgccacactgtcaggagtttcccaatgtattactgtcaacattgtgtattcaggatccatgatttgatccgaagaataagtaacgcatgcaacagattatatgcgtgcaatgcattataaaatacaacaatgtactttata

SEQ ID NO: 64349 - DNA, 892 bp, Homo sapiens
tccatgttggtcaggctggtctcaaactcctgacctcgggtgatccgcctgccttggcctcccaaagtgctgggatagaaccctgtaatcagagcagcttgtgctttctatgctgtggtggccacagcatgctgcacactttagcagcagtcaacagccaaggcatcagacccctatgtgtcttgtggccaagggactacctgctgcctatgattcacccacctactctaccactctctctttaggtagacaatgcccaggctttcctctggctgtctcagctgcgccatcgttgggatgacgaggtcaaacactgctttgccaacatctgtgatgcccagtttttgtattcctatgagtacctgggaaacacacctcgcttggtgatcacacctttgactgacaggtgagcactggtgtcaaccactgacagccttactgctgtctggttcaggccagctagtgggcatctagggtcaaagtccctgtcacttgctatttgtccatagagctacagggaaagggcctgactcaacacagcctgtttaaagtgaaactgaaaggatgtagggcagagcctttcttggaacaaatcccagagcaaatcaatgagccgtgactttttgaggaattactaaatggtcatacacacccgagttctaacaccagccctaacacataccagctgtttgattattaaaaacattgacctaagttttggtttcctcatctgtgaaatggaagtggtaactcacaacttccatgattattgtaaggattaaagacagtaacgttgggagggagagtaggagggtgatgaagagaggtaggttaacagatacaaacatacaattagataaaagtataagttctgtcattcaacagcagaata

SEQ ID NO: 64350 - DNA, 1884 bp, Homo sapiens
agattttataaaatacttaaatcttttgttagtaatattatactcccaggtagtgtgtaagaaaaatgtctcgattattcaaaattaaattactttatatagtattaaaaatttaatagagtttatattccgataacctcatgaggaactgcccccattagttatgaaaaaaaaataaggttgtctgttatacctgttattaaacctttaacaaatagaatgaatttttaaaagtgcattctaggtgtaatatacacaagtggttacatacatggttacatatataagtaaccatttgttaagcacctactacgtatcggctcattattaagctcggttcatgtatttccaattcccacaattaccctggtgtacagatcaggaacctccgaggctcacaagtggcagccagattaacccaggaagctctaaagcctttgctttggggagaactgccaacgtctggtgatttgttggggcgttttctggttgtcacaagcagctaggggaactggcatttagtgctcgaggccagggcagcgctgctcattggatatgtattctccaccatgcgccccccaaatgccgactgcactctgatgagagagggagagactccaggcatcatcccatcgggtttcctcttccagagactcattttcagcccttaggggaagacagcggggaggagcccgttttcggtcccagtgcagagacccggccggtcccgcggggcgcagaggcgcaggaatgcagagccgggacggggttcacacatccccccgcacccacggtccactcccagccatggctgccccggccccgcactcgccacgtcccccgcgcgctcccagacgcatgggcaagggagcccgctggcccctccgtagctccggggtgcccagctgagtcaggtgcggacgcagatagcgcaaggcctgaccccgagcggccggaggccgggaccgccccgcaagcgcgctcacctcggcccgcggcgccggctccgggcgcacttccgggagctgggtggctgcgcgcgcctcaggcggcaggcgaacgacgtgcggcaccgggcggagctagggggcgggggcggagctgataccgaagctcctattggccgtcggggacgccccgcctctctctggcgttgcagcccaggagcctccaccgacatggcagcgaggttcccgagccaacgccatcctccgttccttccgtcactcactcactaatcactgttcctgagttccttcacttctcacccgtcatttattgcgcacctattctgtgccaggcactcggccaagcactgcgaggccttcaaagatcatttctttgtctctcccaaacccttccgcccagtcccacccgcagagctgcaacgctctgccattatccctgattcttaaccgccgcctttctcctttccgttcttgcctcactgggcctccctgagacacttgatttgccccaaccttcttcctctgtcttggttctcccactctcatcagctctgcatcccctgggtcctctcccacttctccccattccgttggggctagtccaatgtggtgccatcctctttccacctgcgtctctctctcttctctctctctctctcaacaaatgtcatccctgactcttcccttctccttccctttcccacacgccaacaatggctgaatcctctgatttgacctcattgtctctcagacacctcaccctctctcccttctcactatccctccctcggctcagttccacaccatttgtaatggtcaagaccttcttaccctttccccagcgtccagtgttgccggtttccaggccatcctgtgctgggccacgacatcaacttgtgatactaagttgcattaa

SEQ ID NO: 64351 - DNA, 1448 bp, Homo sapiens
acaaatgcaggcccacctttaattctgcaaaccactttaggccccgcgggcccgcagccctggtccaagacagctgtctgcttcacaggtcgcgcacccagagccgggcggttctgcagctcagcatctggcccgggctgcgcgtcgggctctggcgggggcgtgtcaggaggcgtgtccggggcgtgtcggaggcggggccaaggcgggggtaagcctcgcccctcggccgtgcgagaggccgagcttgctgcattgcagccgccgcggcgccgctcggctcttcactcccaacaatggcggctccgagcccgagcggcggcggcggctccgggggcggcagcggcagcggcacccccggccccgtagggtccccggcgccaggccacccggccgtcagcagcatgcagggtaaggaacgcggccgcgccgagatcccagccccctagcgcggcaacccgcgtcgtcgcggcctgccccagcggacgcccccggacccggctgaggaagccacggcagccgccggcttctccctctctccctccccggcttcccgccccgctcccggccgcctccggcccggcttggatccgggctccggcccgcataggccccggccgcggcctctgcctgcgcttggcccctgggccctaccgggctctcagcaggcccgcagggcccacctggtccgggaccgcccccgcggccgtccccatcgcccccgccgcttacctggcgcccgcccggcccccgtttccgggaacgcgccggctcggggctgcggcggagcgggaggggcgtcgggcctgccccctggtccctgacgccgctcaggtaggcggcgaagacagcggccccggccggcgcccctcggccccgccgccgcagtgggccccgctcagggccatcttggctgtcgccgggcacagctggagccggaccaccgagctgacctcgggctacgggggcctcttggaacctgcgttttcaaacttttgcagggtttctgtgcgctggaagggatgggggtggggggcgggttgcccaggcctgtgccacctgtaaggtaggtaggctgcattggcctgggagaggcattttgttccaggccagggatttctgtgttagcattgcgtgcaggaagaaaaaaaaaaaaaaaaaaaaagaagacttaatttggtttaaatggagagatacaggaaatagacaggggtcaaagtgatactgtagtgtctggacatttgaggcagctctgctaattaatgactttccccactgggaatgcttattagctgtgtatggcttttgacagggggtgttgtgaaaataccaggccaggcccgagcctgttagggaccatttccttaaatttactggggaattttgagtagtaatgctatttttaaaacagggaatctcagaactctcttgacaactttagcaaactg

SEQ ID NO: 64352 - DNA, 1821 bp, Homo sapiens
cttcctttctgggagttgttaatgaccatgctctctgaaacagcaggattcagttgtggaacataaggaatgtttcatgcagtagacattggacatcctcttatgtggtaagcactgtggtgggcactggataaccttgaatactttttcatggcttcatgtttatggcccaagagtggtccaggctggccaatattgctttcttaatatactgcttaagaaccagagctctggagttctgggtttgaatctcttggccaggattcagatatgcgttttgtgaccaggggcaatgaacttggcctttcgaagcctcagtttctcacttggaaagtgggaataacgcttacctccccggtggctttgagaatgcatgtaagcctgggacctgacatgtagtaaggatgcaatacacattagccatcattgttagtagcgacaatattgttatggtctcattaatggtcccttttactattggtaaatgagtccctaacctctcattatttaccacacaatttctttagttcatattactaggtcccactgttctctctaacctgttgatttccccacttttcattattgagcagtcctttcagagtatcctagatgagattttattctacttcaaactccggatctgtttttttctggatctgaggactctcaaatgaattacaatgtgaacgatatgaaacagaagtctagctatcaatttgctctactcatttttttcataggggatgggtagatggttggaatgggatttatagtgaatttgattataagagtaatcaacagacgtagctttggttgcatgtttatgctaacagttatggcttctaatctggccatttttgccactgtccctcagataatagggaatagctgctaattttgttattactcaaaagatttgagtgtcttcactcattctgactcatttttttttcatgttcattcacaaacacacccaacctttatacgttgagtagttcttaggctttggttctttgatgactaaagctaacaaaatgtagatctgtttgccaagttaggtaagtggttttatgaaagtatatttggcattaggatgagtttgcatttgagagaggaaacaatactcaaattaactactctgagaaatgtttttattcttaatgtttcatcaataatttgttaatgtagatagatttaataggaaaatttcttgcatattagggcctcattctgtggaaaagtattattctttagtccaagaaattttagccaacctaaagtacggaattgacttgtagcattcaagaaccttcctagccatggctagggctttcccttgtggcaaatctaaagcctcgtgactttagctgggttagtgtgaatcctgtaaagagaagatcccgttataccaggtaattaatcttagatatgtatagcaaatagtactagatagtatggttggcatgttagagaatagcatattctgattaatagagcttgccagttgagaattcaacagcttctataatgaaattgcataggcaggatgattccttttccagtagtagctgtagcagctagcgttcccatagcatgtagtaatgtttaagaaacaaaaggatgttgaagtgtaaagagcactggacttagactcagaaaaccatggttaaggtaactgctctgctgtttacaaacactgagattttagggaaattccctaacttttctcaactctctgttcagaaatttctcatctgttaaaatagggataatgcctaacctgtagggccattgtaagaatcacattcttaatgcatg

SEQ ID NO: 64353 - DNA, 1757 bp, Homo sapiens
agccaggcgtggtggtgggcgcctgtaatcccagctactcaggaggctgaggcaggagaattgcttgaacctgggaggcggaggttgtggtgagcggcgatcgcgccattgcactccagcctgggcgacaaaagcaaagctccgtctccaaaagaaaaaaaaacaacaaaaaaaccccagaaaaacaacgaaaaatgcagtcgatccatacatgcttagaccagcgggtacaattctaggaagaaacaagaatgagaagaaagcctcagcagcagggatgcaggattgaggcacagcatataaagtaatgaaggaacaggggttctgtggccggaggatttgctcacatatcactgttaggggagccagaagccactggacaggttcagccaaaagtcagttttctatcccgaggacctgcccctgtgtcagggctcctctgtccattacagcaaattgaactggagtcatcctctgctggaccctgccccactgactcactcttgctcagagagtagcagcgatgcctctcaccactgggaaggcagcccactcctgtggatgggaaatttgttctctagtttggctgggtgtgcgtgtgtagatcagggcagaaatccagaaaagaggaggaaaaattagttaacagatgggaagataggaaaacttgcagttctcggttaatttttaaaaattgtattggctgctgtcaatgtggcaagaggccggggggcagggcagggaggtgtgggtgggtggcgaggggcaggaggtggggacagctttgaacgctgaagggtgtgtgaacaggccccacaagtggcttcattcaacaactttgtgttttgttgttgtgttgtgttttctctttcagtttcaaagaagctggcaccgattccacccaaggtcccctttggccagccgggggctatggcagaccagtccgctggccagccgtccccagtcagcctgtcccccaccccgcccagcaccccgtcaccctatggactgagctaccctcaggggtactccttggcctcgggccagctctccccagctgcagctcctcccctggcctctccttctgtctttacaagcactttgagcaaatcgcggcccactcctaagccgcgacagagacctactctgccgcctcctcagcctcccacagtaaacctctcggcctctagtccacagtccacggaggcccccatgctagatggcatgtcccctggggaaagcatgtctacaggtaaccaagccacaggctccctcacttttttttatgaactttagtgaaatgtgcctaggggagggattgctagtgttactgccagtgaacacattcctgcgtgctttgggatgactgggctggcaccaggggtagctcataagatctccttagaagcccaccaatggaaagcaaccctggaatccatgtgtcccacacaggggcttcttatgggatctctctcggtctaagcccaccagcctggggttctgtttttgctcttattatcgggggttgaagacactgagtcatttggagtggggcctcaggagaggctggaagctggttatgatcacaaaacagcatcaaaactcaggtatttcctggatagagcccaagcaactgacaggtataaatgcttatctggagaacaggggctaagaacccaagatgttttttactattactaaaataagccttgctagaaaaatatacttccagatagatatttagagaggggtgaatt

SEQ ID NO: 64354 - DNA, 1058 bp, Homo sapiens
ccaacctccaaatgatctatccctagaatagcagcacccctgcctcctaaggctgacattatttgcctacaactaggttctcatttgccgggaagcctcctttcaaccacctctctctctgccgccttccagatcttgtccactttgatattccctcgatccacatagagctcgggtcgacgctccgcctgagtcccctggagcacatgcggcgacactcagtaactgacaagagggactcggaggaggagtctgagagcaccgccctctgacatgacaccgcccatcctgcctcgcgtgtacatacatcacgggccctaggaacgccgccaggagcagcgtccatgagcttgccaagtgttctctgctggctctttcctgccactgccaacacgaggttggaatttggcagaaaattgtgatctccagtccgtgtggtgatgctggtggtgcaggttttgtttgttcctttcgggtggtgacttcggccttttgtttgacctttgccttttgactttgtgcctcttttgatccactttcagcctccatgccagaaaacacccacctctccatccaaggctggtcaggaacgtcctttgcagggtcggggtggtgcgggagaggctcactttgcctggttagacccaagggctgctaccttttccttggacggctcatgtcaggtcttgcaggatcagtttaatggccacagaaaggaagcaggacagcagggcccctctcacccacaactggaccaggtccaggattctagcagtcctggggcactgacctttgccagctacctgggggagggcttgccactggaaaacctttcaggccgcccccatcagtgggctccaaagtaaatggctgaaaacaaaaatgtttcacttcctaacagttttcctttttccactgtgtgactgaaagctcctatatcattttatatttctgaatctataaaacaaaacaaacaagcctgacagtgtctggaggagccaaaggtggcctccctgtccccaaatatattggctatatgagagtaattttacccctct

SEQ ID NO: 64355 - DNA, 2245 bp, Homo sapiens
gttaaaatcccagagacttcccaccagcctctgacactgcaaagaatatactcaccacttaagcccccaacattagaccagtgcattcgtgtcaggaatatgttgtccaggcgagcaacctttaacctaagaatgaaaaaacatttaaacaggataacatgaacagaacaaggaccacttttgctataaaaaacaactggcctctcatttcggctttcaagccccgtaatcaactccccctccgaaagcaagagactgactcacttgtgctcctgcatgagtctctgaacgccttctccacagttgaagagatacctacaagacaaacattacacaagacattcagaaggttttattctgtaaactctctgacaccaattagatgttttattgtagactctggaaaaaaaaaaaagaaaaaaaaattaaaagtccacgttggactaccgagccacatttatgctggtgggttttgagccctccttagcagaggtggagaggagtgggggcctgtgtgtgtgggtgctaggacaaaatgagtcctttctccaccaccggctacacaccagatctgtccaccccacacgctaacaacgacacactggccttggggtgcacggaagagggtggagctccgaaagtgctgacagccaggccggggcccaagggttgggaaaaggacgctcagacccaggcctgaagttcttcacagatccgcagaaatcacatggatgcaaagaatctcggatttcccacccaccataactccacgaacccccgcaacagtgaaccacatgtgtgaagcagggaagccgaagccctgggaggtgccccgatgctcagaggctgcgccgcactgagggcccagcgggacggggcgtggctcgttgactgaccggttgaactcggagaagacgtagagcgcggcgcccgagtcccggctacccgctgccaccacctgcaggtacacggtgtttgggccgccggagcaccccgacggtccgcgcttctctcgcgtgcgcaggtgccgcagcgggtccttgcgcggccgctcgcggcgggcgggtgcctgcgatatggtgcgtccctgcgacatggtgcgtccggccgcggaccgcagcagcgagcaaagcgcccacatgcgcccgtctccaccaaaactgagaaagccgccggtcacctacgcccgcgtttcccgtgcaccacctagccgctccgcatggcggatccagccaatcagcgcgccgtgcaccgagcttcccgcctacgcgaggctgctcatccaatagaaaggagctttaccgctcgggacttgtcaattgacagtggccatagagtagaggaatactagagcgtctcaagcggccccgcccctagttctgttccggtttgccggccgcaattttttccggaagctgtttttctcctggggcgggacttccggaagcacagtgccaggaaaagccttcctggggaaggcgggacctaggagtttggagtttcgctaaaacgctcctgttctcaccagataagagctgtgtcctccgggcacgtcagtccctcagagcttgagttagaggtggttgtagtggttgtgaggattaaatgtgaggaaatcaattgtattgagcattagcataagcgctttgctaattttatttccattgtaattcgtatgcatacatgttagaacttgatcatttttacgtggtgtcccgagcttgtagtcccagctacttgggaggctgaggcaggagaatcgcttaagcgcggaggcggaggttgcggtgagtcgaaatcgcgccactgcactccagcctgggtgacacctcgagaccctgtctcaaaacaaaacaaaacaaaacaaaaattgtagtgttttttggaaagaaaagcaagaatagaggacaagctctaaagcaagagtcttggctcatttgttagctgcgtgatcttgacctctcagagcctcagctttcttatgtgtaaaatgtaataacagcaataacagtatctcctacttcagaatatagaattcagtcacctgataatatatcaatagacctttgagtggcactgtcacagaagaggcacccagtaaatgatagaaaattaatacaaaatgtttcaactcctagacaatatagctgaccagggacatcacagaggtagatgtcccaataccagctttttgaaaaaaacacccagtcccctcttatgtagctaatgaggatttctcactgaa

SEQ ID NO: 64356 - DNA, 803 bp, Homo sapiens
agaaacagagaaaccattaaagactggaagagtatgagcaaaggaggttgcacatgtcactagaatgggttggaggccagcaagaacatctgtatagacagctttcattcagaagctctgcctctgtaaccttgaaattctggactccaaggtgatttcctgggtttttgtttcctttttccagagctccaaagagcacagcacattgtttgcctgagttacccattcactcgacagatagtgattgagttgcttctttatgcctagccttgtattagacacctgggatccaacagagagcaagacaggcatggtgcttgcccatgaaaattctagagagacagtaagcaagtaagcaatgactaaataagataattgattgtgctgtgaaagcaataaatagggaaatgagatagagagtaactgggagagggcgggaagacctctctgaataggtgatatttgagctaagacctgagggactaaagggagccagtcatgcaaacacagagatggcattctcagcattaggaataaccaactcactgagaagggacataatggaagctggtgtgcttggcatccagtgagcaggcaagatgtggtgtgggatgacaggaaggcaggagccagaagtggaaggtcattttaggtcatgtgaaggagtctggattttattctaagtctaattggaagcgggaaagtgacatgatctgatttacatttttagcaagatccctctggttgttagaaaatgggctgggaggcagggtgggacttagcaatcacattcagggagcagt

SEQ ID NO: 64357 - DNA, 750 bp, Homo sapiens
aatttaggagaaaaggaaaaggaaatacagacaggaaaaacaaaacaaaacaaaacaccagctctcagattttacttatcctcttcaatctttcctatcaaacttacgtttccattttccttatacacaatttttttaaaaagctgggtcaattcaatacctgctgaccacttacaccatcccaggcccattgctgtgcccagggaactcaaaggtcattcaaaaactatctctgccctcaggatttcagaatgtcatgtgggagataagctaccgaagttgaaatgagtgtgatgagagcaatgttagaaagttgcaggaggcacacaggaatcatcaagagggcaggaggaactgtgaaaaccagccctccccagcagagaccaagccaggagtcagctgtggtgaggtgaagacaagtgccttgagctggtattggaaggaagggcatgaaacagccgaggggtagaagtggagaaagcagggaagaggccaggatggaatagtgaaaaacataagaccaggaagttagcaaaccatggcccacaggcagtcctctgcctgctttttacagccttccaactaagaatgatttttacaattttaagtgtaaaatgcaaaaaacaaaagactgttagcctctctgtgagcacagttactcaatttggcttttttttgcacacaaaatctaaaatgtttattatttggccctctgtagaaaaagtttgccaatccttagtgaagaatttt

SEQ ID NO: 64358 - DNA, 1039 bp, Homo sapiens
agagaactaactatagcactgaaacatggagtctctccatatatcttcccccaaatagaccgatatatacacaaatatattctttattcttagagagagattatctgtctagaggttgggaaacatgtgggaaatgagaaatcctgttttttgtttttttctgttactatattaacattctccaaatcacatgattttccctgcagtgaagagcagctcaagaagtttgttcacgtttttatattcatctgtatgatgccaacataatcaatcctaagcagaagatttttctgtccccataagctgccctgctcttccccagctgctggtagggcttgggtatgtgcccagtgttcaactcctgtaacctgctcttacagagtgcagaatagatgccttaaatcaacaggacatattgtgaaacacctattacatgccaacgctctgcttccttactcctaatagctgaatgtttcagttcttaacattcagggtattaaaaaatgaacctaaaagaactgtttagatgggatttactttagctgctaattcattccagacacaaggctagaaaaatttgtgtttgaaggccacatttgacccttaacctgaatttatctgtccttggagaaaggatcaaaaactagaatactgagatagtcccaggaatgtgaaaacaccatgtcacactgaaagctgacttagccacaacatctgaagagggtgtaggagagagaagtttttgtgtggaaatcatctcccttgtgcctttgccccttctctctgtctttcttattgactgacaataaatatggaccaaatgtacactgttttagtatttagtgactagaattacatactcctttttaagagttaaaaggtggccttcaaaaattattcctcagtgtcccttaaatttttttctatagctttttttttcatacggctcataatctgtgaaagaaatgccccatttcagtaccagacaagaaagttcagatgaaacttgttaaatgatccaatttttaaaggaaaagtt

SEQ ID NO: 64359 - DNA, 1053 bp, Homo sapiens
atagagaaggagataatccatttaatggaaaaaattaagttaattataacatgtggcatgtggtcataataaattttgtgaaggtagatctgataaaattaatgaagaataacagggttttggcctggaggtatagatattggagtcttcatcatggaaatggtagatggaaatatagggaatgatgatttcacccagagaaagtatgcagaccttagctacaaactgatattgacaataagaatcttcaaaatgaaaaggcaaaacatttacatttatcccaaggtgggagaatcaccgttagcacagagtctaagcaaaagatctcttagataaatacatcttgcgtttcctgaattgacattgtgagctcataacctaagttttgccaaatgaagtgtgtctggcagtgcagcacgcagactcttagtgagcgtgggcatttcaggaggtggtagaaagacggagcctgactcattaatcagtgaaagaatcaaagagctatctttagaatgaacggacagttctgaaattcagctgatttccaaggtcagtgggtcatatccacaaatatttactgagcacgcactcggtgtcaggtggactcaggtatcaagaaaagactcttggtgagattcctgcccctcccccatccaaacccaagcagcccaaatccggggcccttacatgtggacttcatcccatctgataacagcagcaatgatgtcactttggcttcttgccgaagtccttcaaaacgctcatgcacaggagccgactggaggacagtcagttgtaagcctcattgcttgccaaaaacgtgggtggcaggccaggcccgcttcctcagatcacactcagaaaactcagaaatccaagctgtcatctgacattcgactaaagagtgtttagattccatgccaggcttgtgtacttgctatgaggtctctttcccttcatgtgcagacctctgttcaggaagccgatgtgacaccagcccccgcagaaaccacagctaatgcatgctcaggaccccagtattccttttggagg

SEQ ID NO: 64360 - DNA, 1424 bp, Homo sapiens
tggccagttcatcagcaattagccctttagatctacaggaggaagcgagaccctagtacatgctgtgtcttctaccacagggctcacacaggaagctccccatgtagttctctggaatccacatccccttttttatgaatagggggcaagggaggactttgtgcatggctgtctttggggaaagccttggaacaaatgtctttcactacaggcaacaaccgatactgccatttattctctccatatctataaggagtttaagggccatagtttaattcttatttttgtgttgttttatatactttctgtgataatttgcactcactcagttttctcaatttggaatctgatacctaatgtcttaaggtcttgacctcttgactaagtatttcccacgtgacctcattctcacagaagagtcctgtaattctaggagataggcatttatgatgatttcccacatgaagagaaggagaatgaagcttacagagcagtaaggtggattgtccaaggtcacacaggaagtgacagagctggactttacaccctgtgtctcagactttgcagcctgggctatgactatgctgctttctattgcttcttgaatgtgttgactcttctaggtctttcttcctcagtcactgaagtctttagcacaagacttactgattttctccctctgcttcctctaccctggaagttctgtgatctcaaatggcttcaacttccctgttggccctctatcccatggtgacatcatctccccagcctcaaaggccaccaatttgactccttgtggccactcatgcttgtggccatcatgtcctgtcctcacagccctccccttcagtggctgtcacagtactgttcctcgggtaatgtctagatctccagttccttgatacttctaatgcttttgctctatcagttccctcctatgctttacctcttcccctctcgaaaccaatgtctttccaatcttgcatggccaaggttttaaaaagaattggctaatgtgctttttctactccttttagtcaattggcaaatgctctcaatggccactatagtgggatcatatttatattatactcatgtgttgcttaaaggcagggacacattctgagaaatgagtcattagatgatttcatcattgtgcaaacatcatggagtgcaattacacaaacctagttgtgtaatagcccactatacacctaggctgtatggtacagcctattgctctcaaccttcaaaccagtaccacatgcaactgtaatgaataaagtaggcaattgtaactcaacggtaagtgtgtgtatctaaacatagaaaaggtacagtaaaaaatatggtgttatatttgtgtccattgtcatatatgtggtttgtccttgaccaaaaaatcattattgcagagcttgact

SEQ ID NO: 64361 - DNA, 1135 bp, Homo sapiens
gtaatttattttagtcacattgattgaaatacgtaaaaactttgctaactttgtacataatactaaaacatttaagaaaagttaaggttttctacagttatgttgaatttattaggtctactatgttggagaagctttgtttgttagtgacaattagaaaattgagcatgttaaatttataaatgcatttaaaaatatttaatagaatttaactatgttcattgaataatcaaatacttctttcaacatacttatcaaaatttaccagatttttatgaatagaataatacaatttttaaatatctatgatgttcaaagaaaaagctgatatttaagtctgtcactatcacttattaatttattcaaaaaatgttagtgagggtcttcaataactattctgtgtgctggagacagggcagtgaccaaagtacttgctctcaaatgacttacattctcctggaatgacagacataaacaaataaaaagtgtaatctgtagcatggcagaagatgcaaagttcaataaagaaagctaattcaaggcaagggggatggggcttgctggacagataagctggggtaaaggtgtggtctgctgtttttatataaaggggtgagagatggccccactgactgggtggcatttgaagagaaactccaggaattgaggaaaggaattgacagaatttacaggtatccagtggaaaagcttttcaaggcaaggcaccccaaggggacagcaggggctccaggaagggagtcccttcacagaaagccacactgattacatccttagagcacaagcacatggcataccccagagagggcagagccagactacagccttccagtgactcgtcttgtcctggcttcctaaacgcacactctccagagactttgaccctttcaactccctccagcattttttttctgaaaaatctagattgcacttgtgcctttcacccttctaaaaacagattctacattattgtcaccttattattattacatgtgtaagcttacctttcctaaagagttataagaaacttgtaagagaatcacatcttaaggccgggcacgtggctcacgcctgtaatcccagcactctgggaggtcaaggtgggcggatcacctga

SEQ ID NO: 64362 - DNA, 428 bp, Homo sapiens
gttgaaggcagagaacaagttatcttgagccttgccatggttaactagcctcttcaagaaaggcaattcacacagataaactggaggggggaaaaaaagcacttaaaacttctctggatgatcagaatggaggtatttgcgttttactgagcacaagtgtcagacatctgggggcagtgatactctacttgttagcctggttgactttcattgatcccaagccttgattacaacaggcggctcctttgatatgtgagttattactgcaatgtgttgctgaagctggatgtcatatactaagattatgggaaaacaaagcaaaataaaatccattcttttaactttgaatatgtcagcaactaataggagaaaaaacaactctaatttgttgagtacttgcagttgtgccaaaggcctttgaaaaactg

SEQ ID NO: 64363 - DNA, 573 bp, Homo sapiens
tgctcgacacctgagcaagagcacttaatcactgcttaaggctcactcatgtcagaacaagagagtttgtaagtggacaggctttgcaaactgtcaagcacaaggtaaatgctggtgatgaggagcaagtcatttgtacaacaaggaaggcagcggtatcatctggacgtatgtttgccttcagggagggatgaatgcctgggatttcagatctgatccaagttcaatgtgtctggcccaaggttatttttgattcaaggccactgtgtcctggtttctatcaacactgaaataaacaccgctttgcaatctgcgccttttattaatgatgtgactcacttaatgagggctttgctgactcacatcaatcttctttgtagaagaggcccatcaaggaattgtagacagctgccaggctggatctactctgcgtcagcgtttggcaagttcagccaccctgcaaacaccttttcttcagaagaggggaaagagtgaagcttcaaggctaaagatcagcacaacacacacacacacagacacacacacacacacacacacacatttaaaaaccta

SEQ ID NO: 64364 - DNA, 580 bp, Homo sapiens
cctagtctataaattggtttcccctaaatccaagctccactctttttcaacgggtagccaggaggatgagataacacaaatataaacccattccctgtaatatctccagcaggggctttagtgggaggtaacttacaaacaggaagaaatgtgaggaggacggggcagtgataggcgagtttagtataaaactggtgggagagggcacacttttgaaatcacacatttgtgtttacattcctgctctgcttcttatcaaccacgtgaccttgagctaacaacagcctccacctctcttgcatggtttttgtggggattgttgatgagatagtttaaaatggcgggcacatcgtaagtgtttgataagtggtaggtgttgctatgagcaaattgaaatgccacaagatttcatttatatgtggaatataaaaaaatagagagtagaatggtggttagcagaggctgggggtcaggatggatggggtaaggggagatgtaagtcaaagcatatgaactttcagtgagccaggaggactaaattctagcgatctattgcacgacatggggactataattaata

SEQ ID NO: 64365 - DNA, 998 bp, Homo sapiens
aaaaaaaaaaaaaaaaaaagagagacctgaatgaagtagctgattgtgcggtttagcatgaaaagaaccatgaggttttctctgcatctgatcatctgagtgaagtcatggactcatcaactgaaagccaatgattaaagagctgattaaaggtgcatgaaattaagtgaatgagagtcaactccacacctatttattgatcacttgctgagtgctgacattttgccagagagtgatggcgtgtgctccttgatcttgggaagtataacatcttcttgaggcatgtccagtgaagacaaggaagcaaacaatgaactaatccaccagggaaaataaaataaagatgaaaaacagggatcccagcaaatgtattcttcaagagcagaggaaagaggaactaagcatcagggagaagaattttggaagagaaaccttccaacatgaggaaatagcctgagtaacctgtctgagagtacaggccttgggcaggaaacaccaagctcactgcaggtagttcactgctggtttgcacccaggtgttgggagaagggggtaacaggaaggcttgtttgttccacccagtgcctttttcttaaaaacttaaatgtgaatgcctttaaaatagggtcttactttctctaatttttcattggccccactgatctctataatattaaagttcatcggctacccttgtgcatgtcatttgtttgaccattgaagtcatctgagtgtgtggcctctaaagcaggccactggttctgagtttagagtccatggaggtttgaggtcagagtgacccaaattctatgccaaaagaacaaaacaaaaacaaacaaagctcatgttttatttagtgtgaggagtggccacatggggtgtgcagttagttgggctgcactttatgaagacaagtcatagtgatctaaaaaagtaaggaggtctacaggcagggaaacaccacaaagccattgtttccactgaggcaaggcataggg

SEQ ID NO: 64366 - DNA, 803 bp, Homo sapiens
tgcatttcagtgtagtacattctgctgatggttgaagcagttcaaagtgggataatttaaagctcttatttaactgaaagaattcatttgtcttttgatccaccttccactctgacaaatgctcccttccctatcacattcaaacacacacccccttcagaagccagtaaattcatcccctgccaaggaatggattttccccatattgctctatctgagtgataaaagggtttaatgtcccaagttcatttttcagtagctaactcagagatacccgacacagcaaagcacctaagctctttctagagttattaaactgttatatccctaattcctttggagcctcgacctagcagcaatgattctgagggcacttcctattaaatctgcattttgcacagagagataaagcaggccagtgtgaccctgtttacagggatgacagaagagcccctgcaggctctggtgctgtcagcagttttactctatcaggaagcctatgtgagaaggtccctcacagctcttggcctggacacatttgccaactttgcacacttttctgaaatgcaaccactttcaggttgggagctctgagccacttggcagctctgtggggcagcttttttgctggcaggatgtgagcatgcaacaagcccaaccaacctgccaggcacgggagacattcccaggcacatatccatgaagccaaagagcagtctggaagaaaacaaacctgtgtggtttaatatataaaaggagtcttcaaattgtgtgtacatatcccaagggagatagaaggtaat

SEQ ID NO: 64367 - DNA, 1341 bp, Homo sapiens
gtcacgagttgataattgctgaagcaattatgcctgcctgttgcacctactcaaattaggacagtgagcagggggtcattatactaatctctctgcctctgtatttgaaattttccataataaacagaggctggtggaaagttttatatgttccataaagacattcaatagttacagatggctcagcacctagccaggacattaggaagttcccgcctcaacccagttggcccacaaacacaaacacacacacagagttacacagtttgagacaccttgtaacataaacaatgcagatatcaatttgtcatgaagatgcaaaacagaactctacagatttcagcatttccaacatgtcagcatgtgtgaatcacagcattcagctccattcactgtcttatgttccttttcatttgctcaagcccagccaagccaaaccagggatcaccagtggggagaactgcaaatgtttgcaaacggtgagcaaattaggagaaaatcctagatttacagagacatgaattattttttgcagatataaataaaaattgttctcagcttaggttctgtcaacacctcagtgctccgtgcaaattcatccaaagataaatgagttagtgttactcatacctgatgagctccaaaaaccacctgaaggggcacacgctgtactttgctcagtttgtttgcaaaactcagcccttggaatacaaagctaccacaaaatatgtggccaactctgaaatatgtgtgtgttttcaggcagccatagggcaaaacagccgtttgcttttttgatccatgcctcagatcttggcagtggttattccaggaatcccacacttttttcctccacccgctccagtttttaatcaagtaagacatgctgatggtgtaacatttgtaaaaatacaataaaaaagatttaaaattgccttatttctactatgtagaggtaactactgtgaattttaaatagatgcttctagattttaatgcatatataaactcttcaaaatcaaaatagaatcatactgtatataacttgccttgtttattcaaatatagcccatgtacattttaatgcctataaacaacatctataaaaatatttacaacgtttccacatatggatataaaacaatttattcaatcaaaacatatggtgttattgaatatttactaagaatgattattgaacatttaggttgtttttcaaatttttgcttctgaaactgagcttggatgaatatttttatagataattatttctacaaatctattattatttccttaggataaattttacaagtagaatgcaagaagatgaacattttgaga

SEQ ID NO: 64368 - DNA, 1610 bp, Homo sapiens
aagtaacccggagttcctctgggctcccatttgatagagactacggtaaagtgtaattgattagacgtggaggtggaagcatccccacgagaaccatttcctcatgatgctcctgtcaccgggaagtgttctaattttaactttatttttattttaaaatttatttttagagacagggtctcactgtgtcgcccagactgcagtgcagtggcgcaatcaccgcaacctcgacctcccaggctcaagcgatcctcccgcctcagcctcctgagtagctgagaccacaggcacgcgccaccacacctggctaattttacattttttgtagaggcggggtctcgctttgttgcccaggctggtctcgagttcccaggatcaagcgatcctcccgcctcggtctccctaagcactgggattgcaggcgtgagccacagcgcccggccgctgtaactttaaattgcccgggaggactctgcagcccaaccctgcccacctcacccggtcaccggaggatgcctgtcaacttctgggagctgcaagcgcgggccggccagtcgtccgcgcgcggctttttcttcaggacagcggaggcacaccgtgctttgcggttcccggaagtccttcaggcctcagacctgtcagcccgccacactccagccagtcccttccgatcacctccagacaccacgctctcctttcggagcccgcccgccggaagtggcggcccggaactactcccacaggggggcggggaaggaagatggcggcgcccagcgtcccgtgaggagagaggacacagggatcccggggagcggccccagactcgtaaattatggccgcatctccgcacactctctcctcacgcctcctgacaggtactgtacccgccttgggcacgaccttgggggaaattcttctcttattaccacgtgcgaggccgtggttccggctggctgcaaccttggggagcccttggcgaggttggccggccaccggtgtggtgggggaaatgacctctggagtagcttggagtgaagaggtcacggagctagggtccagtcttgcactgtggctttagtggtccacacagcctcctccatccggcttctgcggaagagcggtgtcttcctgcttctttaggttttcagatagtggaagctggaggagagggcagagcagaaccttggggttccacagtcctccttatcagagcctcggcttctagccactggcttgcaatgacaaggaaggtgctttgcttccactcagaagccttgttccaatataaagggtcatgatgacaacgttgatgataatgacagttgcagacagcggagtgtagtccccatcagacttttgtctctgtaccgccagagtggtctttaatatcctttcactcgaagaaactagtgacaaatgtatattggagctggaatgttcttccttgactcttggtaatggctcatctcaaatgtcaccttttcagagaggcctttatagagaccaccctatataaactagggccccctacttctttcttttcacatcattccatttatttctttcattatggttagcacagtctatacttgtttatttatatactcgtt

SEQ ID NO: 64369 - DNA, 1818 bp, Homo sapiens
cacctcaaaccttccagccccaaggcctttatgaatactgtcccctccaccagccctgacttgacaaagtcaccactctctccagctcagctgagacatcccttcctcagagaagccacctctggtcccctagactcagtcagctcctcttatgtgtcttcactgcaccatgcacttttcctcactgcatttggagtggtgactttagagtcactagtgtggctcttgatgtctacctccttgactgaagggtctgctcggtgcaggcaggagcacgtgtggattgttgctcgccatggtatccccagtgcctagcacggtgcttaccccatagtaggcgcccggggagcattttttgcgcgagtactcagtcacctgcacaggaataaccagcccctgccttccagcccccaccctactgcctgtccttaggtggcttcgtgcatgtcatagaaggaccctggcctgaaaatcaagcagccttgttttgaattgctcttccgtctctttttggagaacttggcattgcctaattttttttttcactgaagtttataaatctacctcaaaatccaatggtcaagattaaatggggcaaactatgagagtagggtctgtcacataataggagctcagcgagcagcagccttcattccacccatgtgggtgctggggagactgttccagagaaaggggcaaaatggtgctcagggtgttatgtccttgttgaaaaattacaaagccatagacaagttatcattgtactctgggaccgttttgtccttgtgactcattttatttaacacatgtggttttgacacctcccgcttgtgccattgtgccaggctctgggggatggtgagaggaatgtggcaggcttgtgccctggaagccctggtgaaagaggtaaacagatcagagccagggtgtgacgcacccgcctgcaggtacatccggctctgtgtcagtgctgagccaggagcactgactgccctggaaagggagccagggctcacagaacaggcggagcggacttgcagcgtcctccaggttacagcactgcttccacctgcctgaagccacacacccgggtcccagcgggcggaaatggagctcagcgctccagcacaatggttgcacccagaggtagtactgaagtagatactgaattccctacaagtgtttgcccgtgtgtaggggcttctttgctccccacaatgtggggaggtgtgaggagcatcaggtgggcaggagccagcgatggtaagcgtcctgcagcgcaggcagcccccctgtgaagcagggtctgagccagaccccacagcctcctgcccccaggcacactggcacccccaggtgagaaaggagggatcttagctcatcggctgccccaccagcctgatgtaggcacctgtctcccagccaccctgtgatgtaggcaggcagcgatgagagcacagggtggcagagcttctgaggtgccaggcaggctctcccaggagaggaaaccattctttggaaatctctggtgatgactgcctttgtctccctctccttccctgacccccgcacaggcgcatttctcctgggaggaatcctctactcctggcagtttcctcatttcaacgccctgagctggggcctccgtgaagactactcccggggcggctactgcatgatgtcggtcacccacccgggcctgtgccggcgcgtggcgctgcgccactgcctggccctgctcgtgctgtccgcagcagcccctgtgctggacatcaccacatggaccttccccatcatggcccttcccatcaatgcgta

SEQ ID NO: 64370 - DNA, 1951 bp, Homo sapiens
tcttccctcttggctgcccccaggtatttactgtggagaacattgcataggaatgtctggaaaaagcctctacaacttgttacagccttcacatttgtacaattcattgattctcttttccttccacaataaaatggtatacaagaacaggagtgtgtgtgacgtcattggaagtaatcatcctgtgctgagttcgcacagttcttggtagaaccgacacttgatcacgccttcaagagctggcagagggtgcgtgggaggttggttttgtttcgtaaattgacaaattgtagttgtgtatatttatgaggtaataaagtgatgttatgatttatgaagacaattgaaataatgaaatcaagctgatgaatgtattcattacctcagatacttatttttgtgataagaacatttttaatgtactcagtaattttgaaattagaatacattatttcctgcattcacacagtgtgtgatgtacgtcaaagggaggagacgtactcatcataactgactttgtaccctttcaccatcttgtacccattccgttcaactcccagcctctctaaccaccattctactctctgcttcaagtctgattattctggattccacatagaagtaagaacatgcagtatttatctttctgtgccatattaagttgagaactttaaccttttcgcttaagagcagcaccttctggcttctctgacatctctggattgccagcatcactatgtgaggccatgattaagcaaaataaagcttactgagcacaagctctgcaatgccaccacagttggatttgataaccgagatggctgctaagtgactcatgggtgggacagtattcagcatggatctgctggacaaagagataattcaggtcccaagcaggtgacgctagattgcatcacactaagtacgccacacaatctgaaacttatgaaatgtttatttctgtcattttctatttagtatctttggaccttggttgaccatgggtaactgaaacagtggaaagagaaaccacagataagggagaactgctgtacatatctgccagcctggagaaatgagagcaatatacctgcttcttgtttgttggaaacccaaatgtaattgacctgctggacacattacactttttggcatcttttggccactatttcctaattgtaagatgtgaagatacgctctggatcaaagaggctctcatgttcgcttaataattcagagtccatcactcagtggctggactctgccatgcacatcacagagcatctgagaggcaaggtatccaccagcgtgggacaactctatgcttgcattctgatcatgcctcactcctcacacttcagcttgtgtgatgccaccagtttgagccctctgaaaatcccatctgaccactgctaacctcctctaccaccaccaggttggttgaaccaagcatctatccgagacacatgcctgcaagacatgcctgcagtttattttcctctttgccccagccttgtctgtttttctcatggcagccagcatgatccctctaagctaccaggcagatcctgccattcccattctccaccctgtagttgctttcctacctggtcccatgccatctggtcctgctcccatctctgatcttggaaataccttcttgccacacctactaccctgcccacagatctccacgcttttcttcaatactcaggcacacccgctgtggggtattcatattaatacctcctgttccctctatgtggggtcctctcatttcattgagaggacacctccttagagagggcttttttggccactttatcaaatagctcccctgtccccacctccttgctgtgctttgctttttttttttttttttttttttttttttttttttttttttttttgagatggagtctcgttctattgcccaggctggaatgcaatg

SEQ ID NO: 64371 - DNA, 1003 bp, Homo sapiens
aaccagggcgtcaaaatcttatttataagctaagagcatccatccttctgtagtttgcagagggctcctcatacatggcagcgcttcctgtgacaatcccagagggtccaactggaactggaaagtgcaccattcccaaggagcagtgggagctcgctctgggaagagtttcttccctctccgcggagccttccagccactcttacaaggaatttctcatccctgcagtcggcttggccagcagcagccgcggggctgcgccagtgcccgcctctggccaggggttcccgcgcctcgagcagcgccctgggcccttctacgggaagaggggatcgcggcgcccgcgacacccaggagctcggacgaccgcagcctcaccactaacccccaacaaaggtacagcgggagtccaggccgagataaagttcccttcccagtccgctggggagacaactggccgcggctgccctctgctccgctcccggctgtcccgcagctgcgaggccggggccagagcgctcccttccgggcgggcatcggagccgctgcggcgccgaccgcccttcgcgcccgggccgctggagaaggcggagcgagctcgcagctgctaacccccgaggggccgcctcgctggcgaggggagcgggaggaaggtccggattccggtggcaggaactggggctctgggccaccggttcaggctgccccaggaaatgcctgctttgcggtgccgcagagggtatagaggagctcggccccagagggtggctgttggggaggcggagctggccgcaggctggagcagctgcggagcctcccatcccgagcctagaatcggagaaatttcaggcggaaaatactgcggggatggtttggctcaagtctcccattctacagatgtgaaattttagagtgacccgactggggtcgcacagagggctgttggcagcaggacctgggggaagagcgagaggagagggcccccgtggcggccctgccctgt

SEQ ID NO: 64372 - DNA, 6085 bp, Homo sapiens
atgggagctacagttcgcccaacacacacctatacaacatgaattttccacctaaataacataaaatttgaagacactccctacggagacactattttctcctcacatttccaaatagagtcgggctagtgctcagaaatatatttgttctcatgttttagaagtttaaaataaatggattagattatcaaattaagagcgaataagtcacttcgaagaacaaacacaacgttccagtgagacacggaaagaaaagctagaaagaagttattgctgagaatataaaagcgggagggaaatcctctgtctaatttatttctccctcaacagttttgtaagaaaacgtcttgggctcaaagtagttgcaaagaagtctcccgtagcacagccggggcgcacgggtccggtgctggcagctgtgctatctgaatcctctctggccattaccgctgctcaggcacattttcaaaccaggggtgctaacgtcaatctggctttctgcgtttgcttccgacgaggggggaccggacccagggtggggctgcgtaaactcggggacacttgggaacatttactcaggaagtgagaggggccggctgctggtggctggtcctggacagagtggtcgagggaccagggctcaggtcggttccgctgcgcccgccgtcgccgacagtgaagtaagtacagtgcgggcggcggctcccggtgagtcacttcgtgagtgacactcagccccgggggtcgcgctggggtcggagccggaaggaatgttctgtccccggaaccgcttgcagccaggagttggaggccctctggccccgcagaggctgggttgcaggcatcgaaaacttcctgaacacgaccagtaagaatttgatctcgagcttccgaactccaaacgcctgggcaagaattcagcaaagcgcagcaccgctcacccgcacttcccccagctagcggttgctgtttcttggaagacgcgtttatccgccccagtcccgggtgggtgggtcattttgccaaagaaaatgtggttgggggtgacttcgagtagactttcactattaaataagtgcacctcagtgatggatttgttccaaattgatgtttgacttttaaaaaagcggtggtgaatgacaacacgaaacaatcagtgtcacaggttagcaaatcacactgtctcctaaattaaggcaaatgttggctttatatctattcaggaaaaagggggagatggaaagttttctcaaacctaacgtctccaacaaactcatatccagataaaacttcctacacatgactcccacgcacatgtttcgaccaggaaacttttgtttaccagactctcttcctggtaatttctcctgtctcttttcccctccccaacctactttcggcagtttggaaggctggagatttttgttaaggacactttacactaatctcagttaaccggcaggccaagctaacctggcaaagaataagaaggaaagacacacacacacacacacacacacacacacacacacacacacgacagcgatttccaaacatcctttctacttaaacttcctaatcccgtgcctgtcccagaagggtctccgaatgagtccccggcgtgggttggggggggggttccagtgcctagtgcatctcctaccctgctctccctcctccaaccgcctccctactctgcaacacgtaagcatcacgaaacctcctgcgaaacatctggatggggactggtgtcccaacatctgggcaactaccgccaaggctggcttctagggaacgagtgcggaaatgcgtgcgggtgtgggagcgcaccactcagtagggtaggacctctcccagcgctaggtcactgcagcattcttcccaccatctgctcctgtcaccagcccctaactccgcccctttgggcccgccccttgttccgaagccaatagcaacccctgaccgccctacaccgcccagaagcctttccacaccccctcgtcctgggagcgggttggctgctgagctctcggagaagcgcctgtatttgcatggcgttcggggtttttggtaggtagagcagcccgtcactctggaaggccgggaccgcccactccacctcggtccacagctctcttcctgcgcagttcgcctctgcagcctctgcggggaagtgccggggctgctcgaggctcagttcttaggactgcaaggaggcagccccggcgtgcggcggtgcgcacagtctagagtggccagggcgcgagagtgcaacgtcctcctggccccgagcgcgtcgtcgcgccccgggagcagaccctcgcccagcagttaccgccgtcccgactttccgttccagttgcagctcctgccgggcaacatgtcaagagccgccgccgctacagctgccgccgccacctggggaagagcagcagcagcagcggcggccgcgggcacacgggggcaataaaccgagccacccgggcgtccagcgtgccggggaaccctctctgcgctcactgcccggcgggacccacgccatgtgctgagccatgtccctggccgcgcccgcgggcagcgcatggggcagcgcctgagtggcggcagatcttgcctcgatgtccccggccggctcctaccgcagccgccgccgcccccgccgccggtgaggaggaagctcgcgctgctcttcgccatgctctgcgtctggctctatatgttcctgtactcgtgcgccggctcctgcgccgccgcgccggggctgctgctcctgggctctgggtcccgcgccgcacacgacccgccagccctggccacagctccggacgggacgccccccaggctgccgttccgggcgccgccagccaccccactggcttcaggcaaggagatggccgagggcgctgcgagcccggaggagcagagtcccgaggtgccggactccccaagccccatctccagctttttcagtgggtctgggagcaagcagctgccgcaggccatcatcatcggcgtgaagaagggcggcacgcgggcgctgctggagtttctgcgcgtgcaccccgacgtgcgcgccgtgggcgccgagccccatttcttcgatcgcagctacgacaagggcctcgcttggtaccggtgagtttccctgccaggggcagggtctccatcgtcgattcagaccctgagctaagggagacatggcgtatgatagggaattggcagggttacagcttcggaccacccggggtagggcagggaaactacggcagattgcgcagcgcatcctgtccgggtgcggtgagggttgcgctccgcttggttctcgtcacaacccacagaaagttctcgcggagcactggtgcccttgaattcatcaggcgacctcgccgcaaagaagaagggcagcgactgagaccgccctcagcaaagcgagccaccctctaaccatgggggtatccgactcgaatcgtattttatgactcgttttaaattttttcctcccggagcccgagacgctgggaatgttctgagcccctttggtcggtctccgccctcaaggaacttctagagcagcttctgcttcccagatggggagagggggtgggggccgcggcgtcccggcgaggccgcagagtctgttaactttttgttacagtccgcctggttaccggaaccccaagggtgtcagacccgcctcgctcgcgagccgcctgggctcgggagggtgagccgggcgggtggcccggcgcctccgcctggcgggcgggcggcgcgcggagcgtggagctgtgctggtccctgtcgggcaaaggcgcgcactgcaaccggctggagcggcgcgaggctttgaaggcgtccgggcctccgggcaccgccgcccgtttccgcctccctgccctcggtgctgggatagggaaagcaaggacgcgtgtctccgcggggcttttacacgtccggagcaaagaatattcggggcccattgattgagaaatgagggttgcttcgaggtcgcggcttccggaaattctgttctcgagtcgggttgcgggtcaggttccaaagggacagtggccccggggtcacaatcactacctctgcccactgctttccgcagctgctggtctttggggtgagctgttgggttgcccgagcttcgggtaaggcgcgagtgggcaggaggtctagatttcggcctccgataactgtcttcgactaggggcccaggtaacgacccccacattttcgttggggtctccacccgtaaccccagccagcacgacattcagacacccctccaggcccaattagcttcacagacgctcaagacttgggaaaacaaaagaggagaagataactgaacccctctccctgtgcccaccccactgtcgggacctgggtgggttggagaataaaagagggctgaccccgcggattaaaacggctcccttcccagcctcgtcctaccccttcccctttgtccttaatggttttttattattgtcaggagttgcccaagtctcgaggtttagccaaccgtgacagtcatctttcccaccgttcccgggctgtgacccattctcgggacactggtggataagaatggggtctctggagtccgacgcctggattcacgtcctggctagtcgcgtgaaccttggtgctctcatctgtgcagtgggaataatgcaggttctgggcagggatgggaagagtgaatgcgctggtacggtaaggtgcctcgcaggcacgtgagggcctctctaatcgttagctattgtcaccgattgtattgttatgacttctaccaccaccactccccctcctcctgggatggtgattccagggccaggcggcaggctataactagcgcccttccaggtggaacccgccagagccccgaggcagcctaggattttctgagatcagacacacttgggccgggttgggaggaactggcaggaaaaggactgaacccttaatgtcaggcggttttgaagcacctggggcaagctatggaaatccccacaggaaggctcacgcagtctcttaggcggctgccctccacctgccacgttctttttgattgactaaaaaacgctgaatgaagaacgaagtcgcgtggaaaccctcgccgcgcgcctgcagcggacagcgcagcccgggaggttcggctgccgacttgcgcccgggggctgcgctgcgagcggccacgcatggcggctggacccgggcggccgcaagggcttggctgggccgcgggaggcgggaggttcttcgtcctcccgagccatctccctgaactgacaagcaggactcccgggtccagggggcacagggcccggggcggtgacccggcggatcgggctgccggaggagcccactgtaaatgccgcaactggccccaaacactgcgttcctggactgcaccagcagctcctggcgcggccgcagagttggtggatattttccaagggggaaaaaaatcttttaaatgccatctgtttactttaaaaatgttgattacttaagaaaaacgaatggatgtctgggcaaaggtatggacgtcacaattattttgaaggcgtcctttttaactttaaacagaccacgccaggaggagactgctgacccagagcgcattacctaaaatctggtacccagagtgcacccttcgccctcgttggagttctctcctctctgccaagctttgctccgtgccagaggtgtgctccattgtacctccgctctgtccctgcagtcaggcaaccaattggagaagagtataaatagtaattaaccagggagagttgtaattcagaaacctagttaaaacaagtcctcaaaaactagagaatatgagagtggggagacattttgaaggcattaagaacaaaaaacgatggggacgaatggttgagtctgaggatcagcatcgtaatctgttagagaacgaggtcgtggctgtgtctgtgagtcgttaatgggtttaatcggttgatacacagcctgctagtggcctaaccagtaacccagggcctggcagatttgcatgacatctcggagtttgattgctcttccttccact

SEQ ID NO: 64373 - DNA, 2856 bp, Homo sapiens
ataaaaaaaaaaaatctacatttgtatgcaacaatttgaaatacaaaccatcatgttacaaagctctcaagatttattagcaagacagtggagcatgtgttgaactctgtttttaattaggcacctaaattagaccataaaatggttgattaatcttttacaagttgaagggaaaatataacataaattaacctaatcataagtgttttcccagatgctctgagttaataaaatagtcaaaatttaatagcaacccatttgttttagataaatatgatgctaaaatatatgaattagattacacttattatcttccaaatgatatgttatcattgaacaggtctctaaaaattaggttgcagtacatgtcttaaaaatatttatcaaaatagaatactacaattaggaattacatgttggctaaactagattatgttttttaatggaaactgataattgaaaatttacaatttagcatagactagtatttgtgaaagatatttttccagctagagttgtattgcttgaaactttaaaatgacctgtcacagcttctgtgtttctagtttgatgttttagtctgaaaaaaaaaaaaaactttttaatattttgaaaagtcaatatgtcatataacgtcattccacatatgtatgctgatttatctttttgtttataatatgttgtaggaataaggttttctggttatatgaaatgactccttgaatcactaaaattatttataattaaaagcacaccaggaatttttttaaaaactcaccagtcagctagttttatgaatcagggaggtggcatttatttcaaggttcagaactgaaatacgtgactcaggctgcttgccgactggtttctatgtcagtagttttttgaatactttatgttctcactctatgaacatggaaattaagttgattgacagaaacacaaaatgcctactctaaaggcagggcataatgagcatttcttttgctgtgaatagagttagtttccaaacagggcgctacctctctcatttaacagtcgatgatttcagacagtaagagaaatttcaatcctaggctgttgggatagtcaggaattccagcaaaatgagtcccccaagtatgtggcatattttcaagtttaatgaaaacaatatgctgcctacctcgaatgaaaacatttaccatgactgaaaagaaaggagatactgatatctttgaaaactaattgtaagtagagcatgaaactttttatatatttaaaacattaccttgttggaactctcgggtttctctcaaactatgccaaaacaaaactaacatcaaataaaactgatgttcgtgcatgctgatttttatttctgatttttcttgtcaagagatttggggaaaagtttaagacgtgagaagcaattaccatcttaataaaatgataataaataatttttatggcagccaagaggctatgtgttaaaatactgctaatgctaataaaacccaccattaagtttatttgtacatagataaaagtggtattaatttcctttataaattcttttaaatacaaatttcacgcacatttcggtaacttgaaaaatattaaaaatatcttgttactggctcattcagaaaatgtacttcattgtgtcatggatgaaacatgtttaaatagcaaagttgtactgcacaggttttgcctcccaaagattgctgtttgtaaaaattatgagtgcgtatctttagatttagagctggttaaagagtactgtccgagaggagtttatattttccggacagtaaaaaaaagtacacacactatacattgttggaataagatatttttgttctaaatatggcaaatgtgaaaaaataagactctggtttaacatcaagttgattgtgtttcagcccagactctctcgccaaggggtcactattttaaacgccattgcccagaatgtgaacgattccatgtgtgtccatgaagcaccttacacgtaggattcagaatccctgttttctcccaagtctttgccccacactgcttaatactgttacacttgcttagaaacccataaaatgctgaaagatggttctgggcaatgtgaggtttgagaagcaaatggagagtgaaaaaaacattgggaagagcagtgagaatcccactcttgatttaatgaatggagctggggggagagccgcccccctttttcaggtctgcggacggaagtgtccagcagggccccagctgcccccgacgttgccacgtgtccgctcctttcgggagctaggggggcgttggcttggacatcccgttctggaagggtggccgggggcgctaccacgggcggggaaaatggctccgagccacccggcctcgggcatcaatcgacgcggccctggtgtcgcgcgggatcgccgcctctggcccgggggccgctgagccggagacagatggcggagcttcccagtgcgggggcagggctggcagccgagactggggccgcctcccccgcccctaggctggccgggtagtcctccgtggccacgtgaccagcctcgccgtccggcctcacctgttgggctgagcctggctgagcggcccgcgctagaggtgggcggtgccggcgggacccgtcttcgcgctgattgggtggaggggctgcggagagaccaatggtgttccgcctgagaggagaaccccgcccagagaggcgggctgagcgggcgcgccccgcccccgccggtgttggcctggctgttggcagctcagcttccactcggtgctgctgatttggtcctgagctgccttcgctttccaagtcgagcctatcagctgttctattgtgctctcttc

SEQ ID NO: 64374 - DNA, 1115 bp, Homo sapiens
acacctgttccgagtgtgcaattagtgcctgccgcccttcttactgagctcagccctctgcaccgaccatttgcagggacggtgggatgtgtgtgtacaaccttgatttactgtgctttttctgaacatcaaagtaagaaagtctcactccttttgttgttgttcaaaagagaaagtgtaaaggaaggccagcttggagtgtctgaggatggagtttgggcaagcatttggtggtggacttttccccaggattgctcactcatcagacactttcccgtctacgttccgggtttatagctaggctaatttaatttccagctgagaggctactccccatatgatggtaatctcaaatagttaatgagctagaagaggaggcagcctattggattgattctggctcctcggctcagtggtttagcagtactaatttattagcctgtttgtctgctggttcgagaggcttgtttagcctggcgcagcttcatgtatctcccgtcttctaaagatggattgagcttgacttctggcctctgaacctttaggatcagctctcttttccatttacacacttcgtttatttaaagggaagaaggagggcagaggggatagccctgggtcggttcgtgagctcacgatacctgtaaagcacattgtgaaattccagttctttccagctgggtttgtatcaccagcagagccttttaggtgagctgccttgagcaaccctggcctgtaatattagttccaggatgtgggtaagtggtgtttttcttccatagaacactgatggcggttgaaaaaaaaatacaggctaaagtacataaaacagaataagaattgggaacgaggaatgagggctgtggtttggagaggctaatctagttattttcagttttgtgatcatttgtttcagtgggactgagtgaaaaatgaactcctaaaataaaggcattagtgcggaagtgcaaagaactagtaagagatttagcttccactttctaaattaatttttctctcatatatatatatacacacatcaccatcattatcatcatcattatcattatcatcatcatctcttttatatatatatatataaagtgctgtttatt

SEQ ID NO: 64375 - DNA, 773 bp, Homo sapiens
tgtatatctctggtcaagaatcaagaattatattggattgctatattgctgtctatataatttagaaagttgcagagtctctcaaaagcaataaaaggctggagtcagataatcagcgagcgtgctctaaacagtgcaagttttccactggagacacctagtgatctttttttgcttattccaaatttctttacattttaaaaatactggtcttagtaggctcgcggagtttataatcagctcaaagcctaagcctgtttaagatacgctgctggtaagtgctggctccctgacgcctaacaaaagattttgatgccgccaacctcctacattttatgtggcttctcattgcctcagaggtcaaatccaaaatctgtcttagcatttgttcctgcatttgtttactcttcctttatctagcaactgtttatttttgccacagtgcaaataagccagtcctcacccccttggaggactgctatagtagatggatagaggttatgatgactctgtgtgtgtgtgtgtacgtgtgtgtgtgtgcacgcacgtgtgtgcgtgtgtgtgtgcattttcaggaaggatgttgggaatgtaatagttatgaaaaaggaacaaggagtgtatagaaatatattagaagaaggaggtccagaaagaatagtccaggaggagggaagtccatgggggccaagaaacctcatgatccactggagaaaccacaggtgcttcctgatagctggggtgaagcagagttggaaggagggttggaaaga

SEQ ID NO: 64376 - DNA, 1495 bp, Homo sapiens
cttaatgtctgccagcttgtgccaccctactgctggctgtaggaggaagtggtatgtggggaggggtgggagaaagggtggttataataactttagagctgaggaacacccttttaaaccaatccattaatttttacacgcggagaactgagcacaagcttttgagtgtcttgtccaagtacctgttgtctgtggcagggcaggaactggaacctagagtttcatatgcccagtgcccactctgctttcattctgagcattgggcagcccctccccttgtcctgtttctctcctggtttcccggtgtgtgtgtgtgtgtgtgtgtgtgtgtgtgtgttgcttgcgggtggaggtttagtgattttcatcaactctgtgttgactggtgttgcagagtgttttgcaagctctctgggtgaaggccagtttacaaacatttacactgtgctaccaagggtacaagggaaggctgcttttcttgggaatgaagctgggagcagggaggggactacagaggcatgcgaaaaagaaaagagaattgcaagctgcttgctggaggaatggccctttgttgccagggaagtaacccacatagggctggagccccaccgacccagaaaaaagaacggtgttagagaccgggaagctaggactcatcagagacaaaacgttggcccagcgtgtgcagagaagaatctgtccaagcaggaaagagcagaactacttcaactgcagctggattttggtaccctcctccccttctttctgggtactcagctctgtcccgcccctgcccattggcagcactgattttactttctaaaaagtccgcttcccagaaaactcttgttctttctttataatgattttatttttaagttggattttgttttgcttttttttccccctaggaaataggacacaggatcattgatttcacaggatttgtcccggcataaacaggagtttgtaaggtcctgtaaacaggagcagtaccccagagagctcacccgcaaaagactattagcttttaattgaaaccctccctccacccccacccccagccccttccaggaacaggaacaggtggccattgtgaagcggggcctataaccgaggattctgccccaatgaaagggatcttgagttgacccagagaagcgagatgctcttttgagctccacccccttatggtattcaagggcttttcattttctgagcagtattgaaattctaggacaatggaggccaaatccttgtggtgggggttgggggctgggcgtggagaaaggagagagggcctggaagaggaggagggctcgggagtccatcccttgttatttttcttctttcctacccattacctttaaaacatttaaaaaaggaaagagaaaggcctagtaaacttttaatgaataatgacatcacttccgggagccccacggatcctgctgcgaaacctgaaattgagagccagtaactatttacaatttca

SEQ ID NO: 64377 - DNA, 4182 bp, Homo sapiens
gcatgagccactgcgtccagccaaaatataattgtcaagtattttctggttcttttctttttggcaagttcttcatttttttatagatcactgacaatatgaaccttgtttatgagtatacatgggaagcatgtaaatatgtgtacatatatgtgtgcgtgtgtttcgggggaacaatgaaatgctagccatgtcctccattttttgcctttcactcttagtgcaggtaggcttttctttgttattattttactttatattttagggatgagatctctctatgttgccactgtctatggagcgcaggtcataggcaccatcatagtttgctacagcctccaactgctgggctcaggatttccttactcactctcccaagtagctgggactaccagcataagccatcatgcctagctgatgttctttttaaccaggaatttgaattggcttcatttcattcagaatgacatgtttatattcttgatgagataatttgtgaaggcctaatatacgaaccaaagcatggatgccttagggaggaatttatttttgttttctaaacaaaaatgttagaatgtttttgctttctacggaacgtttttaaaacttcaaagaaggtaagttcggcatgagaatttctgttttctcaaccacgactctctcatgaaataaacagtgccaggccgccctcccttccaagcttagaaacttggttttttcattgcagaatctcttactttcagatcggaagtaggaggaaaagccaggaggccttgaactgttgggctctttctcatttatttacctacttctatcagcctgaccattggaactgaagagtcgattaggtcaaatggttggtcaatgcaagttaaacaagttacttgcttaaaaagaaaaaaaaataataaaagcaaccttttttcttttaaccactcaattgaccaaatgaaattctccccctcatcccctcccattctgtgcctgtactgttgacagtcagttgagatggccaggacagagcagtgactaggacaaaagagcgtgataacagttgaagttttggccaacagaggggtcagaggccagaaaagcaaaccgagatcaagggacagagataactgggggcatagcccatgcaaatactcggtgaccaggagagtggccgtgtggagaagcagggcaggaatgtgaccacccagctgggtgaggggctgctggcgtggaggcagctgcctgctcagcccagcccagctgcattttctcctctttcaccctggtgagaaccagccttccttcggttctgcctgaggaccctgtaggtgctgaaaatggaatacagctggcaggtagtgggcggacagtgaaaacgtgccctgatattattctgagaaaaaaaaagagctttattgcttcttgtcagactatactatgttttaggaagagttgggttcccccaaagagaaggtgcagggtgctgggagcaggatcctcagtttgtaagaacgcactcactgctccaaggcagccaacaaaaaatttttaaaaagggtgattgaaggttcaacttttgacatgtaaaatccagtcatagcttgggtttcccggaagcagtccctgagacagagattttagtgcaacagtttatttgggaggcgatcctgggaaacaccagaagggaagtggaaaattgaaatgtcgaaggaagccaataaaatatgcgttattgagcagatggcccctgtgaccaactaggctcagtatctctggggaacccccagagacagtgtagagtaaattccagaattatgccatccaagggaaaagggagctgaatcattcatctctcagctgttgcaagctattggtggagggattttcccaagaggcattacctcccaggcttgtcctcactttgcctgtgtggcctccagtggtcagacagaacccaaaggaaaagagccagggtgcggattggcagaagctattctggcccatgtgcagagcatcaagaatgtgtgctgcaaaaggtgagtcggtgtgctccgttgctaggaaagctcagtattgcgctcacagagatatctaagattcagccaggagagtccttattatttactcccccactaatgatcatcccatcaatttcatggatcaaaagagacaggaacacacttcctctggcagctgggtctccagcccttccatctgtttggttgtttttgttataaacttcaggaatgtatctcaaataatgagaatttttttttaattaatcactcctttgtacaagtccaggcttataatgaaaagcaatatgaattagaacaacttctgaggcagcaaatgcctggataaaggaatcaagagggaaagctcaatggacagtcatggaaccacctatatccatttgccaagttcataatttttgagatagcagccttctgacaattttgatgtatgtttcacataatcatctattatcttaatttgtaacatttcttttaaactcaccagagggcatgttctttcagaagctcaattatgtgcagttagttgtttgacaacacttttggcaaatggttattaagagagtaggatctgtgtttttgacaaacaggacagagcaagattcccagcacatgctgctgggaggggacccagggcgtgagacaaatctcctgcagattttttgagaaatgtaatgtattgataagcatggagactgagaagttctgacttcttatcctgtagggtacactcccaatgaggaagggggaagaggagcagcatttaacaaatgtttattgagggtttactacgtgctaaatcagagattcttttggtctcaggacactttatactcttgaaaagtactgaaacccaccaagtgctgttgtttatgtgggctatatctactgacattaatcatattttagaagttagaactgagaatcatgttaaaaattattattaatctatttaaaaataataaaaccactatatattaacataacaacatattatggaaaataattatattttctcaaacaaaagaatatatagcaggaagagtgtcagtgctttaccttttggcaaatctcttttgtgtctggcttgttagatggaagacagctgaatttttatatctgattctgcatgtaatttgttgtaatacgttgtttggtagaagtacatgaagagaatctggccacacacaaatatatggttggaaagacgaagagtattttaatagcctttcagataattgtatatatttttctttgatgtgatacccaaacttgacaaatcgtttgtttgatctttcttttctttcctccctccttcccttcctcccttccttcctctctccctccattctcctcctcttccttcttcttcttttcttcttcaccgttttttttttttttttttgaggcatagtctcgctctgtcagcaggctggatggagtgcagtgatctcagctcactgcaaccgccacctcccgggttcaagcgattccctgactcagcctgtagtccagtagctgggactacaggcatgcgccaccttgcccggctaattttttttttttggattttagtagagacagggtttcaccatgttggccaggatggtcttgatctcctgaccttgtgattaccccacctcggcctcccaaagtgctgggattacaagtgtgagccaccgcacccggccttcttcaccatttttaagtgaacattcacatcgctgtcaatcgtcaccatcatctccagaactctttttgtcttgctaaactgaaacactgtatccattaaacaacaactctccattcctgacttcccccagttcctggcaatttccgttctactttctgtttctatgaacgtgactgttctatgtacttcatacgagtggaatcatacagtatttatctttttgtgacttgtttatttcacttagcataatgtcttcaaggttcatccatgttgtagaatgtgtccaaatttccttcctttttaaggctgaataatatcccaattacatgtatataccacattttgttcattcattcattcattcatttattccttcaaagacacttgggttgcatccactttttggttattgtgaatattgctgctgtgaagatagttgcacaaatgcctgattgagtc

SEQ ID NO: 64378 - DNA, 1168 bp, Homo sapiens
agctctgtacatgggagtcagagcttccctcccattcctcccagctctgatattgtagagtctaatgttatgaattatttcaggatatgtgatccctaggattcccagaaatccttgggaacctcccacagcaacagaacatgggataggatgctaaaaggaaacaggtggtaccccaaagaagtagctccccaggcttgtcagagagctagtaggggcccgtctcaccaagggcatggctaagaggccaggatgaggataggctggggaacccacatcacagcatctgtaccgatttcctccattgttcttagggccaggtttggagatgctttgctgaaatgcctttctgcaccctaagaccacaagttcccacgtggcagaatggggcctctcagaggtgccttaggattgtgggcagtgtctttgggtgaagaatccgaacatgatctcagaaaaggtccacattcaagatgaagggactctttcccatccctcagtgttcacttatgtgtgcctgtcctgttttacaggacactcacagctcctggcacctggcagcttttggggtttcctctccccgccttgcacaggttgactttatttccagatcttttcaaaactcctgtggtaacacatcaaattcccaggtgtgcgtactagttggactgttataataaaccttccaaacccacaaagctaaaccctgcatttgcagttctcattcttctttcctgaggagttatggctactgtgaggtctttctcacttcctgggaagcagtttccaagcagcgcagatgtggaggctgcagtctggcctgcagctgccctcacaataacacaactcattagtatggaacgttagtggggactccaccctcccttagtgtcaatatttgtttagaggagaaggcagggagggagaggcgaatggtgagctggagaaagtttgtctgaaaaagacatgataatggttacattccggtctaagaactgcttacatagttcattgctcagtcatggggtgagaccaaacttggcctgcaaggcccagaatggttgtcgtggacatattgcagaagcggaattaaggttttgtctcgcttttttgtgtttgttttcattattacttttatcatagagtctatttcttgaaaagaattcac

SEQ ID NO: 64379 - DNA, 3703 bp, Homo sapiens
ggggtttcaccgtgttaggcaggatggtctcgatctcctgacctcgtgatccacccgccttggcctcccaaagtgctgggattacaggcgtgagccaccgagcccggcctctggtttatttcttgtgctacccctgaggcttttctaaatccctgtttaaacattttaggttatctctatagtagtcttggcaattaggggaagggagggaaactatgcagaaacaggataggagaacagtaggtgcagggggaggccagaactagagtcccagcaagccaccaggagactcaggtgagcacgccactaccggcccctgccactgtgtgctcctactgacttggctgtttctagacctaatattggctgaagctgccaccgctgcttctgctggagggactcctttgggatccctgagtgatcttgtctctagcacctggtcaaagtacgctgaggggacacaggtataccaagtactgggagagcatcactgtggaatgtgagcctctgggctgtctggggctttctgggcttatgtgtcaccacgactctcagggtgaggatttctccaaacataggaagaggacttagattgccaggaagcctcccaccgaaacaaatattcattacggagattatatcaagaataacacaccttgaggcgcagctgtatttctcattgctcattattgcctgcctcatgttctccactcctttagaggggggaagcccttctaggtggcttccaaaatagctcttggtaacttggagagaaaactggaaaggagactcaaaggggaattttatacactcagagagcaaaggacctcagaagtgaatccatatttggtttgcttttaggatgaaagtttaagtcgcagctctttgtatctgggtcctgttaccctgcaagggggcgagaaatgccatctcatgtacactggagctttacagtttacgaattgctctcacatttatgggtgcataaaaagtcaaattgcaatagcattgtgctgtgggaggtttgtggaggagctgctgacagcagctgtactgggaatataattatgcatatatcatttagccaatcagtcaatacttttaggcctttgtttctgaacacctactatgtgctggttatggtattctgtgctgcagggcttgtaagagtaaagaagttacagttgctgacttccatccatgaacagggggctaattacattaaaaaatagttgtaatttagcctaataagtacgaagcagagaggggaataagagccgtgggagaaccaaacatcaggtgtgagtcaaaaggcatgctgatttggccaacatttattaaattggctcattgcacacagggacagaagtatgagtgatagtggggtgtctctcagcatccccataataagaactgaagtctgtcacatctaatctattaggaaagtctcggtagctggctgttctcccctgtctccgttccccctaggaccccgttatgcatcataattcattatccttccttttactgaattagctcttctataataagtgggcattctcatagaccgtacctcaataaacagcattttcagtgcatacaagaggttgcaaaggggcttgaggtgacatttctggggactctcctttatgcaattatgagaagagggtgaaaaaaaaaatgtaagcacagctaatccagggaggcaaaactagttgtgcctgcgctctcctctaggggagggcatctgtcagtgctgagctgatgacaccagcctttctttcaccatgacctctcgacccagttcaggctgtcacatttctcttttgtgattacaaaaggcctctggggactctatgccgagaagtttaccttccaacccagccaagagatgaatcagacgcaaagtgactttatgagaaacacctctggctagagggttaactcagggctttgtattaatgagaccaagtttgctggttctgttgcagaagagccgccaattccccagagccacccatgactgtcagccctccaggccagccgtgctcacggtgcatggccctggaccctgggagagcctgatgtgggtgtcccatgagtcagcatggacccagtcccgtcactggagaaacagatccgacagccatgactcaggaatgcggatgttctgtcccaggagcaccgcagagaaaatcatgttgaaaccttgatgttattgacagaaaagaacacattgctcaatggagtgtgagtcaaataactatgaacttaaaaatatagtagtccttccttatgaaagctttcgtgttctgtggtttgttacttgcattcaaccgcagtctgaaactatttttaaaaattccagaaataaacaattaatcaatattaaattatgcaccattctgagtagtgagacaaaaccttgcaccatcccactccatccaatcccagcctgggatgtgaactatccctttgtccaacagatccacgctgcctacgccgcctgcccagtagtccttagtagccgcctcggttatcagactgactgtcatggtatcgcagtgctgtgttcaagtaactggttaatctaatcatagcctatgtagggttccagtttgaggcattttctgggggtcttgggatgtatgcccccaggaaaagggggactagtgtacctaaagtcatatccaagtagtacaaaagtcaaacttcagaaattctttctaagctcatcaaaaaaaatggtaaaaagtgtgcgaaggattgaatgcttgcatccctctaaaattcacatattgaaatcctaacctccaaggtaatggtattagaaagtgggaactttgggaggtgattgattaggtcataagcgtggagcccacatgagtgagattagtgcccatatattagtaaaggagatcctggagagctccctcacccattctaccacgtgaggacacagcaagaagacagctgtctatgaaccaacagtggggctctcaccagacactgaatataccagtgtttgatcttgaactctccagcttccaaaaccatgagaaataaaagtttgttgtttaagccagtgtataacatttttgtatatagcagtctgaaaggactaagatgcaagttacaaaaagtctttttttttctcattttagctgtttaattgcctttgcatagaacacaaatcaatttctgcattttctcggtagtttctctctgcaatttcctggaaatagaatctagaggggccttagcaccatgggcttcttaggctatactctagggagtgagggcttctttcctcctgaaaacttgggtcactcacggacgtactgatgttgatcctgcatcctgaaaggagcgtggaataaacaattgcatttctgccaagctcccttaaaagaagaggagaggctaaataggagtgttttctgtggctatgtctttggtcagaaatatcagaaacagtgaatttcttctgaagttcagctctgtcctctgtggctacagaggggaagcttcagactgtttatgaaaggcggtctggcttgcctcgcaatttcctctattttcttaaagaaaacaaaaagaataaattataatgataaaatacagataatcaaaaagaggaaaataaaagtcatcaaaaatattattctgatgttatttctttccaacacatttcccctgtgtt

SEQ ID NO: 64380 - DNA, 838 bp, Homo sapiens
ggtctctgtgcctagtagagtgtcagctacatagcagacgcttaacaaattttagatacttaagtagaaagctgcttataattatacccagcaaaagacaaggccatttttgtcaaggagagggtgaaatgaatagcttgatttcttcccagttttagcattaacatgtctaatgtcacatgtacagcggtaacagggaagggttccaaagtcctagttacagtgacagatttctgttcagagcaaagtctgcaaaacactgctcccacttgtcaccttggcacttcggtctttattgtggtcaaagccacacactatttgaaaagttactgggtaatcctaaccacagatttcccttagggctagttaggggtcaaagaatgctttgaaaccaaaccaaaacttccacccaagtggaactgtcttggtctgaatcgtcccagattctgagacaagggtctaagtgcaaggagattatttgggagagatccaggatgtgctaggaagagagagaggggtgagacaaggaagcaaacgaagccagtgcaaggcgaacagaagagtgggctcctcctgaggacagctggggcttaatccgcccccaagaacttctggacaggacgtagagcacatcttaggcttgccctgcactctgtcttcattctcactatttgctcatccattcaccagttggaagacatttggttgtttctagatttgggctcttaacaataaagttgccttaaacatccatgtgtttgtgtatacatatgttttcatttattttggacagatacctagaagaggaatcgctgagttgaatagtggaatgataagt

SEQ ID NO: 64381 - DNA, 1325 bp, Homo sapiens
ttatgacaaaggccaattcagacttcttctctgtaagccaggaagttcctgatgcagaggagcggcttagttaacactgttggattgatagactctggtctatgaggttcaaatctgtactttgaaaataatatctccagcaagaaatcaataaataacacaagctaaagggatgctctgggttccacaggaaaccaaggcctctgcaaagaccggaggcagaggcaacactgctcttaagagtgagggttcagagctggctgacacgaatatcacctgtcagtaactatgatggaaaatattagtttacattcttcagttccctggtgactgaccatattaggcctgagcaacgtatcttaccacacttgctaatctgtggatttctaaaagtggataattagtccagacagttagagctcaaaatgaaacgagcttaagtctttcaggaattacagcaggtgcctgaggggatctgccattcaggcctgacccatttctgcctgtgcctgggagagagctcatctcctcagactgatagatctattggcacattcacccatttatgcccaaactgagggctgctaccctggcaaacttccactccgagataaggcaggaaagtggtggctgaagcctgagttcttcttccaatcactgcatcctaagcatatggataaattcaggcttatgagaacgtgatgagggtaagaacagagactcagcaaggctgctagaactgcccagagtcactcagccagtcagcagcagagttgagctagagtccccagaacctgacactgtccagggtttttcccattagcccacactgtctccatgcgggtgtttggtctctgaagctctcctcttggggtaaggagaatgaaggagcccagttattttctcccagtagagttcatagcttctcccttcccaaccctccccaccttctgtctggtttgagtttactgtcaaaacatgcagtcaaattacttgtctgcagacatttttgctggccttagtgtatccacaagagagctgttaatgattacccttcctgcccatacttagctcatcttcagaagggaactgctcattatcattctctgactgcaggctgggccggctggaaacagtcagtcaggattctagcagtggtagagctggagtcctggcattttctgccgttgggtcatattgctaccaaaagtgactcttggctcttgggaggctgtgggcctgtggtccctcaagccaggcttcttggagcttgtgagaaagtaagtaagtgggggccagggaggggggcacttttgttcatagtt

SEQ ID NO: 64382 - DNA, 743 bp, Homo sapiens
ttattgttcctgctgcttattggtttagtgacctctctgaactaactcttcaaagtctgtattctttgttgtgtgtggccattcaaatctgtgtttggttagcttagtagtcagtcaatgattggaccgacatttttttttaatgccagtaacaagtaagtctcccagtctttgttgagaaactgtgtgttggggcacgcctttaacactcagccatgcaattttgacagccctgccttagtcttcactttttgctaatgcagagcctcaaggtcagccagaggtgaggatttaaggccttcttgggcctttctaagcatgtgtacagtcctgggtttacacacagccctgcatgtgcacatggccttccagagtcccagaatatgttggagcttttcaaagccccctgggtgtctcataccccagcttttccttttaagttttctgccaatccattgtttgtccaaacagtatccatttcttcaggcagctgtgatgtttaacaattaactctgattgattttggcaaatgccctaagtctgttcacattaagtgaccttgaggttagtgcaagaaagataaacctggtaggtgaggtcttccaggaaaccatccgacaggtcaaataacaattctcaaactgcaactctgaaggagttcctactgcattctactccttcctggggctgtgattgcggagggttgattttgtcctatgtgaaactacaggcaatctcaagag

SEQ ID NO: 64383 - DNA, 779 bp, Homo sapiens
agcaccacagtagctggctgaagccttgggttcctggtgagagacagagggaaggtgatgtggggatgtgtagtgaaagaagaagacagaggttttcctgattgcttgacaaacataagcccagcccttagcttcagcccaggctctgacaacatcagatcacaataaacctcaggttgtgtttactccccttccctggctctacctcccctggtttctcaatctgtctactcttatctggcactgataatgtgtgggctctgaaaatgtgccctttggtctaaaagtgtggggattccaaaaagcctccaagaatgaatgactcaatcaaggctgaaaagagccacattgtccagatgtgtacatctgcttggacccagctcgcaaagcactttaaccatcttttcacaaccgctgtccacatggagtgaggctgcagggccggcattcctactcctagattctcatcttcctggatgcatcgtcagtccctggttgggattccaccaccgagagctgcgctgctccatgtgactcctccactgcctctgaagaccccctttaggacccaaggatcaaaatccctacctcagggtgcccgtcttgttttccctgtcctaaaaaaaaaaaaaaaaaaaaagactaagggactggtcatactgctctggtctcattccaaagtggctcttacacttgctgttgataaactcgataactgctccttgtttaggtctcacccgacctctattccagttagagggctcctgggccacccccaa

SEQ ID NO: 64384 - DNA, 768 bp, Homo sapiens
tcagcctcccaaaatgctgggattacaggtgtgagccaccgtgcccagcctcctgcagcctcttatctgtcatgcagactaatctcctttaagacatgctcccaggccactgctaaaaaggctgcagaatgtggaactatttgatgtcctaatagcccctgccaacatgaaaatgaccagcaggctcagtcatgttgccgaggttaaacttcaactgtttaaacgccaaccgtggaatttgcaaatgggtaaataccatactctgtacaaggagccaaagaatctgctcaaagcagctgctcaatgtgtgtcagacggggccttagttacagagcaacacagacggactaacaaaatacatattctgatgtttcatgaacctactacgtcagggagactaattgaaacagctctcctgccaagcagacaattccatatgcagaggagataaataaaaagaggctgcgggctgtggaacattagagaaagccaggtccctctgagagatgtaagttaaatatgtttagtgtaacctgagataccccgggcctctccagcttggacagaccgatgaggttacattaggaataacctgcattccactccatgccctggctgctcgtgatgaacttcaggccttagcaagggctccatgtctatttctgggagtgccaaggatgtctcttggttcctcatgagcaaagctggtcctgccaaccacccattgggtctaccagacctggctgtttcttgtccatacccagagcg

SEQ ID NO: 64385 - DNA, 1068 bp, Homo sapiens
ccttgtagggcaaattcaacttttccaaatgacactgctataagttactacatctcatcctctacatctctgtgagggatgatggattagtattaactgtcttgcaaatacacatacagaaactcaggtaaggtcagccttactcagtagataaaccccaaacatgaaaccagctgggtcagcctgtcataattggatccctcttgcatgtaaagacaaaggttgtctgcttggagatggagaagagttcagcatagctcgctttggggccaactcagagcaagggtgaaccaatcctagctgtcctctgacaaataacagctggagtcctgccaggagctcctcccccaagcacttggttccacaaggcaaaccccagagaagtacaggggaaaagagctctccatttctcagcaggggacaccctggtccccactgccactttgtttgccctccaagggaaaaacctctcaataccaggtccaggagcagctggatgggatcactcagaacccggccgagagctaattccctcttggcttcaaaatccatcctatgcttggagatgctggggctgggattctacaaaccacattctggctttgtgccctgataggctcagcccccagggggagctagaaggaatctgctaggctaaaggaggaagtaggaagtggccccttgctcacttcctgtttgcttcctgttcactttctatcagcttcctgtcccttgccagacaggttgctaaccctagcagtgctttttcttcacccaggcagtggcaactcctcccagaaacatttcaatgcagtttttggtttttccaacactcacaaaagcagcctcatgggggtcccctcagagacaccaacaaaacatctcccctattcagaggagggggcaccatccccacaggactctcctcagagctcagagataccagctgcattgagtggcatccccactcccccacctcagaagtctgagattcagccccatgtcccttctccaagcaaccacctttcaatgagtccagcatcttccccttgttcccaagcctcaagt

SEQ ID NO: 64386 - DNA, 636 bp, Homo sapiens
gagaaaatccacaaaaagcattcagcacatggcaatactcagtgaaggctattttcctcaactacaggagctttttcctttgatctatttcttgatctacctgtcctcctgatgggacactccctaccctgggaacactggaaacagtttggcaagtggcttcccgggccggaaacagtgactcattggcatctggaatacagaggtttccagaacaatcccactagcaccagctaaaatctatgtctagggattggcagagaggaggggccctggcaagtagaccccctttcctagaaacctctttcctttgatgccagggaacatttgccaagaaatggccataggtctgccacctgcactcagtgtcaacagggaacttccttgatgattaatgtaggaaatgtggggcaaacgtcaactacacttcccgactgaaaactaaaagtgttcgctgaaagtcaaagtagaaggaaaaaagcatatgaggtgccaaaccaatttccaggaacttctccaggatctagctttaggcaaagaaaaacgacttgttctagaaacagtttccttatccgatggaaataaaatgacaggctatgagcatgatgtttcttagtctctcctgatacctccatc

SEQ ID NO: 64387 - DNA, 2363 bp, Homo sapiens
tcaaaatgcagtacagtacttttaaaacaaaagccatccaagttgaataagcgatggcagtttgggggcctgatatggctgttatttataaggtggccatttttacatcctaagagtagttcattagtcaatgcattttgagtatatcaaatttgatttgatcttatcctagcatactctgaacacatcttgagatcaacccttctcaagtgattttggtgagcatagccaaagagtaccctctgctggtcagaaaaaaaatggtgctttcacaatacccagatttactccaacgattgcatatgcatttaggttttgtggctcttaaaatgcttttttttttttttttgagatggaatttcgctcttgttgcccaggctggagtgcaatggcgcgatctcggctcacggcaacctccgcctcccgggttcaagcgattctcctgcctcagcctcctgagtagctggaattacaggcgcccgccaccacgcccagctaattttttgtatttttagtagagacgaagtttcaccatgttggccaggctggtctcgaactcctgaccttaggtaatccaactgcctcggcctcccaaagtgctgggattacgggagtgagccactgcgctgggcctactttttaaagtgtatggaagcattaactttaatgttaacatcagaatttgagaaaaagaagtttaataattcaaaatttcgtgtaaaataatcaagaactccacgtttctatcactcactgtaggctcccgtcccttccacccccgggcggggacccctcccagcgacccggccagctctcagcacttcggtccccactggcctactcgctccgacggaggggctcctgcaactgcgctgtaccgtaaatatttgctgaatcgatttgacttttacttgttccaatttcgcttttttgttgttttgtttttttgtctttttacgaacaagaggtttagagaaccacatggaaaaaaggcagggccaggcccggacaccccgcctcctgcctcccggcccggcggtgcccggatgccccgcccgcgcccatggcgcagccacacacgacctcggtcccgtacttcgcgcgctctcctgcaccgccgccgccatctcgctcaggagctcctccacaaccgccggcaacactacggccatcgcgccgcaggacacgccctccacgaccggcggaccgccgcgacgctccagctgactgcgcctacctgtggaggatcctgaccccccgccggggcagggcgagacggagtgacgtcggggcgcgtcatcgcgcgtgcggacgcagggatgtcctgctcagtcgtcagggcccggccaatccggagggcgctcggcgcgtggtcgggggccaggagcgcgtctggcctgcagtgcgcagaggacgcggcgggagcatgttccggctcctgagctggagcctgggccgaggcttcctgcgggccgcggggcggcggtgccggggctgctccgcgcgcctgctcccggggctggcaggaggtccggggcccgaggtgcaggtgccgccatcccgagtcgcgccgcacggccggggcccaggcctgctgccgctgctggcaggtgaggggcgcgggccgggcggggccggccgggcggggacaggggcgcgggccgggcccgatgacctcagagccccttcccgcagcgctcgcctggttctcgaggcccgctgcggcagaggaggaggagcagcagggagccgacggggccgctgccgaggacggggcggacgaggccgaggcagagatcatccagctgctgaagcgagccaaggtgaggcggctccgggccctgcgcccggccgagcgcggtagcctttgtgagcggggtcttggcgttgctgcgcattactctctccgcctcgccgaagagtggatggaggctccgcgggtaaaattgccgagaatgaggtgggtcatccgagaggggattggaatccatccaggcttttccgactctaaggcctgcagtaaaacctctgcagtgtcaagtgcaaatggagatggcgccctaggcatcacgctttatgcaaacgaaatatcgggaacgttttgtagtggttttatcaattaaccagcctatctgaaatgacataatttcgcacgtatatagcggcctgaaaatggcaacttagtgttggttatgcggttcggttctcctcctgaattcttccttttctccacatccttttctatttttttttcctcctcttttcccaagttatctcatctcttccattgagctaaatacctactcgatgccaacaacgtccaaatttgtatttccattctgtagtgtgctactgacatgcca

SEQ ID NO: 64388 - DNA, 2233 bp, Homo sapiens
agacatttcttagtgtcagcacactataccgatcattttcagaaacctgggatgacaggtgtattacacataccaccattcatgaaatcttgggctcatcaaagtcctcaggatatactggaaagggccgttaggaatcccacagcattcagtggagttccagcctgtcagatggggatgaaatgaggcagcaccagcttgtcgcttcataagcacacagtaaattagccctatatctgcattcatgctctctcttcagaatcaccttgaaaacatacactttcttcttactgtcccttctctctgggttattttagaacgatatacacaagcaaaagagatctaccaggaagcactgaagcaagcaaagctgaaaaaagatgaaatttctgtacaacacatcagggaagagttggctgagctgtcaaagaaaagtagacctttgacaaattctgtcaagctctaaatccatttttgtgtagggagaataatgtctagtaatgtggaagaatagctatcattcctgtctctgtggcacccgatcaatggcttaaatctgtcgtttttgatattcaggtttcctcaatttagccttagtgaaggaggggttgtacacactgccatttttgtattttaaaggaaaaatgactttcattcccaactgattatgacctttcaggatgtcgtcaagtgatgctttcagttgtaacacgtgacttggtgctgtccctgctggtctaagtagaactgtagattcatatgggctggtgttcctgtgcgctgtgggtgtggtgattcagcctggcatttctaccataagtttttggtctgctgatttgctgccctgtcttctcttactttactttatcaatacctggcaaactgaccagaattaccttcctcatggcaaagggggattatggtgaattgttgttcttatagtctgtttcatgaagcacaagtggaatttaatacataaaagagaaaaatatcttagtttgctaccagcatccagcatgaagttgtaaagtggggattaggcacgtgacagtatagcacccatttgaatttaaataaaagtgaaccatatttatctggttatataaaactaaaaatgggggtgtttatataaaactaaaaactaagaatgatgtaaccttttgtctgtgttatctgaacactctacttcctttgcagccttagtcacacaactgagtcatctcaagtactctttaaggacacacagcccaggctgttctgagtcagaataggcccctacaggtatattttaaaactcttcgtaattctaatgtgtactgctggtatagctgaactactgacctggatcttagtcctagcctttttgcttttgcaatttcagtatcttcatctctaaactagggaaacactgggattctttcttagctgtgggggaaggtatttggttagatgactttgaatgaatagactgctgtgctgaaagagctttatcacactgtctcaaagtatgtaaagatacataggtggatgctcttactgcagcagtcatgaatacatttttagccatttacctaaggaaaaagacagtttttctaggtaccatgaaggaagattgaccctgttggtatgcctgtgggggtgggatgtgagtgggactgataaactgatacttttggttcgtatgtacatactggaagaatcttcataataaatgagactacacaacaatattgtatgtatcccagtaatctttgcatttctcaaaaaaaaaaaaaaaaaaaaaaaaaaaactttctgaagaaaataaaaacaccagaaaccttgaggtccaaatcctcagggattagactaaaactagagttttgtatgttgcagatgtaaatttcttcctattttctgtctaatctcatattatttaccatgcagctaatgccgtttaccaagtctagctcagagagataagatacaatataaatcagactgtttcagtagaaaccagtattaacgtatggtgatttcttaaaaaaattaatgtcaaccactcaccttttgcattgagaatgtttttaccttttcacaactgcaggggttactgaaaggtttttcattccaagttttatttatttattaattttaaatcatccacagtgactcagctcatggtctcgttgttggaaacactaggagttttcaggacagtctcttcatgtgggtgttttcattacagttcatt

SEQ ID NO: 64389 - DNA, 1210 bp, Homo sapiens
gcttgcatttaaaagaaagccaggatttcacttgtaacaatcaaaacaaaaaacaaggttcgtcctcctgccattaaaatgtggtaattaaggaactgaaatttctgggacatcaagccttctttactggcctcagagtacagaaactactaaagaaagaaggcagggtgacaaaaatcatacttcactaatgaccaacccccctttcccaactggaattaatacaccacacaaagaaataatatgtaaaggaaaaactgcagaacaaagcttcttcatgctactacaggacttgagcagaggctcagcaagttttggtagcccttttgatttttccagactgtgtagctgatgaactcagcagaatttcacagaagtgagacacctctgactgtgctctaaaagaaaacatcaaaaagagctcagaagagatcagagcccaggtcatcagcaaattttttcctcagccccagcaaaacaatttcacactgccccaaattcctatacaaccagtacaattgtaattgactaagtcaccagtcttataaccttaaaacacacacacttaaagccaataaaaattggaaggtaagaacagaaaggggaaggtcttaaagttaacatgtatagttttttttttaagacctctaatctctttaatctttttcttaaccatagtgagatagatcttttgcttgaagataacaggaaaataaatctaaactaaaacagaaatactgctgaacttcaggtaattttgaaaagcacaagagatattctcaaaatattaagaaaaaggttgtaagattaaagcttaggattattatggtttttttgtgtgcttgtttttaacagaatgtataaaatctcattctagcaactcttatctggctatccagagacatgtctgaaacaatgcttatcagatacaagcattagcattccggatgatgtgatctgaagaactgtttctttttcttccctttttcctactctttttttttttccttttttgagacagggtctcactttgtcacctgggctggagtgcagtggtgcaattgcagctcactgcaacctctgcctcctgggctcaagtgatcttcccacctcggcccccacaagtaactgggactacagcgtgagccaccacacccagctaatttttgtaatttttgtagagacggggttttcatcatgttgcccaggc

SEQ ID NO: 64390 - DNA, 1509 bp, Homo sapiens
atttttaggagatggggtttcaccatattggtcaggctgatctcgaattccgaacctcaggtgatccgcccgccttggcctcccaaagtgctgggattacaggcgtgagccaccgcacccagcccagagaccatcttaatccacagataactccttaaggaaatttgtttcccaagtgaatcagtcacccacacttctattaaagttactcaacaattttctcagttccctagttttgacagtgttctttaatagtttcattctttttgttcatttatcttttcaataggtatttactggatctcagttcctttctgtgctactgggtaaaccttccttcactaaattatttatttatttttccatattagagcagtcactcccctggtatacagttggtactcagtacatatttgttggactgactactgctgtgccaattttgtattggtaaataatgtcttttcaatcttacctgacgtagtaactgctggcagattaaagatctcagttcctggctgagcagctgctatatttaagcaaacattcaagttaattaagatgtgataatcatatataccaaactaaagtctcaaaaaattcctataataaaattaatctttttatttttcatgatctcaacctttatttctcacccattaagtgaagataaaatggaagtattttttttttttgagacagggtctcactctgttgcccaggctatttttaaagggaaatcaggaaataggtaaggtaggaacatcaaaagaagagcaataagctgtgtgcagtggtgcactcctagtcccccagctactcagcaggctgaggcggtaggactgcttgagcataggaatttgaggccagcctgggcaacacagtgagactctcccatctgtttaccaaaaataaataaataaataaaaaaagaagcagtgtaacccagaaaagggaaaggaactttgcactgctggagaaaaacaaataggaaaatgctgttctcagaacaggaaccaaggctttctgacgaagaagaaaccttggactctgggatgaccgccacaaataccaacaggtttgaggcagcctgggatgtgatccagaggaaagccaccacagtgaatactatgaaaatgactgtgtttccctgcatggctaactggaaactcaggatatttgctggaaaaaacaaaagactctgttgatccttttcattcctgctgactgtgcaacttgtaatctgcagtttgaatgataacagcataagacctgggaaccgcctataataaagcagtgtgccagaaaggggaagaatttgggacataaattggtgtttccgtcattcccaacttgacgctaagaattttaaagagaaaaaaagaatgcagaaagcaagtgggcagccaaatgatgtgtcccaaagaatgtgaaagttcttttttttttttttttttcctttgagatggtggtgttttattcttgtcacccaggctggagtgcaatggc

SEQ ID NO: 64391 - DNA, 2060 bp, Homo sapiens
actctccaaggttaactctgtggaagaggcaccgcagcatgcaacatcacataaagaaaactgacacttcctgagcaaatagttttcgtccatatcacttattcccatccattcctttaatacatgactattcctgatccagttaatttgaagaattcagtctcctctccataaaggctgatttcacaactacagtttctcaaattcctctctccccaaaaaggggtgcacttacggacttcgcttaagaaaacaccaacaataaacggcagaaggtatagtgttcggatctttgccatctccaccagtacccagccttcgccattacaccctgaagcggtctgttagaaaggtgaactaatttactctgcacgcacttgtccatggctgtcaacctccgcagccccttctacacttccaagtcggccaccaactccgcctcagtgagcccaggcccgccacctgcgccggccccacccggggcaccggctgcccgctctccctcgcaggccctgtaggctccgcacgcccctccgcacaggacacctcggggccagccccggcccggccacagcccattcttcctccaaactccataagcctccgctagcccagcccgagctccccgccgcgcccggctctctcctgggctgccgagtggaagaggccaggcggccaggacgggtcccgacctgcccaggcctgcgacaccccccgcccggcggagaaaccgtcccagcggctgctgccccgggagccctcggaagcccccggactagcaggagcccggaggccggggttgcaggcgccagggcctactcaccgggagctggctaagcgtgggagccgacgtgcgccccggcctgaggagtgggacgcggccacggcgcgcggccctacaccgggacctcgttcggcgcggcgagtcggacgctcactccagccgccgccgccgccgcggctgctgcttcgccaccttggccgccatcttgactcaacccctctccctccccccagcccgcggagccgcggctaaggcggctccagcgccggctcctcctccttccggagagttgggagaccaactccctccgctggccgggcgcctctcctacctcggcggagcttcccgggtcgcgctgcgcccggtctcttcatgtctcctctaggcctggcagcggcggtcctctcggacggatacggggccgagcagcgcccagccggatccagcgctgctgccatcgtgccctgggcttgtgcgccccccgcctgcccgtctgttccgcgcgcccgaggccttcctcaggcgtgggaaaaggaaaaactccaggccgtggaagggaccctgcaaacccctccgcggcgtggtggggcggcggcggcctcctctggccggagctgcgtacagggaagccggtcccctcgtggctgggagctggaggggtgcatttcgacctgcccaagatactttctagggctctggctggaattcgcaccaagccctcactgaaatgctgggcgaggccgatttgtccacgatgttgctccttaaccttaagttacttgcaagaggagcctgtggccctcgcgactgttaagtgcacgctcagcctcaccctgctggggaaacgacggttcctcgtaaccgcacgcatacgttcctttagaaaagccaggcccgaccggacgcagtgggtcacgcttgtaatcccagcacttagggaggccgaggcgggccatcacttaaggtcaggagttcgagaccagcctgacgaacatggagaaaccccgtcactactaaaaatacaaaaattaagcgggcgtggtggcgcgcgccagtaatcccagctactggggagaccgaagtgggagaattgcttgaacgcgggaggctgaggtagcagcgaacctaggtcgcgccactgcactccagcctgggcgacggagccagaccgtttcaaaaaaaaaaaagaaagggccgggcgcggtggctcaggcctgtaatcccagcactttgggaggccgaggcgagcggatcacgaagtcaggagttcgagacc

SEQ ID NO: 64392 - DNA, 1265 bp, Homo sapiens
ctctcaaaaaaaaaaaaaaaggtaaagaaagccatccaaaagtgagaaggaataacaaagttggtgtaactggctattttggaaaactgtcatacggataacgggctgtctaaccctataattacgagaaaggcccgagttttaagaaatgaattcgaaaatgaagaggaaggaactcttcctataagtgggagcttatatataagacgcttccttttaaaccgattgtacagtgtggtaggactagggtaggaaactggacggcatggagacttctgtgttaaaacacaagagaacccttaacgttaaaacctcaagcttccggagcatgtcggcgggagggacttaacagcggaacccaacattccccggtgaagttttccagccggagtcagggtcagaggcagcctttcctactgcgcaggctcagtgctgcttacccatcatggaagcaatgtggctcctgtgtgtggcgttggcggtcttggcatggggcttcctctgggtttgggactcctcagaacgaatgaagagtcgggagcagggaggacggctgggagccgaaagccggaccctgctggtcatagcgcaccctgacgatgaagccatgttttttgctcccacagtgctaggcttggcccgcctaaggcactgggtgtacctgctttgcttctctgcaggtaggaggccataggaggggcgatgggagccggggctttgaaagggatttaagtgctaaccgatctcagtcgccttcttctcgaagttttccgtagggagctaagtgaatacaccgaaggtcttacctctgaacccctcacagcctagggacaggagcggccggcttacctggtgggttgggggacgtcggcagctcgcgtactacgccagcaggattgaggagcagagaaacagttgcagttggttgtattcagtacctgcatttccgttgggaactccacctgtacttgttattctgtggaacttttttttatttgtagaaggagcaagaatattgaccttactatatagcacacgaaacaatctatgctgtatcgtgcctgctcaatccttaaagttaacttctaatgatagtaaaagaccttcctgctgcctttaaaatgcagcttgtgctagtaacatgcatgtgtcaaattgaagaattagacatagatgactagatagaaagtaattttgtaggtaattttagagttcaactccacccagctttcagtgaaggaacctttcaaataatagatttttgc

SEQ ID NO: 64393 - DNA, 973 bp, Homo sapiens
tttcgttttatttaaagttacccttgacttacatagttttaaccttctggaaagttcttcttttttctctctctcttcctgttcctgattgccacactggatagaaagttctaaatgaatacttaggtttgaaagtatttttctacatctatttattttgccattctacagatttggctccattgtcctaaggtttcagcacaataaaaatctcgtttctcccagtgcttgtcttgacatcaatgtagcattaaaaagtccaagacttttacagactaatttaagctgaacaaggaaatataatctggtacctactaagaaacataaatgggcctgggttgctagcagttcctggaagtcactgtgttttccaataaatccatgcaaatcgtaacagggaaagagaagccacaaagcagaggctgggactgttgggatcatgttagtaattaaactctctctcctcttgagactcagtgagagccttccccttacaaaaaaacaaaaaagaccatagcttgctgccaaagcggatctgaccacgcgtcctctcactctaagagattaaaataaagcctcctgcagtccttttctccaaatacacaaagaagtggctgggctgaggctcaagggcacagttccagtccctgttggcaagagaagggcagggctctggttctcccaaagggtgcaaaggacaagaatgtttcctagaaaagaaaccagggaaggagaccaaagtagacctagctgatatggagctgttatgtgaaaactgaaagctgcttcgatactacttcaaagccagattattctgggaactgaagggagactgagccttcaagtaatatgactagggaagtcaagtacaaaaaaaaaagtgagaccaggaaggaacaaagcatgcatttggagctaataccactcattggaagaggttgtttggaaaaggtttgcaaataccacaaaaatg

SEQ ID NO: 64394 - DNA, 3334 bp, Homo sapiens
gtgagacaccacacctggccaaattggcaatttttgaagaaagatttctcacaaggactttgcaagctttatgtactttatttgttgcaataatatgaaatgcatctttctgggaaggagaacacaggtaactgatttcagtgtaatacctagcactcatgccttgctaatcctttttatatcctatgagaaaggaaaaatccaggccgggcgcggtggctcaagcctgtaatcccagcactttgggaggccaaggcaggtggatcacgaggtcaggagttcaagaccagcctggccaagatggtgaaaccccatttctactaaaactacaaaaattagccaggcgcggtggcaggtgcctgtaatcccagctactggggatgctgaagcaggagaatcacctgaacccgggcggcagaggttgcgccactgctctccagcctgggcgacagagtgaggctctgtctccaaaaaaaaaaaaatccattttatggttagatttgggggcttcaagccgtatgtggaaaaggctctcttagggcatttggtctgtctgggctcctaagctgcttagaaatgaggtccttatcacagcagatacttaataaaagtgcactgatctttatatacctcttttttcagtcctttttctttttctcagatcgccttttccttctcttacttatcttttcccctatttcttttctctgcgtatggcttaggttagtccttggcggtgcagagacaccccccagaagttgttggaccctgctgcaacctccctgcagcttagacttcatttcttcacactcctgtatttggagcagcgacgctagtgccaggccctcagaccaggagacagttgctgcctcccacagtggcccttggggggcgatattggcagtcccaggttaggcttccacgtccttggctagccttaaggttagctctgaactctactgacctttgctcgctttggatgacaaaggaaatgatcgagtttagagatgggccagaggtgggtggaggggtggctgaaccttccggcttgcgctgtacaagccacaagaccaaataagggcgtgtgagccgcctccgtctgtattaaagttcagagtgcagtgtgcaaaagtgggactcggttttcagagataagctgttacccaaccctgcttgagttccagcagcggaggctgcgaagtctcctgctctgagcagggctgggtctgggggagaaagacctgggcccctgggcttgcttagctggggagaggaaagaaggggggcttccctcaccagcacctggtgactgaacggacccacaaccccacagattttcacaaagggtttccatgactctcccgactaaaatgtgccggccagtgtgactcattagaatgtgtaggaaaggtcactgtttgaggatattcagccagtgggggaaaaaaccacaacgttattttaatgaacgcttttagcctggcttgtttcctgaacattaaggtctagggcgggacttcgagtttggggccttttccagaggtattaacactgtgtttgctaaatacaccccagggaaggagtcgtcgggcttctacgagtcacacttaaaagactggcaagagttggcttcttctgttgtgttcttagcttccaaaatagtagtctctcctcagagccagacgcgcaatgccatcatgttaatgaggtgcctcatgtgcttcaatagccactgactgatggtaccccgaacctgcctggattcctcacctcttcccctgcccatctctccttcccgcagcaaactgctcatcctgcagcagtccgaacctctgcctcattggccctaagcttcctaagggaagggaccatgacttgtattcatgtttatatccctaaaactcagccctctgtttggcacatagtgtgtgcttagtccagatcacttaaatgtacaatgatttcattctctcggagccccgctctggtggtgtgggtccctggggacccctccagatgcctttctccagccatggctgcgcaggcaccgagaagccgcaggctggttccagctcacagcctctcgcctcaggcccacactgctcctcctgctgtctgccccagggcttgcgattgcccgggggtccccaagcgggctcaactctgaaagattagagagctaacagcctatggagataaatacttccttctttatcttcctgggaagatggacagttgtaagatgattttcttacaactttcagacagtcctgtgggaacacacagccagtgcccataagtagggccacatcagtagagcatccctgcttccctgccttctccatctgtcagtggcttctgctcctggggtcacagtccccaataaagtacacactaagccttcttcctaggggagctgagactcgaatacattcagagccctttaagaagttctctcacagacttatttttgttttcaaaattcaattcctctaaatatatttctgttcctctttcgtctaagtctcattctttttgactgagaagtcagaagcaaaattaaagtttagtgactagggtttttttgtcctgttatacgttgacattccttaccgtgggtgtatctgtgctttctttgctcttactctgaacatgcccaaaaaaactcttgtgttatctttagcatatttcataagccacaattcaggaagttagagaaattgctccctggtgcagagcaacagaactgccgacctctttccactccaattgcggtgaaagtgatatctctctgcctgagctgacgttggcctttaggcttctctaattatttccttaggttagatttctagaaacacagggtcaaagggcacagatattcacatataggcaagttaccttcttcttgagatgtagcaatttaaactcataacagcagtacataacagtgcccctttctctgtgtctttctccaacacagacatcttgctttaattttgcatttatttgattctttctgagaagcagaaggaatatatgttggccgtttgcatttcttcttttctaaattacctgttttctttccttccttccttccttcctttctttctctttctttctttcgagacgaagtctcactcttgttgcccaggttggagtacagtggctcagtctcggctcactgcagcccccacctcccaggttgaggctattctcctgcctcagcctcccgagtagctgggattacaggtgcctgccaccacgcccagctaatttttgtatttttagtagagatggggtttctccgtgttggccagactggtcttgaactcct

SEQ ID NO: 64395 - DNA, 2444 bp, Homo sapiens
ggaggttgcagtgagctgagattgctccactgcactccagcctgggcaacagagtgagactccatctcaaaaaaaaaaaagaaaaaagaaagaaagactggggagttctttcttttttttttaaaggagggtttaaattaggctaatgcagcaataacagccacacttttgatgtttacacatttctttacagttcttgaagtctcgctctgttgcccaggctggagtgcagtggcacggtctcggctgactgcaagctccacctcccaggttcacaccactctcctgcctcagcctcccaagtagctgggactacaggcgcccgccaccacgcccggctaattttttttttgtatttttagtagagatggggtttcaccgtgttagccaggatggtctcaatctcctgacctcgtgatccgcccgcctcggcctcccaaagtgctgggattacaggcgtgagccaccgttccggccctttttacagttcttaaatgctttctgacctgtgttatctcattgactctttcaaataatgagaaaggaagtgaatcaaaataggagatagattggggaaaacttgaacgtgtgaccaagaggagtttggacttgatcataaaagtaatgatgctttatcagatgtgtcacatcacagagcagatatttacagtccaaagtccctccctaaatgattggcctcacccacaatgactgggtggagccaccgaaagaaaggcatggagcaacacttcttcctgcatcgcccctcaaaagagcagatcccagttctctgaagataaatggaaggcagccatgaacttccccctctttgaggtttatctttcagcaccttagcacctcagaacaacagagaattagtaggcttagcctactatcctcctatcctttctctcgtgtgctaaagttccatacaatattactggtgtattccctctccaaaatgatgccttaatacatttatgtgaacctctcagccaggagtatgtatgtagctattgtcattccaagacattttctctgttcccattgtccatttctccttcagctgcgtgagctcaggggcttatgttttacacactatattcagctccatttccaggaaacaaaactgaactttgtcctgatcccgctttatccctttctcctgatcctgtccctcacctgctgagctgtctgtcctgctcactgcaggagcactatgagaaccacgtggagtggccgacaggatagggctttgaaaagtacaaagctgccctctgtagaaaacaccctaaagcagaggttcccaacccccaggctgcagaccagtacaggtccgtggcctgttaggaaccaggcagcacagcaggaggtgagtgacgggcaagcaagcattactgcctgagctctgcctcctgtcagatcagcagtggaattagattctcataggactgcaaaccttattttgaactccgcgtgcgagggatctaggttgcacgcccctatgaggatctaatgccccccacccctgtccatggaaaaactatcttccatgaaactggtccctggtgccagaaaggttggggaccactgccataaggggttggcagatgaaccagctgaagcaaaggaaacaattacattatttattgctgaggctcatgttgtttttgtgctgaaaaacctccagtgactctcctttgcccaaagtccgaaagggggccagttaatgacctttgtccatagggaggtgataacagcctgcctggtagggagcagagcccatgtcctctcagtagcattatgggtgttgctgtaggacctgacccaaagagagataggtatcagtttataagattatgaataatattttcaaaaaagggggccaagatgaggccttagtctcatatcaggtgacaccatagatcaaagcacagaaaagagacaggaaggatttcagcaggttggagaaggagataggcctgtgatgtggccaggtggagacacagataagttgaagtttattctggtaaagacctttgtacctgacatgcagcaagtcccagtcctgatggagggaggatgtagccagctccctagtgctaaagcattttggctttgcaggcaaaaacctgcattcaaaatctaactataacagccttgcaaacaagctacttaacttcatcggtaaaggctctgtcaaaggccaggtgcagtggctcacgcctgtaatcccagcactttgggaggctgaggtgggcagatcacctgaggtcaggagttcaagaccagcctggccaacttggtgacaccctgtctctactaaaaatacaaaaattagctgggtgtggtggcgggtgcctgtaatcccagctacttgggaggctgagcaggagaaccattcgaacccaggagatggaggttacagtgagctgagatcatgc

SEQ ID NO: 64396 - DNA, 849 bp, Homo sapiens
acacggtggacattgtccttcaaagctttttttgccctcagtatggcatgagaaaaagagaaccagtaattcaggctgtatctgcataaacagagttcacttagaagctagccaggaattctaaatgtgctaataaatggctaaaccaataagcaacaaagatattctgaacccaagttactatcatggctgaattccactctgctccactggctaggaacaagagtaaaacatcaaaccctggaaaacagtctctatgtggtcaaccacagcactagctacacaccactgatctgctcagaagtcacttcagatagatgctgcatttgaaaagtttcagggttctgttctctccttcccaagggaaggagacagctccattgaagttgaggtggtggagaaggcattcagtgaaaaccctgtgtttctctacaggtggtgactttcgatgcagggggagtaagtggccacagcaatcacattgctctgtatgcagctgtgaggtatgattctccgggtgatggatgtgggggagggtttgtttatttgattagggctcatggtttaaagtctaaagcactttcccacttgttatctgagcccatgaaactcactgctggcttatcttctagccctttttggccatgttgctcactgcatctcaccatgtcctctcgctgagaaatctctctcaagtcctagtacgaatgctcgtctcctaaacagctgaattcttttttatacactgaatactgcgaatggggtaattgactttattcatctcttttctgtggccacaggaagcttgagggccaaatttgcaagccctgtggcactggacaagacttt

SEQ ID NO: 64397 - DNA, 1798 bp, Homo sapiens
attcgtaaaattgacactgaaatataatatcagggcgttaaaatatctctctgtagcacaactgttccccgaggcaggaatccagatcgcatttggagaaaagaaggcagccctttaacagcccagttaaaagctctttcccaaatcgcggacactcgagatgctcctcgggccatctaaaagactgcggagcagccaggagggcgagcggcagggagcattagctggctgagcacataaaagcctccctacgtaggtatccccgccgccgcgcgaggccggagcatctcttcgcgcgcgcttctctcccggatcaataacctccgccccctgctccctccctggcagtgcctggaacaatgacgggattttgcttcccagtgagttcaaaactattcatgcttccttcaacgcttctacctttcccttccacccaccctcaaaaacacgtgtgcaaacacaaaaaaaaaggggattcgggtaagagaaagccgtgggatttatgttcttttcactaagaaaggcccccacaccctttgcgcgccagcaagagacaacgtccccgagcacgatgcttatggccgggaaagactctttgtgtcccaagacggctgcgcgcgccctcaagctccggacgaagccccctttccattcccaggccacacagccctagaagcaccgccccgccccgccgcccttagaattaaggaataaccccagtgctaacgggggagccgcgtcggctccgtaacgtggaaggctcagagctgaaaggcgcccaaggcctgcacgcgggctgcgagcccgactcctgccgagggggtccgcgtggcaacggctcccgcgccccccggcccgccgcactcacaaggtgtctagcaggagcttggcggcaccctcggaggtaagcttctgccgcttctggaacgtctcccagcgctcccgctgctcgcccaggtccaggttggacgccgaggacgtcggggtcgcgggagtcggcggcggcggcggcggtggcgggagcaacgccagctcaggcggcggcggctcccccgggccctcctcctgggcccgcggcgacgagcgcctcagccgcggcttctccgacggcggcttctccaccgcctggctcttgctcccggcctggctagcggagcgccgtgtgcgggtggcgctgggtgccaaggcagcggccgcggaggccgcgggggccgcggaggccccggaccgcttctgcccgcgcagcttggcggccgcagagctcctcgatcgccgcatggctcccgcagcctggcgcgcaggcctcgcagcgcggcgcgcccccgccggcctgcgcgcgcccccgccgcccgccagtcttcaggcccagggggcgctgcgcccggctgccccgctccgccagccgcgccccgcagcgcggcgcctgcccgcaggagggagacccggcccgcccggccgctgggacgcacctgcctgttcagtcccgcaggcagaggggctgcgcctgggcctacgctcgcgatacccagaatccactcgcacctgcgaaggcgcccctgccctgtgtgaatccagcgggctcttcgtaccttcccgacctggaggggcctgggttgggcctgaattcgcaggctcatccgagcgggcagcctggggtaacttcgtctccaaaaacgagctaatttgtgtaaacggcctgccacctgctacctcctgtgtaacagcggccgaaaccatagttcttcaccttcgtcttttctgtcacattatagaacagtgtcatgaggataccaatagt

SEQ ID NO: 64398 - DNA, 1747 bp, Homo sapiens
aaatcagagactaattccacactttaaatatcaccaaataatgtcaagaaaacaactgtgaacttttaattggaactatagttttctcacagatttttattaaaaggcatctagccaagtaaaatcacttagaatctcagaatcaatccccctttgtttcttttgaaggaactgccaaggcaaatagcatttgcctatggagatgaaatacagtactctactgtgtttttgctttgtgttttaaggctgtcacaaagtttcttttctccagttgaacaaaagagaagattgcattttagtcactgaacaaacatttattgagcacagtgccaagtattgtgccagattaccaaattcctaatcttaggttaccaaatgacctacttcgggaaaacattgaaccaggagcctgtataactaacttacagttctggcaactgctagaacttcccagtgaagtcattataccagtcatgagatctgccttctagctcaatctgcgatcaacatgtatgattcaggaggagctgctggttggtgaaacaaattcagaatcactgttaggctaacaaaaacgaaaatccatactttatataataaaataaacgttttataaactacctcccaagtcgttcaaaatcacttccaaaattatcttaaactgtttatttctatctcctgcttattcacatcagtagacagtagatcccggttttagttaatttaactgaaagctgtctaggtgttaactcatataccagctcatttgtcgacatagcttctcaacgttatgctcaggtatgttgaaatttagtaattagcgacctttctaagagatgtttacttaattgtattaatacacacatttctagactacttcttacattatgaaggttggtatcacgtgaaaaacagccaatttcatgtttacttccaccccacccccgtgactgtgccaggcaccaggatccaaacacatctgccttactcaccttccttgggttatctccttgcaggacgagtggccacacccagggtgtagggaaacccgttgcttggtcctagctggttaacctcacccttgcacaacaagcacgtcaatgggagcaggatcagctactttcttgtaggtgaattcccgtttttgaagtggggtttcggctccctaatctgcacttttttttttcctaccagtttggagaaacagctgggaagaactggatttgcaggtattgctggagccagagcgaagcccggccactgtcaccatgggctccagcctcgcctctctgggcctggtggtgagcggcttcagcaacaggtttccggtccccgcagagggtcccactctgaactcccgatttacagactgttctcgggccgtgatgaggattaagacaatgcaactaagagcactctgactacagaagcatgatttaaagctccacaaccctgcaataaccacgaagaaaaataaaaagcggctagtccgccaggcacggtggttcatgcctgtaatcctagcactttgggagcccgaggcaggcggatctcctgagcccaagagttcagtaacagcctgggtaacatagcaagactctgatctaacaacaaaaaaaaattagaccaggaacagtggctcacatctgtaatcccagcactttgggaggccgaggcaggcagatcacctgaggtcaggagttcgagaccagcctgaccaacgtggtgaaaccccatctgtactaaa

SEQ ID NO: 64399 - DNA, 1548 bp, Homo sapiens
acatggtgaaacccccgtctctactaaaaatacaaaaaattagccggacgtggtggcgcatgcctgtaatcccagctacttgggaggctgaggcaggagaatcgcttgaacccgggaggcggaggttgcgatgagccgagatcgcgccattgcactccagcctgggaaacaagagcgaaactccgtctcaagaaaaaaaaggaaagaccccccctccttctcccgccggaaataccctctttcaggacggcgcgcctgtgcggcgcacgcgcgctcagttacttagcaacctcggcgctaagccaccccaggtggagcccagcaacaacagagccaccgcgtcccccaccaatcagcgccgacctcgccttcgcaggcctaaccaatcagtgccggcgctgcaaggaagtttccagagctttcgaggaaggtttcttcaactcaaattcatccgcctgataattttcttatattttcctaaagaaggaagagaagcgcatagaggagaagggaaataattttttaggagcctttcttacggctatgaggaatttggggctcagttgaaaagcctaaactgcctctcgggaggttgggcgcggcgaactactttcagcggcgcacggagacggcgtctacgtgaggggtgataagtgacgcaacactcgttgcataaatttgcgctccgccagcccggagcatttaggggcggttggctttgttgggtgagcttgtttgtgtccctgtgggtggacgtggttggtgattggcaggatcctggtatccgctaacaggtactggcccgcagccgtaacgaccttgggggggtgtgagaggggggaatgggtgaggtcaaggtggaggcttcttggggttgggtgggccgctgaggggagggcgtgggggaggggagggcgaggtgacgcggcgctgggcctttccgggacagtgggccttgttgacctgaggggggcgagggcggttggcgcgcgcgcgcgttgacggaaactaacggacgcctaaccgatcggcgattctgtcgagtttacttcgcggggaaggcggaaaagaggtagtttgtgtggtttctggaagcctttactttggaatcccagtgtgagaaaggtgccccttcttgtgtttcaatgggatttttatttcgcgagtcttgtgggtttggttttgttttcagtttgcctaacaccgtgcttaggtttgaggcagattggagttcggtcgggggagtttgaatatccggaacagttagtggggaaagctgtggacgcttggtaagagagcgctctggattttccgctgttgacgttgaaaccttgaatgacgaatttcgtattaagtgacttagccttgtaaaattgaggggaggcttgcggaatattaacgtatttaaggcattttgaaggaatagttgctaattttgaagaatattaggtgtaaaagcaagaaatacaatgatcctgaggtgacacgcttatgttttacttttaaactaggtcaaaatgcagatcttcgtgaaaacccttaccggca

SEQ ID NO: 64400 - DNA, 605 bp, Homo sapiens
aggctgcagtgagccgtgatggggccgctgcactccagcctgggcaacggagcaagaccctgcctcgaaagaaagcgtcccaaggcgcctggctcaccgctccagagcgcgctcccgggtcggcctccgccctccaagccggagggaaatgctgtggtcccgccgtccgcctgcatcctccagttcctttggagggcaggggagtggagcccacaggctctgacacccttacagtccagctctgtgacttggggaagggagtggcgcatgaggagggcgaagctggagtccaaaggaaggtccttccgttcccgcccccgacccgggatccgccgaagcgactgcggaggcgggtcccaggcctgtcccaggagggggtgtccgggagggggaccgatgcctacgtcagacaggagggcaggggactcgcgggattcgtggggaagcgagaggggaaagagcagggaacgtgcgctggggacgcggccgaggcgcagtgggagggggcccaggattctgggtagttagttgggcggggggcggggatgcgcctgaagctcggtagcgagaggtactggggtcgcggtgggagtcttagcagaacc

SEQ ID NO: 64401 - DNA, 2830 bp, Homo sapiens
tcacctgagttcaggagttcgaaaccagcctgaccaacatggagaaaccccgtctctactaaaaatacaaaattagccgggcgtggtggcgcatgcctgtaatcccagctactcgggaggctgaggcagaagaatcgcttgaacccgggaggcagaggttgcggtgagcggagatcgcgccattgcagtccagcctgggcaacaggagcgaaattccgtctcaaaaaaacacaaaaacgagcaacaacaacaacaacaacaaaaaccctacacttatttctgaggccagctcaaaaggtcttatgattgtcttcccagttttttgcagtcaaaatgaatttctttcccttggtataacgtgtgtgtgcaaaacgtggttgcatggattctttttcaaggagagagctgagcatgttcataggctgaaaggaaagccacagtagagagagttttccatggaaggtgaggcaggggcataggtggaggaggccccaaggaatgaggagaggaaaggaggtgggcagagctttaccccagaggcgagcagaggatggacgtggatctagataagacgtcagctcgttccctaaaggtcgtgctaaaggagtaatgagggtgaccagtgcgcaggggtttgagaagccccgtggatgtggtgaaatagctgtggggagagtatttggcaacgctcaatagattcaggaggagctactaggatgaatggctgccttgtgccacagctctacaggctttcacgtgtgtcatctcacgtgatcttctggggcgctggtgtctccgtttactagaggaccaatcggaagcttaaagagaatgagtaattggcccaagaccacccagctaaggagtggcggaggtggggcccaaacgcgcgatccagccctcgcgcaggcgccctggaactccccgcgcgtgttgtgacccagaattcccggggctgtggaagagaccatagactcaacaggagggggagtcctgggtagcgcgccggtctaaatcgttacttggcggaaagttcccatgagtctttgccagcgtccccctccttttgtgaggattgggatattccgactccttaagggcctggcgcacataaggtgtgaccttttcattcccgttgttatggaggtaggctctctaggaatctgggagtagtagctggggggcaagagcaaataaagagctcgagcttctgtggtctctggggagatgttcccgggaagcctgtctagagggcggagggcagctgttgagatggcgtggctccccggctcctgcgcccgcgtggctttcgcggcgggcgctgcggcccggtattggacagcctggcagggcagcgcggggccgaatccggctgccgtggctgaggctcatggatcactcttttgtggtagggccacatctgccagagcctggagtctgcgaaggccgggacccggttccccggcccacagtgggggtgtgcaaacccgagagaactgggtaagttggggtcggcttgcagtttggggtaccccgagggcggtgtacgtcggtaagattgtaacagtattactggaagacttattcgactgtcctgatgatacttgtaataggaagtgccgtcagaagcgataactgacgacgtctaatgtctatctgaccgcagtcgctgaaacctctacaacttagttgaccgtaactgccagagccctgccctgaattcctgtccttactccctctttaagattgcgtacccactgcagagtgctgaagacggggtagccacgaggtgagaggctctctggtgtagggtttaacatggaacgtagttttgtcacttgaatgcacggaaattggcgttttgacagttttctacgtttaggtgttttatacactttagggtaacgttatcatgtcattgcatagggtggaacttaaatagaaactggagatggctgcttcagccacagtcctaacctagaactgcatttaaagcaaactgataatgcagaaacaaactccttcgttaagaaatgtctccagtagcagggttagcttaagtttcaggtagggtctagatctgcggttggaacagtactggagggttgtgaggtgcttgactgctctgatgaaatcactaataggaagtgccgtcagaagcgataactgacgaagactactcctgtctgattgcagtcaagtcttcaccacttgctggttcccaggagtaaacttgtttgaacggtgacctaattgctatattcacctaggttgcaaattcgtgaagaatcagcatcatgtttggcagctgagtattggagccaggagcctgccatgaggtaagccttgctctatggggaggctagtggctgaccacgcctagctgtcaggtcgaatattggcaattggatttggttaacctaataccttgtaacagtgtagcctatcccagagatactgattttagtttccggtggcagtggagccagggtggattacctagaaagaggggctactctatttacctcttggctgtttagtctcgggcaaattacctgtctgctgagatgtagttttcctcagatgtgaaaaggaaaagtaatcttagctttgtgaagtttaaattgatatgactgaaatggagattacaactcccctgaggctgggcacagtggcctgtaatcccagcactttgggaggctaaggtgggtggatcacctgaggtcaggagttcaagaccagcctggctggccgacatggtgaaaccccatctctaccaaaaatacaaaaattagccgggtgtggtggcgtgtacttgtaatcccagcta

SEQ ID NO: 64402 - DNA, 2084 bp, Homo sapiens
gtcaaagacggaacaatttgagtatcaataggaataataactacaaggatttgaaacacacgtcacatgaatttgttatataacaacacttaagaagcaagcaaataaacaactaaataaacaaaacctcattggtcagtttgagtatcctagggaacaaattattaatttgaaagatgttaaataaaggaataaagcaagcatttattattgccagtgtgtgggtgcgcacccaaggcagcgcgcgacacattccgctgccgatctcccccttggggtgggaagatcttacaaactgcatgtctctcccacttaaattcgtagtcagccttaaataaacccggccgccttcaccacaacaccgccaccgagaccggtagggcctgcctcagcatccgccacgccttctcgtaccccggaagggtgcgtgcgcgctctcggagataggggtcttcagccgtgcgcgtgtggagcagggccacggcgcctgcgcagcggaggctgtggaccacatttcccaagaacactgcgttcctgggcccgcccagtgtcccagagtccctttcgaggcggaagctgggctcctccctgcgtctctttctgggccgtggagctgtccgctctgaaacctgaggaagtcgtagttcagggaggggtagctcttgcacctaggccgttaggaacgagttttaggttcgaatcccatcttatggaaggtggtattggtcccttgggtgtcccacccgtctcagccaaactgcgggccatttcccggggcgagcaaggggagttaccgcgccagtgggtggactcgccgcctctcggagtcgggaggaagtcgagctggggtgcagttacgagtctcagttaataatgaatagggtggccaatggtgggccaggcacagtggctcacgcctgtaatcccagcactttgggaggccgaggcgggcggatcacgaggttaggagataagagaccagcctggctaatatggtgaaacctcgtctttactaaaaataaaaaaattagctgggcatggtggcgggcgcctgtagtcccggctactcgggaggctgtggcaggagaatcgcttgaaccgaggaggcagaggttgcagtgagccgacatcgcgccactgcactccagcatggcgacaaagcgagactacgtctcaaacaaacaaacaaacaaacaaacaaaaaaaacaaaaagaaaaggaaaaaaaagggtggccaatatagtgaaaccccctctctactaaaaatacaaaaattagctgggcgtggtggcgcgcgcctgtagtcccagctactcgggaggctgaggcagaagaatcgcttgaagccgggaggcaaaggttgcagtgacccgagattgcgctactgcactccagcctgggcgacagagcgaggttccgtctcgaaaaaaaaaacaacgaaaaggggactcacttcggagaagctgccctctctgcaaacttatttgagtaagggactgaagactgaagttagggagaggaaagggatacacgtctgttagtgcgagttgcgtgtcttgttagtgcgaactggaacccaagtttcctttgggaagactttggcgaaagagtacaggaacaccagccactccagaaagagaccgctcctcttgaacccgcccacttaactcctcccgcaggctctacgttcgaatgcctccaccctgattttagaaggttataggcgcacaatcaaggaaatgtcgacagagggcgtccttgctctaagcagcattgtccacctgcttcctgagcggggttcagtgattattctctgaacctggacttctggcgttgtgcctctatactccatttccctgcttcaaagctctcctaattgactttattttctgacactcccccactttaccccccaggagtgttgcttcttttatttctttgcctggatggtcgtttggcttagtaaatagacctagaccccaccccatggtgtagaagcagttggtgaacttctataaagggccagacagtacacattttaggctctgcgatctccttatggttgaaagttctactgttgtagc

SEQ ID NO: 64403 - DNA, 467 bp, Homo sapiens
caaaaaaaaatgaatgctggcaaggatatggagaaagggcaacctttgtacagtgctggtggaaatgtaaattagtatagctgctatggaacagagtatgaaggttcctcaaaaaactaaaaatagaactaccatatgatccagcaatcccactgctgggtatatatccaaaagaaaggaaatcaatatattgaagagatacccgcactcccatgtttactgcagccttgtgaaatactgcagtgttgtgaaatactgcagtgttgtgaaatactggttatttcacaatagacaaaattgggaatcaacctatgtgttcgtcagtggctgaatggataaacaagatgtgacatatgaatatacaacagaatagtatttatccatacaaaagaaatgcaatcctgacatttgcagcaaccctgaatggaactatcattaattggaactagagattaattaaaataagc

SEQ ID NO: 64404 - DNA, 1060 bp, Homo sapiens
acgtatccagagacttaaggagaaactttacttgttttgcttccttggccagtgcagttatttagaaataatgaagggtccatgtttttgctgagaatctcagcgccatgtaccagtccagcatttcccaaccaatgcaataataccattgtcatgtcagggagtgacaagtgattaaaaggtgattacagtatttgaaatgtgacatttcaggaaaagctgcctcggttactgagtagcgcaggtcccccgatgtggaacctagttccatccctgccagttcagaagccagagcggatatgctcctgccaacctcgccttctttccctaactgctctcctctacccacttcgggtatgccctcctcagggcctgcaaggcgcggggctgggaagaccgggaaagtcgggtcaggggcccgcccgccctactcgactccctgcgccctgcgcccggctctttttaaccccagcgccgccaggcccgcagggagggggttcccgggtttggacccggactaggaggccgcatagggcacgcggccctacctgtgagggaggccagctggagactgaacccacactcgggaaggaggcccagccccaatcgcctctcaggagtgggcgggtccgctcagggacaggggctctagagggaacggccacgccccggacgccgccgggagccaagcgccaagggaggggcggcgggcaaccgaggccaggcgcccgggacaacgagtacctggcggccgaactgaggacaactgagggaactcgcagagcagggcgggaacgcttccagcaatggcggcggctcggcggtgccggcctccaggcagggcattgcgcctgcgcagccggagcgtcggaactacagtgcccagaatcctcagcgcctgagccccccgccccttttgtctgcgttagtgaaggaattggctcttcgagggtgagaaaaaattccaattggatacacttctgttgagaagccttgactatgtgtcaaaagcaatagcactagagatacaaataatgacacaacccttgtcttggaacat

SEQ ID NO: 64405 - DNA, 1763 bp, Homo sapiens
gggcgcctgtagtcccagctactcgggaggctgaggcaggagaatggtgtgaacccgggaggcggagcttgcagtgagccgagatcccgccactgcactccagcctgggcgacagagcgagactccgtctcaaaaaaaaaaaaaaaaaaaaaaaaaaaaaagaatagtacaataaacaccttttgcctagattcaccaattaacattatgctacttaacaagcattatatcatttaatgttcacattaattaattaatgccaattttgtacatgaggtcactgaggcaccaggcaggttaagggacttgcccgaggccacagagctcctgcctggtggagctgggctttcccccttaggctgccaaaggactttgatctgccttcccacagctcccttttgaggaaaagcattttcttacactaagttgaaatccacctccctgggatatttaccagatgatccgtggaaaagtacacagctctggaagcatttgctacttctcctcctaaaacctcctccattccctgagcgacagctgctgtggctgccactaccacatgctccaatgtcacctcctccgtgaaggctgggttagctcacccccctgtttaaagactcaccatgactcccagctgccagtgggatgacatgtgcacgcctgggcttggaatacaaggcctgggtgatagagccctcttccaatccctcttgctccttcttcccctatctccacttccagccacactcaaccctctcactgtccacttaaacttcccctcctccttgaagccacccgaatttttctaaagagcgcatttctcccctctctgggctcctgcaaccttctgcctgagcctttgacagccttttccaggttgtcttttggccaggaggctggacaatggaggacgggagtgacagctcggccccttcctagcagagtgatcctacacaaattactccaggtgtctgacccttcatttcctcaagcacatcatgggggaaagaatgcctagctcagcacctggcagagagtcagccttcgctcatctcccctaatggagctgacagctcttcaagtccgctgacatcttctcttagtcatcccttgaaatactacccgctgttacttctctgctcctcagtctcctcctatgtaaaatggggatgagaaaggagaggttgcgaacctttaatgagcgagcccttggagtatccagcccttcccgacgctaactgactcctacgagggggcctggtacacagtaggtgctaaactaatcctctccgagctgggcttggggaagatgcctccgttgggtgtacagcgtgggcgcgggaaggcgagcctgggagcgagggggttgcagagaggcagcctgaggtcggctccgccttcccccgcatcccccgcccgggccctgcagctgtcagcccggccggcctcggcgccagtccaccaaacctgaacgtcccatgccggcgcccccaccttcccggcctgcacaacttaccttgcgctcggcggccctcggtcccgcccccgactgccattggcccagaggttcctttgttagcgagagcgcgccaaccccattggccggtggggctgccgatcgcgtcgggcgcggccccgccccgtacgccccggcacctccccgcgcccggccgcccgcccgcccgcccgcccgcccgcccccgtagtgcgtgaggcgctccggtcccatttgcagcggccgcggggcgccgagggcagctgcg

SEQ ID NO: 64406 - DNA, 1581 bp, Homo sapiens
aggcgggccgcagcgggaagcagcgggcccgaggccgcgtccatgggcccgcggcggccgggcggcggcggtgcgggcgggagctgggcgtcgcgcgcgctgtgaggcccgggcggctcaggagcctcggcgcgtgcagcgaaccgcccgccgggaaggaggccgggccgggcctgcggcggggccggcgagggatgcggcgcggccgcgctgagcccctagcccgccgggagcgccaggccggccaggcctgcgccgccgccgccgccgccgtcgccgccgcgccgaccatgtcggcagccaaggagaacccgtgcaggaaattccaggccaacatcttcaacaagagcaagtgtcagaactgcttcaagccccgcgagtcgcatctgctcaacgacgaggacctgacgcaggtgagcgactggggccggcccggacacctccgttctgggagccgcgggtcggcggccggggcgccgccaagggctgcagggaaaataaaaatggagcagggaaatgcgcgagtcctggggcatggggacggggacgggaagtgcattgacagagctgggacaaagggaaaatcctcgagtatgccgaaaaataacatcctttcccgttcccattgcccggctgtgtgattcatgctttttgggtgactcaaaagtgcctggtttcgcttagtaggaacaaagcgcttagggattgcatgccgcttgacgggacccccctgagattctggcttgggactggacttggatttgtccagccagagtggcccaggggtcggattgttggggaggactgtgggcttccgtctagtgggacgcagcctgccccgattctgaatcatcgtcactgtcaagcactggagagaggtgaaggggtgtccaaatctggcgaggagggtcttgttcttgaacttagtttggcaggccgtagtttagcggggagctgggaccagttccctggtcactggccgaggggtgaggagacctgtgggtcctcgggaaagttgatttctgtctcccagccttaactgtcaaacagggctttgaactagttatgactcccaaacgtgcattagagtcatagccattaaacacagagttctggggcccccgccctggagtgactggggagatggggaatttgtattgatgaaaggctccaagaggcttggctgcagcccccatggcccttgggaacccctgcagtgattgctgtttgaactcctagtgttccaggattccgagccttgtgtgcacctccttgggatgtgcctcggtaccctccccacggccatcatctccatcctcttcagagctttctctcagcctcctgaatgaagccaggggaagtcccttcacattccagtccagtgtgacctagttgtagccactcctgtcgcagaagaaccccttagactgaaaacgagtgaacgggcctggttgtttttaatgccacttcagtgcacccagggtttgacttgtttacatggccgactggagtagggtggtggggcaggggttacggcctggggcacggggcctttctctgaggtcaggtttccaactgcca

SEQ ID NO: 64407 - DNA, 1245 bp, Homo sapiens
agtgcagctctgggcaaggcagccaaagcctggagcttggcctcccatcctggggcggggtggcgggggagggccttgggtcatctctggggccatttggggcaggttcgaaaactctgccctagattttgtgctttttccagttttagcaattgaggcagtcttacagctgctctggaatggagcccccatgccctacccagagctctcaaggcattgtcacttccgttgggggcaagagcacctagggggttgattcactgacattttgtctctggaagctggaactgaaatcttccaaaccactcactggttttctcagtcagggtcatcctagttcacatgaaaccacagcctggtttttgcctggagcctgtaacccttctggctccttccccttgggcgcagcttggcggttgcatgctgtgccagaggtggccctggtgtcagagctgctttgcagcgagactctgagtggatgggcctgccggatcctttgaacctctacctactatattgtgtcatagcccgtgatttcacacagacctcagcaggcaagggtggccagcagggctggtggcagcaaggcctccctcggaggaggggaccctgagttttcagagtggttgagcggcctgcccaaggtcactgagctgctcagcaatggggccgtgatacagatttcagctccatgaggctcccgtgccagagtccaccctggctccagactccaccctggctccagactcatcctccctgtccttgggaaggccactttgctttgtaaactccttagtgtttttgtttggccccggggcagatgggtagtagggagattggtatattgcagtgctgcagaataaatcacagctgtttcctggacttctagttcctagccctgggaagagggacctgctggggctgtctgcacctgccctccctgcctttcccccacattatgcaggtgagggattgtcttcaattagcagatggagccgccgagacctggagaggttcagcagaggttcagcgacctgcctaggtcacaggaagtccagcacgattttttccaaagtcctgtttggccaccttgtctctaataagtgttaacctttgctatcaggaacagggccttgccccaacttggactccttagttcttgagtgtgtggtggggcgtgtgtgtgaacggtgcaggctgttgtgcagggcatcgcccagatcttcacctctcctcagcctcggg

SEQ ID NO: 64408 - DNA, 2990 bp, Homo sapiens
tttcacctcagtgaattctggagcctggctgtttttgtgcctcctctttgccagtggatcatcagaacaaccccttttgtagcagtttcccaggttttttcagaagtggtgaatccatgccttggcattcctggattattccatgtcatgtcagatcattcatcaaataaatattgacacatgtcatgtgatgcattctatgctgagcaccatcaggaatacaaaaaggtaaccacacgttgtttctgctcctgaggagcttccaagtgttaaaaaaaaaaaaaaaaaaagacttcttattaagcctcaatcactcatgtgatttgggcctgtctcccagcccagtcctggctgatgaatcaacattcttgtgcctcgggtccctcttttcctgccacctgccccagaagtggaatctgtggagtgaccttccttagatatggacttgtcagacgtgggaactccagaagccaagctctggggccaggacccagatcctcctaaccacccaccttgtgctccgttgcagaaatggcagcgacggttcttcatcctttacgagcacggcctcttgcgctacgccctggatgagatggtaagtgttatccttgcccactccctgtccccagccttcaccaagtccctccattacagtgcccttgcgttgtcatgtgagagcacagcagccatgtgctcctgcttgtgtctgtttgggagtgtggaatgttttgaagaacttgtggcacctgctggagacagctttaaaaacccagacctttggtttgaaacatcatcttctgtggtcttgagtgagaggaagaagtgagggaggaagtcatttctgttgaaggctaatagtgtggacttcactggagcactcctggttaggggaaagcaagggcaaagtcctggatcacgtgtgcaggctgtggacctgtgggcgtggggcaggggctggccctggggctggcacatgtgctcacgcacctagtcctggggttgcctgtcaattctgcgactgtaattggttttgcttgtctcatttgagcttggcttagttttccgagctgacttcagaggcctcctggtcacaaggtcatcgttcttctggtcactaaaccaggcagacaggcttcttcctcctccccacctccctggttttccagttgcttcctgggctggatgagtgtttgctgctgttgccccagaggccaaacctgaaaatcaactaggtggaatttctggcttttctttttccacccattttatctcctgactttttctctaaaggagattagtctctcctaattaatctaaagtaggactgcattccaaactttgtaaagggttgaagatgcgagatttgatcgccttttccagttccacttggtgggtgaatgtttgtgtgcccatatgtgcagcattttaaaattgggactgtcctggaaagcctagtctcactatgtaaaataggcagcccctgcctatcctacccagagtttgtttctttgctgcaggggcgagacagactctggaagtatgagtggagataactgtccctagaggtaccttccagactgcggcagggggtggcgggggtgcctgggatttttgggtggtcattacagctcacatgtgcaaaggtcagaagtgggcgtgtttgtactcgagtcctaacctttgtgatgtgatatgttttctacttttgtttctggggtgaattaagaggatggtaccataatcctgtatcaactgtcacctcactggttcctacttaaaaagaattgtcttccttttcattctttccggtgagcatatttgtacatcatgattagagcatagggggtttttgctatgggaacgtctgtgctccagggtagtgtactggaggtgagcaccgattgtggacttggctggaagtaggagcagggagacaaagcatttggacactccgttcctttgaggcaagaaagcagacctggaggattagacttcacacttcgtgttctcctggcttagcccttacacagggagtagccctggggtcagagctgggctcctgcagctgtgaggtttatcttgcctccctgtggctgactgactggctgagtcctgcaattgacttaacagtatcagaggagcctcaagaggtcactggattacattcaggctgggctgggtcatgaaccatcccaaaaaaacaaagttccctgcactgtttccttggggactgataatttcagtcaggaaatctttctttaggtctaactaaagtccagcaaaatccattattccctctggctcagttgcacaagcacaaagagggtagcttctggggacgccttggtgctggcacaagtgcagagcacatgctgcctcccaggcacggcttctggataattgaggccgcttagccaggagcaccgacacttcacagtgcactgtggtctcccagcaacctggatatgagttgcgtattatttcatggagtgctcaggcagaggtgggactgtgccagggatgtggggaaagaaagaagtcccagggaaaacttggactgagagagggcatgggggcaggcccagagctgggagttttgggccacgggctgctttctggcagatgacctgggagctggagaaactgacccagtgagcccatcagtaaatactgctttgcccagccgaggctgtggaggggtttccctgttgtatcaggaaggtcacaggggaaggttgcaaggaggcacttagggtagaagccaggtgggaggaggcagaggctggagagatttctctagcacccagtgctctgcatcagggtttgctcctcagagccactccccagagtgagcagacagcctgtagcccaggagctccagcttaacggtcaaccgccctgagctgagagtcccaccccaaacaggctggcaggatcctgagacctggagcaggaaaactccatttcagataggcttatgtgtgggtaaa

SEQ ID NO: 64409 - DNA, 1761 bp, Homo sapiens
gcacgtagaggtcggagcattctctgtacctccgtgggagcttcaagatggatgttctctggaaactggaggctgagctttaagccccctcccttccttttgtcatagttgggaggttgggggagaagagctaatgacaggtccgggaagggcttgggacccagtcttataagtctcttggacccggaactgttaggcaggggcaggttctgcctttgggagctttcttgttgtttgcacctctgcccagaggcccaagtgacatttcccacactgaaagaatcagggaatggaagccagcaaaggttaatcatgggactgtgtggaccaaaaacagccaactcctgagggtgacagttgggggttcccactgtgacctgatccagaccttccattttgtagtgaggaagcttagctagggggagggggagggagtgactgaaccacagatgtggacaagcagccgggtccctggatctcctgtcccgacttagagcctgggagttgcccttcagggaaggaaagagggagagggaagtgtgtggggcagtttgaatgttctgtgcctccagtattagatgttctgtacctccagtgttggagtcatacgtggatggctgagccctgtagagggaagaagttggagcagaacgtgccagagtgagcaggcaaagaggatcagaggaagggacctctgcaggtactgagagggctctgcaggtcaccctgggtcattctggagagccaagagaagacacaggttggccctggccagacgcgagtcctccctgtgttcctaacccgaggacacctgtcagagcatgcggagcaccttgcccttaacttccacgaggatctccctctacaggacggtgagcgcctctaggcagcactggtgtctgcctgcgtagacagggcacatgttggttggctggcgaatcaggcagctgtcctccccagctctttcttgcttgagtttctgatgtaaagatttcaggtaggccactcccaaaagtcccccttctttgaatctcaggccgcactgagaggatttggtgacctcaggtgcccagtgagtgcctttctgtctcatcaggactgtcccgtgcgcttaccttcctgttacataagtggtgagtcaaggacacaaaatgggaattagctgccagcctgtgttcagggctataatgagatacccacattctctctctgccttccctgtgttgcctgagtggagtgactgctggccacccacaattgattatcaaggggctgaagaggggttccacctggttatccacttaggtgctctctgttcagacttttgccatgtgcacagctctttcagtgatggaaggtgatgggagcggcgagagctgtcgtgagggtaaaggggtttctgtggcccacaccccgcactggggaggcagccaggaagatgggctgtgattggcacccttgctggtctatcttcagagctgtgggtggacttctctgcagcagctgtgacggtaccctgcagcgtgaaggctcgtgataacgtactgggcgtctccctcccacacagagagaaatgactttagatattaagaaagtgaaaagcttggaatagttggttaggaaactaattaagtaagagcggggaaagaagtgtcaaaaaaagtcatttcatgggaggtgcaacagaaaatatttagggttgaaaaagcaaagccacatggctggtgctagtgtcttcacgtgtttgtgcagtgctcacac

SEQ ID NO: 64410 - DNA, 1923 bp, Homo sapiens
ttattattatcattatttagagagacagggtttcaccatgttgcccaggagggttttgaacccctgggctccagcgatccacttgccttggcttcccaaagtgctgggattataggcatgaatcactgtgcccagtcctgcccccacttctgacaccagttgtgagtccggaggtttccaaaaccaccttcagtttcaaaaattcactagaatgactcacaggattcaggaaagtactgtctttacaatgagttttattatagagaaagtatgtaagtcagaaccagccaagggagagccatgtggagtagaatctgggactgggggagtcacagatgccaaaagtttctgcatccttggggacacggtgtcctcttagccctgatgtggggcagtgcgcagagcattgcccggaagcccacctgagccccggtgttgagttttaggaggctctgtagctgctgtggttgatggagttgttgtcctcatagttgaactccacctaaagcccttcccgccatggttggctactttcacatggcccaaaccccaaccctctgatttaatgggtttcctctaatttcctgcttctggccaggccagcctctaccctgagttgtcttgtcagcatgaagtgttaggtggggtcccagggtaccaccatgagtaacaaagactctagtcattcaggaaattccaaggtttggaagttacctcccaggagctaggacagaggccaggcctctctttgggtaaagttagttcgtcactcgcaagggctttaagatgggtggagagtgtgatgagtagagagctgcccccatggggctgggccctggccctgggacttggttctcacacaaggctagactctggtgggctcacctgtagcagggtcataccttcaaattttggggcccagaaactcaattttattgctgtgttgagagttgatccagtatttggggctcactcagtttggcccaacttagaggagactgaagtatagacccaaaggccagtgtgttcatttactaagaaaatcctggccgccagcccactgggctgctggctgtggcttcctgcgtgcaggcatctgcgagaggagctgagtcacagttggaggctacactgacagcctggcaccagggccgggtgtgagttgtctgctcttagtggcctgcactgcccaagtttcaaggctcctctgtcctcatccgctgtgggaggggtaggcgggcatagtgcccggtgagcctcctctcctgccgtccacctcccatcttcatgagcagctttctccaggcagggcacacctgaagtctgagaactcaccccgctctcctagtgacaaatgagggcatcagccactctcacccactgatcaacccctcctcacttcaccctggtagggcttatcctgatgactttcggtgatccccaactactgagagttctaaggaatgaggagatgcttccagtgtggagaaggcttcctgggggaggcttcctggagaaggatccctcaaggctcagcaggagggatgagtgtgaaagcatgtcccagactggactccagacctggtggcacagagagcacagagccagtctggggctagagtgctgggtggagagtcaggttggcgctggtccagcctttgtggagagcactgaagggtgttagaagatgccagtcagttgtgcgttcatgatacatgtctggcgggacatgcaggtccattagaaaggaaccaggctggcacggtaaagctgggcaagaaaggaaggagcagcacctgggaggaagaggtgagggcagggccaggacctggcaagaaggccccgcccactgagaagccagcagaagagctgacttcacagaagcagggggatcccctggaattccggctgtgatccatttga

SEQ ID NO: 64411 - DNA, 2099 bp, Homo sapiens
tgttctgttgcctaggctagagtgcaataacgtgatctcggctcgctgcaacctccacctcgtgggttcaagcagttctcctgcctcagcctcccaagtagctgggattacccaccacacccggctaatttttgtatttttagtagagacgggatttcaccttgttggccaggctggtcttgaactcgtgacctcaggtgatccactcgccttggcctcccaaagtgctgaaattgcaggcatgagccaccacagccggcctaaaggcacattctgtatccaaacctttgccttcttcctgcggactccacacctctttacataagaaggaaagaactcctaaattgatttctttatagtcctcttttctgtgtctgtcatttgttcatgacttcatttattaaacaaacactgtctagtaaggccaagaggccgtgaccgggacaggttgccctctgtctctcaggatcctatgcagagagctggcttgttgtctagtgacaagtcctctttgtgcacagccagcaggaggcacccagagctgcagcaagctctcccaccctccaggggccacatcctgtggtggcctcagctactgcttccatggctctcccatcaggagcagacacccaagcttgacaagctaagtgctcttttccaagcacctttaggaagccaccagagcaaagtgagaaaggcctcagcttctttgcccaagctattggcagcagacagagcttatcacgggggtccaggatggggagtggtgggcagtgcatatgggtagctggcctgaggtcctctcctgcccctcttcccagccaggcctgggctcggtgctgtagattggcaatcctgtctggaagaagtcagctttgggatgtcccagggcagatgtcaggaatgcacctgtgcacatgcctgtgcctgcacacagctcaggagaggcgcctccacgcttgagtgcctgcttccctgcgtgcaggggctatgggcccaggggaatgaatgaggagacaagggtttggctctcacatgaaagttgacctggcagttggcctcctgactaagaattacttcataacctagcatatctgcatagtctggtagagtgctcaccctccaccagtttgttttcagcatttattcttcctctgtgtaggcttttattatttgaggaaaaatgtgagttttttagtgctgccaggcaaaatctcaaggaggcatgaaaacaaactgcagtctcagaagctgctgtcctcgtcctgctctcatcgccatcttgaagtcctggggtggggaagttgcagggtgcttcccgcctttggcactagaggagccttgtggggaggtttctcctagggagtgcggccggttctggtgtggctgtgactttggcggctgtcagggccaggctgggggcctccatgcatgccctgccctatgtgtcatcctgacactctccatggccaggagctcttagttcagtgacgtcacaagatctgccctgtgtcgttttcatccagatgttagcgtgctcttacagtggacacctgcagatcctgttgctgtgaagcactttgcctctcactcgattgctgcctggacaggtgacccttgctccaggtggtgacggcaaccatttcctcttttccttggttctctctctaaagactcctttccttttggccctaattgaaacacatgtgctccctggagctcctccttgggccctcactgtcctcaggtgggcttgcaactgccttctgagggcctgggtgagattaggggcccctcagtcagcctcggaccagctggcagtctgtggggcctatctctagagtctacaaacctttgcctcaaacactcccagcctccttgacaaattgccatcagcaatgtccctgtccctgccctactgcagacgaggcctccccaggaatctctgcttctagcagatggggactagacatggattcctcaggcagacctggcttcactccacttactgcagggcaggtagcagcaccatgagcacgacctgcgcagctcatgtcccgttgctggctgccgcttgcctgctcaaggtggcaggtaac

SEQ ID NO: 64412 - DNA, 1777 bp, Homo sapiens
gttcccctccttttgcagctgggaaaacaaccgaatgtcctggcgctgctttctagaacatgttcaggtctcccagagcccagtggcctgagattcactgggcagcaggtggccgcctctccccagagcccttcagtctggaagtccaagcacaaccctggcgtccagctcccctgccaccaggatccaggttaccagaggccgtccggggatctccggcagcgtaggagggcgggcccgggctgcagcagtcacgaaaactccgccggcggcgcccgaggagttgctaggggaatctgctccgcctctaacccggcacacgcaggcccacctgcttccagcatgccgggacagttcactgagagaaccgcccccaccgcggaggcaccgagggtccggctcgcttatgcccacgcagccggctagaccttctgtgggggctctgctttctccgcgttacaccaccccgaccccacaaggccacgaggaaagtaaatgaggcctcagcccgtccccagaccccctcccctaagtgtccacctttgcgcctaggaccccgcgtgggccaagccggccttctccgcttggaccccgccgggcctacctgccttgcgcagcagaccgatttgcgagccgttgagggccatgtagtcgcagtcggtgacgacccgcactcgcaccccacgctggtgcagcaactgcacggcgcggcccagctgcgggctggagaaggcgaacaggcagagatccaggctggcgcgggcggccagcagggcacgcagcaggcggcttagcgcgctctcgccgtggggcaggccgcacgggcagccctcggggagctcggccagctccgcgcccggagcccgcagcagggcctcggtacaggtcacctgagacgggaagaacagcgcctcgcgccgcggccgccgccgcctggaccgcagccagcgcagcacccaaggcagcgcctccagagtcagagccaggcccacagccgccgcggccgccacctgccaactcaaccgtcccatgccgccgctaatccgggacccacagccacgccgccgcagcggagtctgcgcgcccccagccctagaccgccaggccacgcccccgtcacgcgccgccagcggccatgtgccaggccacgcccagccccccatggccacgcgccaggccacgccctatcacgtcctgccaattgccacgcaccaggccacgcccccgtcacgcagcgccaacggccacgtgccaggccacgtgccaggccacgcccagcacccatggccacacgccaggccacgcccccgtcacgccccaccaacggccacgtgcaaggtcacgccctcagcccccgagggccacgcgctaggccgcgccatgcccccacaactgtcacgcaccaagctgaacccacgcctcccatcagcccgcccccaaccctcaacaggtgaccacgcctccctccacgcgccaggccacgccccctgccacagacaccctccaccccccaacgccaggctgtgccccccattttccttccagccaggcgctcggccacgccctccaggttccacctcccaccacgtgccaagccacgtccccaagcccgcgccaccaggcagcacctgcacacccgcgggccacgggccctagcacacccgtcacctgcccaggccagagaccgctctccgcgctagaagccacagcaaccccggctttcctcgcatggagcacagcagagctgctctggaaatgtggggtcacaccttcactg

SEQ ID NO: 64413 - DNA, 2820 bp, Homo sapiens
agaaagaaagaaagaaagcaaaagcacttgtcagacgagagctctgactctgactccatggatcatgtgcaccagaggcccaggcagcccctgaaagagagggaggtgccctacagagcacttagctttgcggtcaccggagcctgccctcaccagccaggtgacaccaagtgttactagacctctctgaataccacccaaaagctgagaaacagaggcctctcagaattcgcattacacatggaatcagaattctgggcagcgtgaggtcattcttcactcactgttcaattccaatctctaccaggtgtttgctgaagaaaacaaactggtttgagtgtgtctcacgagtctgtttccaacaagctttccagaacccacataggaagccgaaatgccctggctgacagtctcttcatcaacatatccaaagacagtattcaaattccctgatgtggtagagtgtctgttcatgtccccctcccacaatggctgagtcccagacctggacagtgacctcaccaccacccgtggtgcgccctggccctatttcaaccctacttcctatggtgttctcatagcaccgtggagaattaaagaggccactaagtaagggcactctaaataaacaaagcactataacggatcttaaccagcagtggacacacagcttctataactagtctcccactggggagcctcattaagttagcagctgggatcccaacaagcccagggtgaaaagttctgcaggggatgactgccagttcagatccactctcactgtggctctatttccaccgtttccctggatttccattcacagagctccctgacataggacactagaagggcaaacgcagtgtcacctgccactattactcaattacttgatgaccacggtgataatctggcactaaactggctgtggccaaaggctagagagccagaacctacttccagcaagctcctccttgccctgtgtccccacttgaagagactgctagtgaccacaccttggacttcaatccacaagccaatccattctttccaggagacaaggacgcgactgacagtactctcaactggagagaagcgcggtcttccaccctccctggaggacacggtgctaccctattagcgcatcagaggaccctcctgaacgccaaactgggagaagaggatgacacacaccctctcctccaaacagagcgaagacaaaacctgggagaagggaaggcaaacagtcccgtttcatggcaacatcaaatgagatcacagtcctcatccccatagacttggttaatgggcgtgcccccaacctatcttcaaatctcagggtctcggcgacgccctggactctggccctaaaccctcccccattactcgtccacctgggaccaacgaaaactcggacatgcccctccgccaacccctcagacccccgcctacctgctccccaaatcgaggcccgcgggacacctggactcggcagccggggtcccgctctgggtcccagccccgcccctgactgcgctgggtaggtggtcgctgcgggacccggaccggcggaatcacacccagagcccccaagcccacggcagggatgtcacccggggtggcgaggctctcaagcccgggttcaggctctcaggggagctggcagaaccaggagcgaccacactcactcgcggtcccgcagccccgccgacacccaggcgcgtgactccctgagccgtaccaccacccaacactgcggtgggggtgcgggagccgtccgagcgcgtcctgcaccgcgaggagagccgggcctccctagctctcgcaagcccaggaacacagtccgagtcctacaactccgaggtctgactgggaagcaggggccgctgcccgacaattacccttttccaccgcccctattccggtgcccccctctgggaagttccgaatggttcagaccgcaccagctggggatgctgggggaaaccatttcattaagcgcgggagtatgctgaaacttaaaaatcattttaaaaagagatttgagggtaaatatagccaacctaaggcttcctgtccacataaaagagaaaaataaagaaaaaacgttataagaggttggcaggctttttttttttgcttcaccaatggtttttattaaattgctgatggaacccgtcctctccctacattgagagtatggaaggtgcgggagacggccgtcacgtgacgcggagaaggcgcggcgcccgtgggaggttggttgcagaactcggaaccgctgtgcgcgcgcatgtgtgggattcggtcttcctccctcagtgggtcttttttaaaaatgtgaaaatcagtttttgaataatattctttttttgagacagagtttcgctttcgctcttgttgcccaggctggagtccagtggcgcgacctcgccttactgcaacctccgcttcccgggttcaagcgattctcctgcctcagcctcccgagtagctggggactacaggcgtccgccaccacgcctggctaattttttgtatttttgcagagacgggttttcacccttttggccaggctggtcttgaactcctaacctcaggtgatccaccagcctcggcctcccaaagtgctgggattacaggcgtgagccaccgcgcccggcctgaataatattttttaaaactagagcgcccattactaaatttagctacttagaagttaattgtaaagccattagtttgtgatgtagtgtgggtccttccagtgaagaccggagagagatgggaatcagagcctgacccgcctgtgcgcgctgcccc

SEQ ID NO: 64414 - DNA, 1149 bp, Homo sapiens
aaaaaacaaagaagaagaaatggagtcctacgagcgagagcttccgcagcattctgtaggaccaaaataggcgcacaggttcccgagcgtgcgccgcctggcagcggaggagctggcagaggcgagccatagagccaagacacccagaacggactcgcctcccgcccgctcccggcggcctagtcagcaagctgcggatcggcggcaaagatgacatggcggtgcgccaatcaccgaaggcaagagagacagaaggaaccaatagtcgcccgagatggctcctggcggaagtcacgcccccaaactgtcaagcaaagcgcccggtggaaggggcccaggccggggggagggggctcccggcggcccgagggaggggaggccggccggcgaggacagcggagcgcgagggggctgcctacactcggccgcgctcgatcctgccctgatctaaacgccgcaaccccaagcccggccccggagaagagtctcaggactaaaagggctgttccagccgtccgtgctggcgcctggggatccaggccagttcccggtacccgcccatgcccagcccggcggcctagggcgttaccttgagctgagagctgtcggacactgttcacgaactgctccagggcagacgccatgttttcccccgggcggcccgagcggcgaaggcagcacgcgcgggaaaaggctgccgctctgggaggaggggccgcggcgatccacctgaggtcctcgcgagcggcgacgtcacttccgctggttcaagcaccgcgagactatacctagctgcccacccgttactgtttccatggaaacagcctgaattcgccgtagccggaaattagtgttccatagtcccctgcatctttattcactgcacttctgaaatccctccgcaggttaaatggggatagtgggcaaaagaaggaaggaaactcataattaagcaagtattttctggttctggattttgctagagaggccctgcggttttccacctggacagatacttcaatgaagcacaacttcgttgccacgtctcccgtgaggttttccccgtgatattagactctggagccaagcagcctgggttcaactgccttttctaccacttagtagctgtgtgacgttgagcgggtcact

SEQ ID NO: 64415 - DNA, 922 bp, Homo sapiens
ttccaggatggcaggaactttgtctatttggttcacactcgacacagttagtgctcaaaaatgtctaacgacacaggcctgcttctcggtttgcactgctcctccatggtagtctgtgcagtgggagaaggcagcccgggcccagggtccacggagaagacgcaaatcgacagcgcgggagcgcggaccttctggaggcgcgcggcgcttaccgctgtccgtcctcgaagccccgccccggggctccgcctccgccggcgcgtgttcctttagggaccgcgcgcgccgcggcctcgctctggggccggtacttgcgcgcccgcaccccgcgctccccgccccgctccccgtcccgcgctccacgcgcgccccagcgttgggggcttctcctccgcggcgggaatgtctggccggctccggcagcacggcgcggcccaggtccccgcgcccacgacgggccagcgcgctgggccatgatccggctgggcggctggtgtgcgcggcggctctgcagcgcggcggttcccgcggggcggcgcggggcggcgggcgggctgggcctggcgggaggccgcgccctacgggtgctggtggacatggacggcgtgctggctgacttcgagggcggattcctcaggaagttccgcgcgcgctttcccgaccagcccttcatcgcgctggaggaccggcgcggcttctgggtgtcggagcagtacggccgcctgcggccagggctgagcgtgagcgtccccgccccgccccgcgccgggcctccttctcgccccgagccccagacaccgcccctgcgccggtgaccttggacggtcagcgccccagcctcggggtggccctctgatagaatagggtctgggggggactaggggccacagcgcaccgggaagatgcggccccgcgctcagga

SEQ ID NO: 64416 - DNA, 709 bp, Homo sapiens
tgaccctctcatgaaaggggcctcttgtgttttatggctgggctggagctaaggcaaggtgggagtggggatgtttcaggtaaaggtgttgcaagacagtgggtatgagtcatccccaagtcctgagctcagcgtgactggtcgggtggcaagatggagaggagaggagagtggcactgctaggaagccccctgtcagggagacagaattccatccaggacttacgtgtcactagcattttgctacaaaccaaatggtccttggttggcgggaagcccagtctggaccctggtccactgtgtgggtttgggaaaccccctaacctctctgagtttccagttcttcgtctgtgacatcaggggctgggttgaacagtgtgtgggtaagctggaatccaagaattctacctctggaaggcagtgcagcagggcgaacagggttcatgggtctcaaggtcaaagggccagctgagggagagctggactgtgcatgcttggaccggctggctctgggctccagaagggactgccgtgtgagaatgtgagttccctgggaggaagttgttgcccaagccccgctggaaagccagactgccctgctctctgggggattctggtgggagagggaccaggccccttgagctcctgcttggccttagctgctgtgtgtgagcagagagcagctccaggagcaggcttgaggcctctgg

SEQ ID NO: 64417 - DNA, 4113 bp, Homo sapiens
gtttcccagctagaagatgggtcagacagagcccctcatggggctgttgcaaggataacatggagacaatgggtgcagggtgagtgcctgggatgtagggaagggttccataaaggatcaacctcttgcttccgccgcctcctttttttcaggatccatgagactctggacacaaaacggctttgggactcagttagcagcatccagggaatgggaagcattgtagggattctgtccaagtcactgagtcagaggtggtggaaaattaagccccaatagggcactgttttatcccgcatgtgcatgtggggaagcaaatcaggacccaggagatctggattctggaaagataagacaaggcgctggaggaggtgccagtctacttcagagtggccccaagaggcactgttgggctccctcagacagagccagttccatttaacccaccccctgacctagtttggtgtctctatgagagacactctgcagagtgcaaattgctctgaaccaacttcagctgggccaagtcaaatgggaatgagatgcacatggagggccttccccatgtgtgtccacacatacaggtgggagagcatgtacaacccatgcaccccacctccaggcccatcttctgggcaaggcatcccctccctgggctgcttcctcattgagtgaagtgcttggatggaaactgagttgcttgcatcctttccccccagagctgtctcttcaaacaatctcccatggaatctcagcataaagagaaagtgggagcacagatggggcgtgtggggccctggcctccttcacaggccaactgggaccccacagagtgcagctgagccccagcagaggtagatttcctgggccccttccgggcctggtgctgtctgatgggtacctacctgtcctggtgatgtcaccccagtgctgtcaccagaggttttgtgtccagccctggctcagagctcaacctatcctgcatgcgtctggtgacctttggcatccgcagggacacgctgtgctgaggctgggctggagggaggattacacggctcttacgctgttgccaaacacatcttggagaagaagagagaaagagcaaaataaacagagccatgttcacctccctggtgcccgatgaagaaagcctttcctgaaatagcttggccacagatccttgtggaaaatcccaaagttgagagagggatgcaccctcctgtctcctgtagagagtagagtgccccccatcttccatcccccccagatctctgggcacttagggaaataacctgtttagaagtagttctatttttctagcaattgggagggtcttgtgtatagaagaaagtgcaagaaaattaagtcatctggacatattgtcgaaaaaatcatgaaggacatggggaatcatctccacccctttcttcttgcatgattttgggcgatgtcactttagccactgagacttgacctgtgtgatccggtccatggggtcctacaaatatctattaggctccaaccaccgcatctggctcatggaggaatcagaacatttcctttcttcctcccgtaggttgcatcacaagcaaggggctaagtgagcctcagtttctgcatctgtaaatgcgggtgtgtgcttcatgaccaaggcctccaacagctaatatgaccccagtgtcaccctgggtgctgtgggccactgtgtgcacaggaagaaacagactgggagggactaaacagggaggagaagagatgtaagacatatggggagatagggaaaggaatagagagggccagggagagacagacacacagtgaaatatggtggaagacagactgggaaagacaaggagagagacaggggcccaccagagattagagagagacacagagatagaaagagaccagagaaatggcagttacagagagagatgaggagagaccagggagacacaaagacagggacagacacaaagaccagaagaggcaggagagagaggaaagagacacacagagaaacagggagacacagaggcagatacaaagaaacgcaaagagatacaccgggagaaacacgcatttacacaaagcaactgttgtcctggtttcaggtttgtgggtccaggctccagtgaggtacgactacgcctgtaccctcagcttccaagaacttcccccttgtgcccctgagttgtctggagtggatttctgtttcttataatccaagcatccggagtcagatgaccccctcttccagcaccagcagactaccttggcccactttgagcctggcctcttctgctcacacatccctcctgcccaaacatcctgggcatttttttgtttcattgaagaaagatttttgttttgaaataatttcggatttaccaaagagttgcaaagatagtacagagagtttccatgtacctttcactcactttacttagtgtttacatcttacagaaccatggtactatcctcaaaactaataattaacattgttaaaatactattcaataaactatagactttattatgttgccaccagtttttcactaatacaagagtcagaaaactctttctgtaaaggaccagctttgcaagccatatggctacacaaaagcaaccactgaaaatacgtaaataccagcctggataacatagtgagaccttgtctctaccaaaaacaaaattttaaaaaatcagttgggtgtggtggcgtgcacctgtggtcctacttacttgtgacgctgaggcaggaggatcacttgagccagggaggtcaaggctacagtgagctgtgattgcaccagtgcactccagcctaggtgacagagtgaggctctgtcagaaagaaagaaagaaaggaaggaaaggaaagaaaaaaggaagaaaggaaagagaaaaaagagaaagatgaaagagaaagaaagaaagaaaaagaaagaaagaaagaaagacagaaagacaaatgagcatggctgaattccaataaaactttatttacaagagctggcagagggccagagttggcccatagactgtagtttgctgatccctgatcaatgttctttctcatttccaggtctcacattgcctttagtcgtcagttcctcggcctttctttgtctttcatgaccttgatatctgtgaacagtcctggtcaggtattgtgcaatatgttgctcaatttgggtctgatattttctcataattagattgaggttatgcattattggaaaaactaccccaggagtgatgatgtgtcattctcagtgcatcatatcaggaagtacatgatgtcagtgtggcttattactggtaacactgaccttgacctattggttacagtggtgtttgccagctttctccattataaagttattattttcccctttgtaattgataggtattgggggaaatgctttgcatctgtgcaactcttgtttctccttaaactttctcctacgagtccgagcatccatcggtgggtcttgcctgcagcagttgttcctgtggtgttcagatggtgatttgctgtttccctggttccttccactttcattaaagggaactcctctcgaaggaaaaatggtcccttcttccccatttacttatgcaatcagttatttatatcagtatggattaatggatatttattttatttgatgagctaaaacccaatagtataatgtacctggatgtgttgctggactgttccagttttgactcctgggagttacttccagctggctcccacatcttctccacagtcccctcttttttgagctcgtcctgactttctggccctacttgatgctccagccacatctggtaccttccctgccccagccctgggctccgatgcttctcaggaaggtgcaggcactcttgccctgactcctccttcttttttttttgagatgcagtcttgctctgttgccaggctggagtgcagtggcatgatctcggctcactgcaacctccacctcccggattcaagtgattctcctgcttcagcctcccgagtagctgggaccacaggcgtgcgccaccaacccagctaattttttgtattttttagtagagacggggtttcaccatgttggc

SEQ ID NO: 64418 - DNA, 4412 bp, Homo sapiens
ttatttttttgaggcagggtctcccctttatcacccaggctggagtgcagtagcatgatcatggcccactgcagcctcaaactcttagctcaggtgatccttccacttcagcctcccaagcagctgggatcacgggcatgcaccactatactcagctaatttttaagttatttgtagagatggagtctccttatgttgcacaggctggtcttgaactcctgaactcaagtgttccttgtgcctcagcctcccaaagtgctgggattacaggtttgagccactgcacctggccaatggtacactttaaatcagtgaattgtatggactgtgaattatatgtcaataaagctgttataaagaagaaaagagcatatgctcagatcactagatattttgagttttcaagagaagcagtgtttcaggattaggttagctacctataacagtaacttcaccattacagtggcttaagtaagaaagaagtgcatttttacttatggagaagtcaggaggtaggtagttcagggctggttttgtggcttcttagagtctacagggacttaggttcttctctctcctgtgccattctcagccagtggcttccactgtcaaggccaattcagagttcaaaatggccacttgtttttatccaggcagcaggaagaagaaaggaggaaagaatgaaagccaccccctaacccttgcgccaccttcttctttcatctcattggccaaaactgagtcacatggtctcactttgccacaagggaggctgggaaatgtagtcttttagttgggcacattgctgcgctgtctaaaaatcaggatttgtaattaaagaagcagggaaaacatcagcttggtaaacatcagcatctgccactgcttttaggtgaaattctggttggtaatttgaccccccctttttaaaaataccttgcagaacaaactgaacacacctgcagtctggactcactgcaggtaggcctgctggattggctgtggctctgtggggagatgggagtgggaaaccttgtccactatggctttgcagatgtcagtggtttgaaagcagctatagttaaaataaggacagtgctgagtcactgtgaggtggtggagagagagaacacacaagtgcttggcaaacacagagagcacaaacacacgaagtcacagtgtggctctgccaccgcatggttcagacaaaagctctgggctctgcacaaaggctccacagcatccaggctgctgggcagacaggaaggggcacagcaatctgagtcatggcgcccttcctgttgtgttctgcgtttgcattttctttgaatataaaccaaaagcattacaaactatagatgtaatttggacatgaaggaacaaggacaaaaagtcaataattactcactctggacatgaccttgtcactgcctcaccttcacttccggcaaggcaagagccattcacgctactaatgacgtctcccgggaagatcgcataataagccttggtcagaaagctgtattttttgataggcaggaagcccatggacctttactgcaatgtgttccgcaggctgctctaagttgctgagaaggcctcttggggagaggaagcgggccttgggtagggtggcgtggcgctgtcagatgcatcatgcctactccccaggtgcaggaaggctcaggtgtgcaagtccagagggtcgaggagtgctgggccagcccaagacaggccatagaggttccagcattgtcctgagctcgcagagtgactttcttttctcattttcaaaagatgaggctgtgcgaaacttctttttggagcatctcccttgctgtcaaaccaagtctctcatcttctaggagtcagtcttttcatggtggcagatcttggagttagacaagcctggctcaatatacagctccaattatttattgtatcccaaaatgcagtggcttgaaacaggcccatttgattagatatgaatttgggtaggtggacctccatcagaaggtctttcggttccacatggctgtggttggggctcattcaggggtacttacctagccactggtgtgggtctagagggtacctggtggcttgggtggtgcctggaagactgggctcctctggggctctccacatggccttctcagcccagtagctggacttctgacatggcagctcaaagctccaagagatgggaaacggacccagagatggattcttagtccactgctgtcttactcatcctcaatttaaaagaaacactggaggcagtgttaaagattcatacccccaaacagccccaattttccatccccaacctgtatccatttcctttgaatgtcatatacagtagccttgacataagtaattccatcttagaagaagtctgaatcttacatttcgcaaggctctttgccaacagggaacagatgttttgcctgatcaataaagattgcaaccggccagataaggacataaccaaacacaccctgccactgtcagtcctcaccagaggactctgtggccataaaaagagctggacttccaccgctcataacagctgtcttgataagcgcctggcatctgcctctaaagactctgcctacatcaaagactcttccttgcaaagctgtgatgctgctgagctgcccaagccagaccagaatattctttttgttcacatcgctctccctggactggcttattaaccctttttcctatcccttttctcatgccatgttactttgtttgatgcgtaattttcaatctataatgtttatatattgataagtatgttatgtatggcttgcaatactgactgatctgtgaagtggcttgagcctgtgtgaatgccaagtgctaaaaattgtctcctcctctttgggaactccatagagctggtggcttttatgatcgaagtagcattaaaaaaaaaaaaaaaaaaagcctgacattgtggaaagatacaaacaaacatgtgggagacttgcttatctctggccttgaaccactcatggtaaatgtgactttgcaattcctcccaccaaaaggtacagtctatttccccaccatctgactcaggccttatctatggcccatagaaagtgccagaaatgatggtgtgttaattccaagcctagtcctcaagaggctcttcagcttccctctctccctttccccaaccttcccataccctgatccctgtgattggcataaggatatatgcccaggttagcctgctggaggaccaggctcctagatgagccaggggccgctgaccttagccaatggcagacatgtgagtgagcctgttggaccacaactgcccagccaagcccaggccagatcggcagaatcgccctgtcaagctgccagatgccagtggcattgtaacattttcatttgaaaagagaagcagccaggtgtggtggctcatgtctctagcactttgggaggctgaggtgggcggatcacctgaggtcaggagtttgagaccagcctgccaaacgtggtgaaaccctgcctctactgaaaattaaaaaaaaaaaaacttagctgggtgtggtgacatgtgcctgtaatcccagccactggagaagctgaggcaggaaaatcacttgaacccaggaggcagaggttgcagtgagctgagattgggccactgtactccagtctgggcaacagagtgagacttagtctcaaaaaaaaagagaaccattaggaacaaattaaactccaaagagtgagaacagtgggatttgaagccttgtggcaactaaataagaaggtattttagggcaggcaacccccatggcctgttgggaaccaggctgcacagcaggaggtgagcagtgggcaggcaagtatttctgcctgagctccgcctcctgttgggtcagcagtggcactagattctcacaggagcgtgaaccctattgtgggttgcacactctgtatgagaatctaatgcttgatgatctgaggtgggagagtttcatcccaaaaccatccccctcccacccccagtctgtggaaaaattgtcttccatgaaatcagtttctggtgccaaaaaggttagggaccactgttttagaggcaagggacccctctctgcctctgatccccaaatgcactgactcctctcaggtctgcaaacctaacgctgcctgggtccaaatagaggttcccaactagaagtgattttcagatccttagtaactggtatggcacgggccatcagccattggaatacacccagccagggccctcatcaagtgcctactgtatgccaagtgctgttctgtgtgctggggatgtgccagtggaaaaaagtccaaatcctcaccacaagaagctgttgttctagtggaaaggagcagatgataaacaactgattaaa

SEQ ID NO: 64419 - DNA, 1900 bp, Homo sapiens
gacagagagtaaaacagtaactgtcaggggctgggggaggacgggatagggagttactgtttaatgggtatagagtttccgtttgggaagatgaaaaacattctggagatgaatggtggtgatggtcccacaacagtgttaatgcacgtaatggcactgaactgtacacataaaagggattaagatggtaaatgtgttatacatttttcaccacaattgaaagcatatattatttttaattaattttagcctggtaatctctcagtgtcaccttgttttggtgctgctctatgtagattgttcaacatagtacaaaacacgactggaaaagatcaatcttgctgacatttactcgggcttaagatatggctcaagggccttgctcttttggtcttgtgcaaaccgcccacagtccacctgctggctggatgccctcattgcaggcaaagcaccaggatttcttataataccacccatagacccaagtaggatcctggtggcctcgtggtaagctgtgacaggaatgcacaaggatctcctggcttgttggctggcatcgctggcccagtgatgtgaggtgaagggattctttgctctgactcagctcaatccccctgtacaaagggactaggtgggcttgctgtgcttttggaaggaccagaaaaatctgcttccttcactcactgggagccatgtattctctttgacttttgtttgcaggagcaaaacaaacagatgcttggggaaaaccaaccaaaaaggggggaaggggaggctggtgctggctggcaaccttgactcagcgctcggcaggaggtccattcggaacagaaaccctcaccctgcactttcctcacccagccctgaaatcacaaacaaccccttggccagggtcctaatgagcctctgacaaacacagcccgccctcctgacacagaaaagacaattagacatgcacaagtggcctgtgaaatgccaggctgggcacttgagctctccatgaatggcaccccctgtaccctgggccttctcggaaaaacattgcttgggttccttacgggtggtaatggctaataatgcagagagaacaccgtgttttggtttcaggcctttggccagggcggtgagagaggggtgtgtgtgtgtgtgtttagtgatggtagtggggtgatatttattttcatttctccatcataaaggaattgaagtcctatagcatgtcagcaatgtcaatgtttcagggtgaaataaacaagtaaaaggtgttagcgttcagatgagctctagcagcctgtgacgttaggaaaatcgccaactcctggggcctcagtcttctcatctgtaaaatgaggataataatagaaaccaccttccactcatggtgattgagtgagccatcgcaggtaaagcactcagccccaggcctggaacataggactcattgaacattggctattaacttaaaagcaagcgttatgcgttttagtctatttaaggagccacttttgaatatctgcttgtgaactcctatatgaagttggctgtgaaaacacagaaaacacagtctttatgctcacagagcttgaggacaaccagggtgacaagaaaaccatccgggcagggccagctcaatgctggcgcgttggcaccaaccaggagacagctgtggcttgctttaggtctgtttgtttcttctaatttgtgttatcttttttcctttggtggtggaggaagggcggtttctgtaggccgcagacagcagggtatggatcattggtctggtcaggctttaatcaagtgaaaatctgctcttcatttgtttgttactgctacaaagcacatgattttcttttttttttttttttttttccacatctgttttttttgtttttgtttttgt

SEQ ID NO: 64420 - DNA, 4855 bp, Homo sapiens
gggcagaggggctcctcacttcccagtaggggtggccaggcagaggcgcccctcacctcccggacggggcggctggccgggctggaggctgacgccccgacctccctcccggacggggcggctggcctggcggggggctgacccccccacctccctccctgacggggcggctggctgggcgcaaagcacatgattttcaagggataagttgttaggatgtttttaattgtgatgatgaaattccagctcaagttaacttaagcaaaagtaaacaagcaaaattccaaaaagggagtttactttcttacataatttcagagaacaaagatgggtgtcttgctagcttcagtcatagctggacccaggtgctcaaatctctctctttctctctcttctttcttcattgtctgatagcttcaggcatacacagtaaaccctcagctcatgatttcagagtaagagagagcctcctcttggaccaacaactctagactgggaaatggggcaccacagttggccagacatgggttgcattcccccaaagccaggggataggttgaccagcagcttcacaggacccacatggggcagatgggatgcaaggctgacaaactatcagtgagactctgtggatagaaagcatgagtaggcgccaaacatttcacgtaagcagcgaatatgcaggcttcctctttgcatctcacccaactatgcttaaaatggcttgtctggcacactttgaggggtcagcctacttccttgcattcaaaaggtgaagagtttctaactctttgttcttgaatcaaaccaagtgactgaagactaagtgttccagatgggccaaccacgcagcagcatggtggcagctctgagatgctgcccagtgagccccagtagtcacatcctggagagtcccctcttcactgaataggacccatctggcaaccagtaggactgcagaaatgatgtccaaggctaggccataaaagacatggttcctgccttgctctccttgaatcacttcctcgggagcagccaactgccatgttgtaaggacacttaagcagctctgtagaggagtccatgtggtgggaaactgaggcctcccaccaacagccagcaccaacctgccaggcatgtgggtgcaccacctcagaggtaaatcctccagccccagttcagcctctaatgacacaaccccagctgataccctgactgcaaccccatgaaatccctgagccagaaccacccagctaagccactcctgaattcctgacccacagaaactatgaaataataaatgttcattgttgtttcaagccactaagttttggggtcatttgttacacagcagtagaaatctgatacaggcatattgtggtcccttcctcccttcccagggacagagtcactttggaaagcttccttggatcattttcaaagcacttctcaataactatcttagttcttgttacaaagtttcagtttcacaaatggactcacacggatatcacaggctgctccaaccctcaacagtgaatttgccgataaaacaaaatcagggactaggtgtggtggctcatgcctgtaatcccagcactttgggaggccaaggcggatggatcacctgaggtcaggagttcgagaccagcctgaccaacatggagaaacctcatctctactaaaaatacaaaattagccgggcatggtggcacatgcctgtaatcccagctacccgggaggctgaggtaggagaatcgtttgaacctaggagacggaggttgcagtgagccgagattgtgccactgccctccagcctggggaacagagtgaaaaaaaaaatcagatttccactgcatttacttccctctcctgtactagatatggaggtagttgaaattctaacaggaaggatgccttcaaagttcggtcagtctccctccttgttactgcatatgacgggtggtatcacacactatcacaatactgcaaagtcattgataacatgtggcaggagtgccctgggttctgaagccccatgaagtcctccaggcggtcttctggctgaagtagtgcctccctggcagatgagctagaattcaaggaagtctgatcctaggctgcttgcatcaagggagaactcggggaagaggtggatcctgagcacacccttcaatgccccccttccctgaggtgactgggacataccccacacataccccacctgggtcccctgctgttgcaaagcagtttccctccccctcccacaagccctcagtcacgtaggtgccagcacctgggcccctcccacagacagccccatgctgagcacctttctgatcctatgtcattgctggcgtttgcttttcctcccctctcaggatccagatgttatcattccccaggagctcaaactactccatctccctggtctcccatcgttgaactccaatcatggaaagaatgccatacaagctagtgctcctcagtgtaccagccaggactctgcaagtgacagaaagccccgcacacaggctccagcccatcctcaggtctctgcctcctgctccggctctggcttcctccgcatgttggattcgtatgggttggtccccagctgccctgtgaggcaaggcaggccttgatgttcacttgccatatcaggtcccgcctgcctctgcagaaaaattttaggctcctcaaggtctgggtccacttctactcctcctatcagagtgtaaataaaaacagtctcctcatcctgcccctgctcatataacctctgtgacaggatgctcactacttggagaagtaactctttttgcggagctggtctccgccccttctgtgactgccacccactgggccagttctgcctaatagcaaagaacactgctcaccaatcttctttcctttccttccttcccttttgcccataagtcaccgatggatggactggacccatgggcaacgtctgtggatgacgctgtgtttgtccttccacagggcgtggggctcctccaccctgcatcaggcacaagcctgcttttggggaaagtcccaccatctcattttcccttgcctaaaatagctacttcctttatggggaatgcagtgtggtggggagcaatgaaagggatgaggtaagtcatccacagatgcctggtttggaatcattcctgaaaaggtcagcgttttcatcagccaaacaggaggcagggcacttccggctggtcattaaccaaggcaaacagcgtggcggggaaagtcaaagccatagccaaccacaaacaaacaagtcatgtatcctctgtggaggtgactttcttctgaaggaatgtgtggttgtttgcagataatatcaaatccatttcacgtcagatcaggatgacagacagccagaggctattggggtctcacattaaatggctcttttatggtaataaattgtttccttttcacggttgcatgagcaatctcaagttttattttgaggtgtcaactgccctcagggacacctgccacaggtgggatcttgggtcctggccaccatatgtgagagagcagaccctggctgagtcactcagctgtggtcgcatcacctctgtccctgccccactgctcagccccatgcaggctggcaggggaggcctcctctcccccatggggtctccctttcttcctctcacactgatcattggaaagagtggcttgcatttgccacagtgctgagggctgtcagtcttcacagctgaggaaatgacatgatttgttgggagccacttgaaataaccagttccccagctggtctcgctgtccctgtgctggcagccctgctgacgtggggcctggctagacagaggtgggccttctgtgccctcacctgggccatccccaccatgcggtgaggttgggttgcatccagccaggaggcagctggcagggccctgtggcttgtctgaggacccaagggggaacttatcagagggcaagagagaaagagggctgaggggtggtatgtaagagggagggggctaggagagtgtagatgcttcctgaaaggtcacggattctattggaattcccagccaaacttcaggactgggaaacacccttcttaggaggtggctaggggctcaggctggcttggctcattcctggcctgcaggccttgctcctgagcacagggcaggggctgccggccccggttcagaatgggatctgaaagctgcctggaaagaatgggcctctggatcaggatcaccagggtgggacctggatatttcccatagtcaccagacgtgttgctcagagggaggttcctggccagcagctttgttggcatcacctgggagcttgttggaaatgcagaaccttgagctctgcccagacttactccctcagaatctgcatggtaaatgatctctgctgacccgggcactggggttcaaggacctcggccctgccaaatctgaaatccagagctaggccaaagtacacttgtggaatcaggatgctgaatctaagttaaatgcagaagcatcctttgagcaaaggtggtggagtgggctgaattatgaccctctcaaaagatgtccatgtctcagaaatgcagaatgtgaccttatttggaaacagagtctttgcagatacaattaagatcttgaggtgaaatcaccctgaatcatccaagtgggtcctaaatccaatgacaagtgtccttgtaagagaagaggagaagacacagagacacaggcaagaagaccacgcaaagacagagacagagattggagtgatgtggccacaagccaagaaacacctggagccaccagaagctggaggaggtaggaaagat

SEQ ID NO: 64421 - DNA, 3591 bp, Homo sapiens
ggcaacaagagcgaaattccgtctcaaaaaaaaaaaaaagattgttatttctgaaataaacccctatttctcactatttaataatttagcaatcttgactcacaatccaaatccaggcaccccagacccacccacggcccgttgcctagcaacagcctccccacccccgcctccgcgccttttcccgccgactgcccagtgcgcacgctcagagccttcctccacaccccgcccctgcagggcgcgcggtggtgacgtgtagagtgcgcgacgcttttggcgacccgacctctggctaacctacccccggagccatggcctctgctggggtggcagccgggcgacaggcggaggatgtattgccgccaacgtccgaccagccgctgcctgacaccaagccgctgccgcctcctcagccgccgccggtccctgcgcctcaaccgcagcagtcgccggcgccacggcctcagtcacctgcccgcgcgagggaggaagagaactactcctttttacctttggttcacaacatcatcaaatggtaagaacctaggagaggaccaggccccatactccctccagcttctcctctcagccgtttcagagctgcaagaggccttggcgctctggggcacgcccccgtttcacagatggggaaactcagacccagagcgggaagaggcctttcccaagaccacagagacattccatgagttaagcaaacgatttgagcctcgagaggtgcgatatccttaagaatgaagccagcttagagactaaatgcagactcttgtccagcggctcaaatgttcatcccagcgatcttgagcaaattaaatctctttaagcctcagttttctcacctttaatgttggtaatactcactttagttccttagttcagcaaactcaacagataagcatcatcttccctgtgccaagtgctacgggatggacgcagtaaaaggggccaacttttcacccccaaaggtttagatagaaggaaaaaaagacatgattgggaataacccacaattcaaaaagattgagacgggagtggtggcgatgggaaacattagactaagcagaaacacagaagttgcctcagatgattagacccacttgtactgactttgttctaacagtaccaaaggaaataattgttgtcatccttttggccagccttcagggtagcctgagttttcaaagtgactctgtagaggaaaaaccaaaaacaaaaacacaaaagtctcactgatccttatgtttgcctaaattattattttttttgagagagggtctcgctctgtcacccagactggagtacagtggcgtgatctcggctcactgcagcctcaacctcctggcctcaagccatcctcccacctcatcctcccaagtaaccggaaccacaggcatgagccatggcacccagcgaatttttgtattttttgtagagatggagtttcaccatgttgcccaggctgtaaattattttcattatgttacttcactgtatatccacgtgatactaggtgtaaacccctaggcttgtaactcttactcaaccattaaagaccaaaacaaagtaaattaaaagaaaattacgattccagtaacattcaggtgaacatgaatgtgctcttcactgttttactgaaatggaattgttacaacgtgaaggtcttgactgttagtggcccacccacttttgagtttaagcaaattagattcacttgctgtgggatgacctgatgctcttctgccacttttcaaataactacaaaggctttgttctcacattagaccctggcttcatttggtttcacttggtgtttaaatactgtttataggggccaggcatggtgtctcatgcctgtaatcccagcactttgggaggccaaggcgggcggatcacgaggtcagagtttgagaccagcctcgtcgacatggcaaaaccccatctctactaaaaacacaaaaattagccgggtgtggtggcggctgcctgtaatcccagctactcaggaggctgaggcaggagaatcacttgaacccgggaggtggaggttgcagtgagccgagatcatgccattgcactccagcctgggcaacaagagcaagactctgcctcaaaaaaaaaaaaaaagtaatgcttataggataaggcagcctattcagttttcgtgagcctgtgataatgatcatagacagaaatacatatggagcccctgtaatcctagggcagtgctggattataaagggtttattctgattaaccctagtttactggttttaagaaaaatgtggaaaaatgaaaacacaaaatgtacacattcacaaggacagctcttgaactccccaagagtatattcttgagccctggtagagcagctgggttgggttggccttaaaagatgtagtagtaagttatactagagagaacaggctttgaagttagacagccctgtgttcaaatctgtgtactgacattttcttgccttctaatcttgatataaatgcctaacctttctaggccataatcttcttatctctaatatgtccatagtggacctcaaaagagaggttcagattatgtcatagctctataatgtgctgactgggtgaccttggcaagtagcttagcttctctgagcctgtttttctcttgtgaaatgggaatgcttatgtcataggattgttgggagatgtactcaggagtgtacctgtgaaacatagtgggttgatcacatgtgcttgtctctgttccatctaaaaggacagagaagggagtttaaaaaaaaaaaaaagcataaaaccttcagacatggtggttcatgcctgtaatcccaacactttaggaggctgaggcgagccggtcgcttgagcctgggagttcaagaccagcctgggcaacatggcaaaaccccgtccctacaaaaaatacaaaaaaaattagccaggcatggtggtgtgtgcctgcagtcctggctacttgggaggctgaagtgggaggatcacttgaacccagatcatgccactgcattctagcatgggtgacagaatgagaccctgtgtcaaaaataaaaagcataaaaccaaaaagaataggacaggagatgattgccacaaagtggatgaccagggctaattcatctaccaactcctaagcacctggtttgttaaccatggcctatccccagatctcaggaactctagtgcaaggaccccctggaaataggggtgaaggtgggtctaagaacaggaagattacttggaagtctgtttaagaagcaggtccccacagtcctgtcccacctcccatcccctccaagcggccgggtgactacccttcttccaacttggcagatggttaaaaggttactctcccgagatttattcttaggaaggaataagccagagagtaccttgactgtgggacaccaggcacactgcaggggtaggtagggggagccatactgaaaagagggattaagagaaagttcacagtctgaagagagacaccacccgagccttcccccacctggcttctagattggcagccaaagagagtggaagtgccctctctatggtg

SEQ ID NO: 64422 - DNA, 4866 bp, Homo sapiens
aaagttgatgaacagcctcatttccccagcttccctgatttcttccagatgggacgttttatttgtgtgctctcccttgactgtcagattgaagtaagagcagttctctccgttgcctctcgaggaggaggtgcgaagtcctggagtattgtttgggtctcggaatgggcgcataacctgcgctgaccagtttaggggcttagcagatgcctgccagctgacctcgttggcaggagggttgggtggagatgtttttagcagagcttccattagtgtagacctgtagccacctgtcagaaggtgggtggcatattggggacctgggaatgtgtgaaggaggagatcaaatttcagtggctttggacagaaaagaaggctctggatttaagcgggtggtcacctgtgagaccaggtctaccttgggactgttatttaactgaatcagttatttccttgaaatttcacagtagtgggtgggcctgttttaaggctctgacagataccacgaaacatgaagcacgtggaactacaagacccccggggtctttctgagtgcaaggctgaaatggacaagggctcctcacgggggtggagggagccggagcctgccttgtgttccttttttgacttgtgacatttttcaaacacataattaaaaggacttatgctctgctgtctcaggacataatgctttttgtactgagaaattcatagtgggatggctctcagatagttgagaggaaaatgtttctctcagtctcttcagacacaaccacacctctgctcctcactccctccgccccagcacacacacccgccccagcacacacacccgctgaaccagtgtggaacaggaactcctctcccggctggcctcaagggcagtttgcctggcgggtcatccctgggctgtccttagttgccttttatttttggaggggggaggtggggggtgccttttggtgactcgaggaggttcagtcctgtggggagccgccctcaccagagcagggttgaaatccttctaggacaattttgagtgtctctcacagggctgagcgtcctctgaaagccaccaattacttggattactgggtggccggcatttatgctaagtacttttcaaacatcacacttaatccccacagtgagcccatgccgagggtgttctctcttcccggggtgaagaattagaggcttggcaggtgtcacccaccaacaggtttgcagtactagtggcagagagattggtgttctggggtgccttagccatgagacggagacagcaaggctgaagggggatggggctctacacctggccaggagcacttcctggagctagaggggagcagaggctgaggagttagctgtttccagacagggtggcaccctggagtgagcgggtggtgggggcgcgccaggatggtcctgtttccagatggggtctcaggctctttccccagggcctgactgatgcctccaacagtccgaaagtttgcctgggcccacactgagtctggtgacaaaatggttaggcacagttccagtggcttttacgctgaagaattcagaacattctctcagaaaatgaggccttttgtcatctaacccaaagaaaattaagcgggtggatggctagaaagagttcatctccaggggggaccctgaaatcctttatattcttcccggttttctagggaaccatcccctacatagatgccccaggcatctggggcttttctggcagctgaagctgccttcagaaggccagggttattttccagttctggggaaggtaagttctagttccacctaagtcaaagcccagccctttccttctccccacccttccccactccagccatctctaaaagcaaaaaaaaaaaaaaaaaaaccggttttccattttaaattattttattgtatattaaaaaaccaaataaagcaataactttaaagacctcagacacacacagtataaacacctgggtaaggttttgttcgtgtccatgttgacaccggaactaccgttaaagtgcaagttttgttttgtgttcctttgtgcagtttcactcacatgtaaacaagtcacttggctatgatttgacccacgcccccccgcttagttttgggagggcagaggctctaccggctgtcacagcaacccggaatcacagacaagataatgccccgtgggtcctgaccctcaagcgggcatgacggtttcttgaagcctagcagaggctggataacttcacatccctcccccaccccgcgctcactcttaggtctttgagaagataaatccaccctcggctgggccctcgctcccaaagttatgggggtggcgggcctcaatgggggaccgggggtggggaatagtcccagtcttggcccgttctctttccttccggagcagatgaccgtcccttctcggttcagtggcgcctccccagtgctgggggcggatcgccgggaggggagacgccagtccgcgcgcgctcccggcctggggcgcaccgggccgttggatttgacttaacaaaaaggtcctccttaggttgtgtcgccagcgcggcggggctcctagctgatgacgcagcgctccttgtccttggcctggctgccggcgctggccttctcgcggatgtacatgaggtcgctgtgtacgctgggccggcgcgcgaagggtgccacgatgccaaaggcgtcgcccgggtcgccgccgccgccgccgctgccggcccgcagcagcttcttgttccgcagcgccttcttgtgcagcacgtcgcagtactgcaccgagaccttgcggtgcaggtctgggctcatctcgctgggcagcttggccatggcgaagagcgcgcggaacatctggtccaggctgctgttcttcttggccgagatctcgaagtaggcgcagcgctgggggtcgtcgcccaccagctgctcgatctcgcgctggtccacctcgcggtagaagtcgcggtcacccttgttgccgcagatgaccaggggcacgtccacgttctccttggttttgttcttgaggcaagacttggtgtcgaggatctgctgcctgagccgctgcacctcctcgaaggagtcgcggttgtccagactgaacaccaggatgaaaacgtctcctagagggggcacagagagcagaaaaggagaaggtgagggtggccgcccaggggacaagtcgggctgactttgaggccgcgcggggcgcgctagcctctctaagcgcgaagcgcactactcggcgcgcggcagccggaccggcgctcgcggggcgccctggccgagggttccccgcccttccctcccgcacctgcccggcccccggctcacctgtgaggatggagaggcgccgcatggcggggaacgggtggttgccggacgtgtcgaggatgtcgagctggtagacctcgccgcggatggagtagaacttgcggtggaagtcctcgatggtaggcgtgtaggcgtcctcgaagcggccggtgaggaagcgcgacacgatggccgtcttgcccaccttggacgagccgaggatgaccatgcgatagcagttcttggccgggatactcagctccgagtcgctcgggcacatcttcttgatcatcgcggccagtttcattgggcagaggggccgcgagggcgggcgcggggccgagagaagggcagagagcggctgagggtcgctggggtggcacgcggggtgagcggctggagggctctgctcgggctgggcgcggctcgggcttggggctccggctccgctcgggctgggctcgggctaggctgggctcggctggggttctcccaggatctgggcacaggccgcttgctctggctttggcgcccggccgccgcccttatatgcagcctgctcggctgccccgccccggccctcccagctcggtgcgtcacgccccgcggggcccgcctcccccgcaccggctcccagtcccggcgacctcgtcacccgctgccgggctcctgctctctgggcgcgggggctggggggagcagtccagggtcgggctgaggctggaggcgctcggactccgcttttccactgccgcgggctcggcggccgcaggggcgtcggggttctggtcccggcggtgcccctgtccctctgcgacttcgggcaaggacccccattcctgcacctcccgcgcgcgtacacttattttctttggttctcagtttccccagagaataggaatctagtaagtaacccagtaagcgcagcagcgtttgctgagtgcttgcgcggaccgtatattgcagtcctcagagcacagccccagccccagcccccttccgctccggtccccagccgggctcttgttcccgggaggcgaccgccgggcggacgcggggtttcagggcctcaggcgcggagctcggcaccgcgcgctcgggccgccagagggcagcagagggcccggccggcggctcggggaggctgtggccgccgcgggcagagctagaacagaggctaggagcaggcgggtggggagcggcagggatggagcaggggtctcagggcgccttgctggggcccaacaggagcggtccccaaccccgcgctctgctgcaggcctcagcctgctcctttctcccagccagagatgctctgtggtatggagggctctgcagccagcggcccaccccgtccatcatagcattttgggcttttactgtgccgcgcgtgggccgacgttctcattgtctagctgagagacctggagctcaaagccacagcgagccaggaaggccctgggagcacagcacagcctcttgctttctcctgggcctcagttttctcttctggaagatactgattctggt

SEQ ID NO: 64423 - DNA, 889 bp, Homo sapiens
ctgggccagcaagcaagtgcatatatgaacaggcggctctccgaggtcgcaccgtgtcagccccctctgctctgcacacgctaggcccagccggcccggtgacctggatcacacctgcccttcccaacacccagttccacctgtcctgccaggtgtgcacagccctggctcctttcagatctgccccaatctggccagtgctgctgaacctgggccagggcctctccaggacataggaccagtggcagctcagggcagcatccaaagcgtcccacagcacatggctcaactgcccttccacgtgacacagcctgctcgagggctccaacagtcattgtctccaacagatcaacagacctgcccactccaccagctagtccagtgaatcaatccctgtccaaggtgcacccaagctctcgccctgcagtgagcacactagtgccagagagcaggtcccagcaccagctgcccacttccagacaacctgcacccgaggccccagcaaagcaacatgacccagcttcacacccgaggggccatggcacagcgggggacactcgcctcccccagcctcagtgctcatgctcaacctcttcactccgttttgctccccgcctcctccattatgacggcccacagagcacaggagaaagagcaataggaacatgggctctgagttcaaattctagctccagcactacctatagcatcgtataaagatggaacccaccccagtgtccactggcagggggaggggctgaatgaactgcgctacagccccaccctggagaagggctccttgtagaaaggaggaagatttctatctattgctatggtgtaagctccaggatatattcattaagtaaaaaagcaagtgcggaaggtgcac

SEQ ID NO: 64424 - DNA, 4193 bp, Homo sapiens
aggagacgaggttacagtgagctgagatcgcgccactgcactccagcctgggcgacagactgagactccgtctcaagaaaaaaaaaaaaaaagtccttacttgttagagatacattctgcatttcatatgcatgtgagatatttactgatgaaatttgatgtctggatttgctttaaaacactctagtgaaaggaagcagacaggagtgaaggggaagaggcggagagggggcagaagacagatgaaacaagaatgacatattgtgagagaattcttgaagctgggcattgggtacggtggtgcaggggtcattaaacggttctagtttagtgtatgttgcatatttttgaaaataaaaagttagaaggcaaatccaggcttcactgtttcccagctgtgtgagctcaggcaggtccccaacttccctaagggtgacagtccccatcggtgagcaggggatgcccctgccctcccttgggttctgtgagggccttggtccagtgtctggcaacgactcccttattctgccactgtctccccaagggcctacaatctccttaactgtggcatgcaggccctgtgccactgcactgactgtggcatgcaggctctgatgacacccacagcacagtgacgtcagccgacactggcacagggcctgctgcacaccaggcgctggggtgagtgcagccatgtatcctattcaatctgcatgccagccccacgggggacgtccgatagtgtgcctcccttgcaggacttgccaaggacacacagtgagtaaatggattgtaactcaggtctggcttcagttatgacccctgccacatgctgttcctgaacattctggggcctcccaactctgatgggggaatctgtgccaatctgacttcacgggaccatctcccctcactcagaccccagcctctgtccttggcttcacccaacaagctcaggccaagttcaaaggcctcctctgtctgcctccgggtccgaagcacaaccaggcagtccccaaccttcctcctgcacacgggagccccagggttgcttgttacctctatcaagaactcagcagccccgcaaggaacagaccagcaaaggtgacctcatgggagtgtccatgccctggctggctcctgtgggtttgagcagagggaaatggtacagagctgtcccttcctcacccagtgggaaagtcaatggtgttcctctcatgagggcctgctacacctgcccgtccaccaggtgcgactcatgctctgtgctccctgcatccactgaaatggtccattggccccgtgggacctggtatggccgggagcaggatgaggctggcctggcagtgtcagcccctactcagggcggctctggttcatggtgctgtcgggtctggcccagtctgagtggaaggcaagaggctcacagcccgaaacccttcaccagtgccagcacccagcccgggaagtcagggagtgcggggtctccctcagcaggtaagacggcctcagctgcccttacaggccggggggcacgggagggacagggtgtctgctacgtgctccactgacgggtcccactggagatttcaggctggacgatgacaatacattttgctccttttccctgtctgtctgagggtctctgagccctgcttacacagatggctctgtcctgaatgtggggctgctgctgccctggaaagaaggagggagccagcatgctcagagtccagctcggaggtgggagcccagagctcctcgaatcctgccctgctcctgtgaggaggacccacctgctcctgggcctggccccctttgccttccccttgccctgctactaagaaccccccaccggccagagggcagatgctgtccctgcaggttcccaacccctgccctccatgggtgactgtggtccagcgacagcagaggccagctccagcccaacacaccgggctcccccaagcctagcccagcccagcccaggaccctgagccatccccgtgcccagcagcctgcaggggccttccccatgctggcccaggcctcaggcgagatcccctgtgtgtgtgccactcagctgctgattagtcatgctctgcacgtggccacctcttccatccctgatacttgtcttctgggagaaagcaggaggagagataagatagagtgggagaaagagaaggaaaggcccggaccactctttgctcctggaagctctggccctgagactgggagagacagacaagccttccagcagtatgacctgtgcctagatttcccggggagggagatttgagacatggacagtgcctgctgcagggcccagcatggcgtagaaggcaggtgtctttccttcccgccactcagccttccaggaggatgtttgttgacttggaagacagtcacacagttgtgacttgggtgggacctcatcctcacgtccaacctgccacctccagggaagatcagggcagaaatcaccagggagtggtcagctggcaaacgccctcctcaggaagggacagctgctgccgggacccatggcatgcccgtccttgctgtctgaggtggtctctccaacgctgcaacagggggccagtcaggggcctgggtcccagccctcccagccctcagtgacctgcaggccccacgatggtagagggagggtgctaaagagctgggtacctgagcccaactggacagggaggcagggaggtcactccatcaatacacgctgagcggcttctccaaagacgatggccaccagcggcaaagagagcctcaggccaggacagaggcagtattgtgccattgctgtcacagctctcacttaaataaaatatatatctaaaaatttgcctcaggctgggcaacaaattgagaccctatctctacaaacaattgaaaaattctctgggcatggtggcacatgcctgtagtcccagctacttgagaggctgaggcaggaggatcacttgagcccaggaatttgaggctgcagtgagcttggattacaccattgcattccagcctgggtggcagaacaagactctgtctccaaaaaaagaaaaaaaaaattaataaatacattaaaggggaagaggcagttgtttcatcagaagattcgctgagtcatttaaatagggaggctttctactgcatttatgatgtctgatttatgcgcagctttttaaagtgtcttttctttttacataaaacaaacccacctgtacaaagcaactgaaaaagtagcttaggagtgactccaactattaaccaaatatagcacaaagcgtgatccgccttcttgggtcaatatttacctggacttcagcctgcctcggaaaggaaatttgaaaatatttggcgagtggcagaatggttgtctggctacacaggccgataagcagctggggctcaggtttccaagctggccttttatgggcgagagacattatcaccatcatcaacgcccatgtgctagtagtaggacccactgtcagccagctttttgttttgtttttgtttcttaaagattagtatattttagaaggggggactttaaaaatcatttttaggtcagatttatgaaggtaacacataaagtaaaatgtaccctttttaatgcacaggtctgtgagttttgttgttgttgtttgattttagtaaagatggggtctcgctatgttgcccaggctggtctccaactgttggtcttaagcaatcctcctgccttggcctcccaaaatgctggggttacagctgtaagccactgtgccccaaccaggtctatgagtcttgacaaatgcataccaccaccacatcaggacacagcacttccagccagctccaggctccaacccagagctgggcccttccctgtcccaccccagacactcctgtcctgtgttccatcccgtttccctcctcaagtgtcacagaaatggaatcgcgcaggctgtggcatcctgcacttggtatgatgcctctgcgatgcgcccagggtgtcacatgtatccccagcttgttcctttttgtggctacgcaggattctttggtgtggacgtgccacagtccgtgtgtccctgccccagctgagggactgctcgtgggattttgctactgtgtaactgtgtattttcatttctctgagggccaatgtgctgtcagctaatcacgatcatggg

SEQ ID NO: 64425 - DNA, 3518 bp, Homo sapiens
ctacgttaggacttcccatgcaagccttgccagtgagatcaacaccactgtacccatttcacagaagaggaaactgaggctcacagaggctaactgacctgctcgaggcaggcagaacaggactggaagccaggcagcctgtttaaagcgggtgcctgcccctcagaggcctgtcggggaagggaacccgctgtgaagggggccagccagagcctgggcacctgtggagagggacaggggtcagaggcagtccagcactgagctccttgaaacgggcctgtgagtcctcagaggtgccaaaggctggtggggccagatgaaggccagttctggctggtaagggacgtccaagtaggggtggaggaattgtggcctctggattgggtgggcatttgtggttatcagtgagtctgggccaggattcccaggaaaccctaggcacagaggggagcccgagaacaggatggcaacagaagtgtgggggcagaaaaggcccaccatgcagccccacgccctcccagtttctgagtggggaacctatggttcagagcagtgaaacggcaagcccaggccaatcagtggtgtgactggggctggagccccgctgcacggctgcgagtggcccggtgctcttcctggcctgagtgggccccacctgagtgctgggaagtcagaggtggacaaagcctctgaggcctaccggctactctaccccacctaaggcctccaccaggcccgccaagacccagtctccaagacagtcacagcgaagccacggcctgacctggccagaaagatccccggtgacctggctggggcatgtcctttgcacagcaccccatgtgctgtacactgtgcactccttgaccatcacatggtcaaggcaggcatcgggtgaaggcagacagggaggcctccagtgtgccaagtacgatggaaaggctgtaggccccagcctcggggacaccagaggcaagaacatgcctgggtgcaggagaaatgtgccctgggccaggccgagctgcccgcctgggaggcaggagcagacaccaaggggccgccccatccccgccactcgccagccggggccaggtcctggaccagctcttggcacacatggtctcatttcatcaccaaatgccacagcagaggctgtggcagaggttatcggaaaaggagacagaggtacctatccagaaaagggtaggcagctaacctatccaaagccacatagctaaggagcaacaggggctgcctggggcccagaagctgtgctgtcttcaccacaccggccccggggaggggttagagaaccgggaatgggggcgcgggcccctggggatggtggaatttggagccacatctgtgcagacatcatcaccttttaaccaaactggcccttgaggaatagccctgcctagccaaggagcagcatggtgaccgggtgacaggtcccaaccaagccacccttcgcgtccacaccagctgcatgtctacacaggctccctgctgccctagccacaggggcagggtgtccagcctcccctcgacactcctccccacctccacctcaccccaccctcacctacacgctgcctgagcttccgcttgtccttcccgctcccaagactgcctttaaccaaccatcccctgggccctgggatccctgaaccctgggcctggcctgacacacgtctaggagtcagcaatgtgtgcagtgtgactgaagatagcaaggaccccggccgcgccttcctctcccctctctcctcccttcctccagaccccacactcaaatcctatttgcctcaggttccagggagtctcacatgatgggcaggacccacacacaccacagtcatcaaacattcactgggcaccgtggggcagggcccagaggacaacagccactcccagctcacatttttcaggcttcaactctgcctggctccctgtgctgcacacggagtgtgtcacatcctcacacgacccaggaggtggaacctacaggtaaccctctttcacagttaagaacgccaaggcacgaagcttagcacagtgaatggccagccacagccggaacccaagcggtgaggctgcaagctggaagctaagtccccctgagtccctgcctgagcccaacctgaagaagcctggaaaggtatcaaggacaaaacccacagagcagttccacaacagatgccctggggtggctgcccgagggggaagcggacggtaaggctggaggtaggaagagggaacagacgagggtcactgacgctgagctggctccaggcaccacccactccaggcaccatcccggcccttgcaacagtgagccaggcagctgtgcctgggtcacagatgagaataccaaggctcggagaagccaggaaccttgcccaggtccgtcttgctatcaaaggcaggacagacctgtgtgctgagaggcccagagatatgaggggggcacaaccgcaccgggctcccgaggatggcaagggggacagactccagtgggctcaaggacatgggggtaccacttccacgtggctacctcacgcggacgccccacgtgcggcctgacccacaggaagtccagtcataatattgacacaggcagggcacacagcagccgggaagctgggctgttgcgaagttggcgcagggcatgtgagggcaccccaggctccggtgggaggggcctcaggaccggatctgggccggatccacgagaggcgcttggagggcctcttcctgccagcaaggctggcgttccggcccattggagtcggccgtgctgcagctcggggctgtttttccactttcctgccatgatgcatccatgtaccaggcagtgagaggcatagggggcatgaagcacagggcgggaccagctctgcacacacggccgaggccctgacaagtcaagtgacttctcgggccttcagctgctgcttctgtaacaccagtgctgccccttaaggcagatcggatccgctggatccatgtgttgtgtctcaggcactgagctcactgcagcggcagccacgacagtggcaggagtgttgatgatgactatgaggctgaccaccgtgacagtcacagtggaggcacggttagcactgagctcctgatggggagggcactgtccctcgccacgggctgtcccgcccctcaagacagctgcactcccttgatcccacgctcaaaggctgttggggaacatgtgccttcgagcagacaattgcccctggccgggcacggtggctcacctgtaatcccagcactttgagaggctgagacaggcagatcacttgaggtcaggagtttgagaccagcctggccaacatggtgaaaccttgtctctactaaaattgcaaaaattagccgggcatggtggcacacactggtagtcccagctacttgggaggctgaggtgggagaatttcttgaacctgggaggcagagcttgcagtgagtggagatcgcaccactgcactccagcctgggtgaca

SEQ ID NO: 64426 - DNA, 988 bp, Homo sapiens
ttattaaccaaatgctgatttttctatgtaacatctaatgtccaatctgaccttgttaatccagtgccagcccaggagggcagggtcccgtcccggcacagagctgccccagagccaggacttggtaaagcgcagggattgcagcatttcagagctagatggggcctcagctgagcgtcctcactttacaaatggagaaaccgatgcccaggaaggggatgtgaatgacaagggtacagggcctgggctgatcccatagcacctacaaggtcggctttcccggcacctggagggatcccttggggcactcagaaacgagccatagaccgctggctggggatctgaaaatggaaactgaggcagcagcagcagcaaactcacactaagggtggtaggcaggtgagggagctgcaggtgaggaggtgactgaggtgaggcaggagcacccacaccttttcttccttctcctcctcctcctcttcctcctcccaggagccaggagaagcacacctcaccttgcccacagcgccacctaccgtctggccaccctggggtgcagctgctgccagtaccagccagcaggtcaaacatccaggcccaggaaaccccaggcccagccagcggcccagcgcagcaagtggactctcacctcccagaaaggaaaagctgcctcttcccaaacaactctccagactacagtggccaactgtcctgttctgcccaggactgacttgggttccagggaaagagactctcaggctaaaagcaggaaagtccccggccagagggacaggtcagcgtcctgatacagacataaggcctgctgcccctctataggtatcctctgcagggccaagggctggggctttggtctggttgacagtgagtgtcagaacacctgtctgcagctgacctgtcaaatgcctttcctctctggagcacatgtgcaggagccacccccggcccaatggagcgagaggtcttgggc

SEQ ID NO: 64427 - DNA, 3233 bp, Homo sapiens
cacaggcaactctgcctagaaatccttctaggttggaagtagggttccaacttgctatgtctccagcagctttgatgttggttacatgcaactggtcttcaataaagttaaaataccaaagcatgtgcacactttgctcttgtaaataactgctcaaggcagctgctgtgcctcccatgctggctccctcgggacaacacagggcatggcagggcagggcaagcaggggggctctgggagctggagtggcacaggctgcctatcttatcttcactgggatgccaggaatcgctgagcctgctacaaatgactgctgctctttacctccatgcagtgctttatttcacagagtcggggtgtgcatagaacctggcacaatggagcctcaccttgtccaccaggtgccactgcagaaaaccagtcaatgggcaatccacgctcacaaagccaataaacactgcctggacatccatttctgccaggcatggtgctgggcacaggcactgagctacaacaggtgccctaccctccttgacacagaaggtcaggcagcagctgccacccggagcactgcacatgccaggattggggacacagaagcagagcaggctccgcttcaactctcttaggatgctcctgggaaggggacagtgagagacaaacagtgacagcaggtatggcaggctgtgctgaggggtaggtactcagaacgcccaggcagccatggccctcaagggacatcaggcaatgtctggaaaccactcagatggcctgggcttggggtactactgacatctagtgggcagaggccggggacattgctggacacctgtagtgccagggatggccccaaaagtcagcaaccctgagtcagagagggcagggtgaggaggcatgagggaggggacacctgacaaggaccactccaagctgcggtaacaaaggtctgtgggcagccttgcacaagagaagccagatcacccagaaaggcccaagacctgggatgactgaggatacaggtgggaggacgcctgccagaagggcctcccgggacaggggaaaagttccatttcctggaaaacctggggacctctgagcatggccctcaagggtggctagagaggagcagtggggagactggctgcaagcagctgctgctggtgatctggcgggggtgatggcacgaagccaggtagagtccgcgagggtacagatccgggggcaggtgagaagagggagtccatcctggtccttggaccactgccctggcatctggagtgatagggaaagaacagaacattggggaggtcttggcaggggctccctttggagactggagactcccacgtagggccacagtgcctggacccaaggtcctgaagccctgaggagtccaggccacagactgagactcagatgacagagggaaaagcctgtcagtccctctgtgacaccttgatctttgtttcctgagcccttatcacagtgttcattacaaacatatctgtgctctggaaggacagaggtcattcactctctgaggacacacacagtgcctggtgcatggcaggttctcggtgactattcgctgagcaaatgaacatcaggtggaggaagcagaattcacaagaacagcaggaagagagccagaaaagcatcgtggcgcacaggaaggccggtctccaggaagagtgagggtccgcagtgtgaactcccccaaagacccagaaagagaaggccgggaaagcctcccatggtctgaacaaggaagagcaggaggaggccttgggaagaaatgttccaacagagtggaggagatgccagctggccaggtggagggaggggtgggagcaggtggctcacctaggaagcctgggagggaagagggaagggacggagtgggtgctgatgagcagaagcgggcagcaccccagcccaatgctgggaaaacactccctagagccacagcccagaaaggcacacagtgggcctggggccaaggcccctttccagtgcccccagctccccaggagtccagactcacacacagtctgttttgttttgggtttttttttttttctgatacagggtctcactctgccacccaaactggagttcagtggcttgagcacaactcatggcagcctcgacccccagagctcaagtgacccacccacctcagccttcccagtagccggtgctcaccaccacacctggctaaattttgtatttttacagagatgacatttcaccacgttgcccgggctggtttcgaactcctgggctcaagcgatccgcctgccttggcctcccaaagtgcttgggattataggcgtgagccaccatgcctggccttctcacactgtctggagcccaaggacatccgtgtctgacacaggcaaaaccgagctcttcctccacaagcctctcctcccacggttgccccagggcagccaacggccttgcctcccacgggtcactcaggcccaaccatgggctggccaagccacctctctcagctctccctgatcactgctcccacctccgccagtcccactgtggtcaagctgccatctggggcctgctggcctctcagctccacctttgtctcttctcctctgtccttggtgcagtgaccttgaaactctgactcagatcatgccacctctgcaatggctcccagctcagagtccagggaatgtctctccccatggcccgcaaggcctgcaccaccgtccccagccacctctccgtcctgctcctccattctccctctgcctggctccagcggcagctgtcccttaaaacctccgaggacactcaagagtgccccaggacttttgcacttgtgttttcctgacagaatgctcttccccagacacctgagggccctcctgcatgagaatcaggtttctggtgaaaggacacccatcagagaggccttccctgaccaccacccctgtctgtccctccccttgcctgctgtgtcaccggcagtgctatacattcattcaccactgaagctgctgcgtgagggccaggggccgggatggtgcccagcgcacagtagatgctcaataaacatttgaagaatgtatgaatgaacctcttcaagcttcagtctccaaaggggatattaacagcatttgctgtgaagattcattgaaatactgcatgacatgcactgggcacaacacctgagcatgagtcccgccaccaccagccagccctcc

SEQ ID NO: 64428 - DNA, 2696 bp, Homo sapiens
tggccaatgtggtgaaaccccatctccactaaaaatacaaaaattagccaggcatggtggcgcacgcctataggcccagctactcgggaggctgaggcagaagaatggcttgaacctgggaggcggaggttgcagtgagccaagattgtcccactgcactccagcctgggtgacagaacgagactccgtctcaaaaaaaaaacaaaaacaaaaaacacgcatccaattccaaggccctgtcccttgacagcctggtggggggagggtggaaagctggctcagggaagagtcgtggctttggtcatgcctggcacttacgaagtgcaccaagagtgagttatctccctgcatgtgcacagcagaccctatgagtgggccagcggccagttttcacccatccctcccactccccattccccattcagcccccagccaaaacctggcctcaccctacccctcccttgcctcattcccattaccaatcctcccgtggcccatctgttattccgcctcttacacaaccacctaatccactccctcctccaaccctggctttgccggttgctccccagggcacagcaaaggacctcagtggcctcctgcctttggacttcccccagagccctccccatggacccttacctatggaccagcatgctgttagccaagccaaagaggagaaagggcagagtgtgagtcacagagcagagccccgctcagctaggggaaaggggaaagcaggaaaggcctagggacactgagcctggggccaggaagggacagagggcattttccagggccaggaaaaacacttcccatatcactggcgccccttcaactctacagctaagagaggtgcatcttcctgagtgtaaatgatctctctactacttccccactgggccctgggggaaatgctgcctctcataaggaattcaactcgatgttagtcaccttagctgagctccactaaggaggccctcactctaggggatctaagaaaacacaggacctgtcagtgagcgcagacctatctctggccatactctcagccaccctaaaagtaaagccttgttgttagcctactttccagataaaagagcaaagcctccagaccccaggcagtgaggagcagagccagcctgagcaaggccagccctaccagacagaaagccccataaaaatgggacaaggataaaagtgagtgcttctgggtcttgaaacccaaggaaactgggaaagtgagcaagaaatatgcttttttcaccttctgtgggagccaagatgaaggacggaaactgagcactgaaagattaagcaactaacactgggggaacccagcagcagctgacatccacctgagtctcccaattagggctgaactggtcaaagctggaacgtatccaccccctcccccctctccctcctgtgcccaggtcccaatggcctcaggtcagcctgtctcaggagggtggtggtgtccatccggtcacttcagtcaccttgaggaggatttatgttgcccggagaagcacctgcttcgctggaaagaatgactaatggttcagagtggaattctaggcagcagagggaagcccctcccagctccccgatccccactcagagacatgatagtccctttctcatagctgtcatttccaaaacccccctcaggagggtggacctccctcctgaaactggattggcaaaaaagaaccaaaaatccaggtcagacgtgagcagagtaggagagtcctgggtcccacatccaggctctgcctccgggtgtcagagtctcccttgatggcctccccttcacacctgtgaccaaagggcggtctcccatccactcccagccccaacctccttcatacaacagaggtcccggctttctgctacccagtaattctaatggaacccccactccaaggctccaggttgcagaggcctcggaatctgactaaaggaaaggagctacccaccacggccaggaggtctgctgagctgcaggaatagctcgagtcccacaggtcaccgacgaatagcctcagctgttaacaccccaaagcatgggtaaggaagaggctttatggtaatttactccattgaggggtgcagggttctcgggagcagcgctctgtggtcagggaatgatctgcagtgggtcaacatgtcacattgtgacacatggacaaacagcaggcctggacaggcaaagtcacatcgattccaggccacacaccacacacaacaaagggcaggggaatgggtgggggctgctggagaggggacaggtcctcctgggatccatcacccctgcagaatctgcctgcagcgctgcagcccccactgcccccagagctgccctcatgccctggcaccataagctgactcgggtaacgtttatttagggcaactttgggttagagccctgtgcctggcacaaagacataaggatgagtgtgccagagtctttttcctctaagtttattctctgggccgggcgcgatggctcacccccgtaatcccagcactttgggaggcctaggcaggcggatcacaaggccaggagtcagagatcagcctggccaatatggtgaaaccccgtttctactaaaaatacaaaaattagctggacatggtggtgcacgactgtagtcccagctactggggaggctgaggcagaagaatcactt

SEQ ID NO: 64429 - DNA, 2401 bp, Homo sapiens
tcagatcccaggtccctccctcgcagatacggcaacaggctctcttgggatttcaatcccgccttcccatcagctactcttcaaaacactaactggtattagctccttcagagaactctctggctttccaggcctacaatctccctccctagaatgaaagctcagtgacagaagtgcccttaaacttctgagtgacacgaggccctcagccggccctgaatcaatactggctggatcagtgagtgaataaatgcacatgtgagtaaggaatgaagggagcgaaagaactggattagaagctgcttggggcagagatgtgccttacaggcttcatgaagagtgggtgatgaaaaaggtaaatggagcatctaagaggaagctttgatagaagggagaatgcaagagaggttggaaattggaatccattggaattgggagcctggggagatgccaggacaggcactctctggcctaggactctgcagagggcagcctcagcaggcaagccaggcccccagcttctggggccggtcgcacccattatggccccgaaacggctgggtggtggtctgcagcctgcccagggccggctgggagacaggcagggtccccaccactctcttgcctctgggcaaaagctggcctcctgaccctgggggatggacgggagcaggggccacacaacacactcccaaacatataatcggcctccttcaccctcgcccacgctcagtcacacacagcctcggtcatacacactcacactcactctccggcacactctcagagcatcacataatttcagtgagacacaatcccaaagactaacacggacaacctctgagtctcacacaatctcagggccacacacaggcacacaatcagacgagctcaggaacgcccccgtctctgacacacgcaatctgaggtttacacgcgcgcgcacacgcacacacacagacaccagccggcgctcccgcacgcggctcccccacccccgccacgccacgcccccattgcctgggaactggcggccccgccccgcagcgtttgaggcgccgcaagccttcacgcccctcgggccttgcagatccctctcccagtttccgcggcggtccggtgcggtcagtacctgtctaaaatcaatattgccgaggcctccgcagcagtcaggccctgccaccgagctgttcgttacctcggctcccgggttcccagatctcttcatccgggggccgcctcaggaggcaccacgcgggccccgctgcagccacgcgcccccggaaccggacctatagagccgggtaagtgccgccagtcggggcgctttcccggtgacccccaacatattccggccttctgggaaatgtagttccccgtcaccgcgaagtgcctctttatctgggggctcgcgacagcgtctagaggagccgagaactacaagtcccagtgtgtttcgccgcagagcctgccggttccgctgcagctacgtagcagtatccccttggatccggcctcccgcccagtgcctttggtcgccggctgccgcacccgagcctgtaactgacctggcgtccctgcccttgcctggcggcggtggggctagaggccgggggccgcgggtcgtagctataagcagcttcccgcgcagcctcctgcggacttggacttggcccgggtcacacacgcccagggccccacacgcccagggccccacgccctcttctgaaattcgctttactctgggggcggtgcgcgacgagcactgcctagagcttcccgcccccgcggcgcccaggctctttagctcggccaaagacccctcctccactcattttttccttcattcattctctcattcactctcgagtattttctgaaccagactgtgcgctgagggtacggtagggaacaacacagagtcccccgccctcgcttcctcctgactgagataaaagacaaaatgtgaataaagggttataatatggatgagtactgtggtggaaaaaacggggtgggtcaaatggtacggaaggatgctgtcttagaatgtgcaggggaggtgccagatgtgccaagtgtgagggcagggcaaacaaggcaagacgaatggtatgtacaaaggcctggagacaggacgggcacctaaggaacagagaaaagaccggtgagctgtggagtagtgatggagggggtcaaatggagaagagtttagacgatcgggtcccagaagaaccccttttgtaggccgggtgtggtggctcatgcctgtaatcccagcactttgggaggccgaggtgggcggatcaccagaggtcggcagttcgagaccagcgtgactaacacggtgaaaccccgtctctattaaaaatacaaaaaatagccgggtgtggtgcgcgca

SEQ ID NO: 64430 - DNA, 2807 bp, Homo sapiens
tatctaagcatttgtttgctgtctgtctcttcccaccaggatgccagctccacgacagcagggaccgcattgtctctgctgattcctcaagactcagcaaggtgccaggtgcccagtaaatgaagtttacatgaagccaatggagttttgaaatcgaaaatgtttctcaaactgcaaagaagtgggcacaggtgagggctaatggtggggtgagggtgggggcctggcctgacgctggaagctcctgtacgcagggcgctagtgtcctcccaggccgcaccgggatcccaccgcagaggccccctcccgcaggccggccagcgggcggggggcgcgcagtggggcgcgcggaccgccagggggtgctgtcggggcgcgcacggcccacctggcgcccggggccgcgagcgagcgcagccaggccgcccgggaacttttttcctcgcgctcttgctctccttctccccccgcgcgtcgcccgcccgcccgtccgctcgtccgctcttcctgtgcggaggggatcgcattcctcgcggcacccgcggacaccaggcaggcccggccgggtgcgcggccaaggcccgctccccgcgtccccgggcgccgcccccgcccgcggctgggctccgagagacgagtgggagagcgagtgcagcgagggcgagaggcgagccgagcaggccgccctgcccgcggccctagcgccggcgcgaggagggggcgccgcggcccaccctccttcctgcctggccgcgggccggccgggccgccgcgccccgacccccatggccacccaggcctccgggccgcgaagtcgcagcgccagacccaaggcccccgagtgagcgcgggcgccgaggtgagcagcgagcgccggggcgcggggggcgcagtgtatcctgccccggggcgggggcggcgcgaggcgtcgggatcctaggccgggtgatgagccgaggcgggttcggacgccgagcgcgcgcgctgggtggagatgtggggtccgcggggtccttgctttgtgtggtgtggggggtgcgcgaggtcaccggatggacgtctggggagctgcagggtgggggcgccctgcgccgcggctgagggtcttctgggggatgtgcggccagctgaggtcgggtgggggcatgggggcgcgaggggcgagtgtggcaagggatctgcttgcgccgaggcgcggagtctttgcggagcgtggggtggggacgtggggtgcattcgcggggcgccgggggcggaggtgagctttgtgagtgcgtccgaggtgggggacggggagctgacttccccatgcgtgacccgggcccggcgtggccatcgcttgggagtcagggccggcgaaggccgtgcgtggcgagatgggtgctcgggctctctgcggtgtccctacccgggcagcggccccggggcctgtgcgcaggccccgaggccgggcaggaagcggcccccgcgacctggggagctctgtagcggccaggcccgggaggcacgggcccttcggggatgacgtcacgggcgggggccccggacacgcgagccttgcgccccacagacggcggcgcagcccgccgcccttttcgaggccggccccccctctcacgcgccttgaaggcagggaacccgggaggaggacatgggggccgagtgcggcggggacaaggggtggcaggacgcgagggtgacatttggagcctggtcgcgccaggggcctccgtggtggggcggaggggaagcgaaacaccagccaggccctaggccgtcgcggccccagcttcctggggcgcccgttttcccggctagcagttttctttcttggggctcttggtcgttatccagtccacgcaggggccggagtgcgggctgccgcggtgctctcctgcgcggagcccgggctggcgggggcgcggcgggcctcgggctctgaatggatgggagcgagtgtaacaatgcgccggtgggggctgggggaggggaggccgcgcgcctgaatggcggagccggccgggcgctgctccgcgcgccgcacactctcccgcgccgccttccccgcggtttcggcgggcccggattcagggacccactcgggatctgcacggttcctcccaccaatactgtcccccgccccccttttatgtctttccaatgcagtagtgtgttgagaattcaagggcattacatctggttgcaatccagtttcatgccgctgccgggctgttaagacctcgcgctgacgtcagagcaggggaattacttctttttattttatctttttttagttgtctgctgccctgggaggagaggcgggggtgggttaggctagctctgatgtggaggcgccagcgtgatgggagccccgagctgggggctctgcttctcttcctgcccctgcccccctccattctccatacagtcctcgctctgctcagggtcaggcccaccccaggtggggggcagccctcgctgcagactgaatggtggcccctccctgctgaccacacagctgggttttcagaggctttcctgggacgtggccctcgggatctagaaactggaaaggaatcttctagtttcccacccctccccctcttgacaggcaagccggtatattcggggcccaggagcaaggaaaagtggccttttgcgtgacacagaagtggacacatcattctgatctcagggcaggctcagccccataactctggcaaaagctctcacaagcaaaagccttggagaggaggagaatgtatcaaggtgagatccaggccccagaagccaactgtggagtgggc

SEQ ID NO: 64431 - DNA, 2499 bp, Homo sapiens
accatgtgacgcccccgtgcagcctgtaagctctcatcacagtgcctgggatacctgggagtccccagaaagagtgaggatgggtgagggccatgaaaccagggcatcattcctccacctcctctgatcaggccctcctggtcccattcatctccttatctcctggcagccagtgggttgctgggaaggcaggggcagccttcctgattgacaaacaaaacaagcttgatcacaaaaggagaggggagactggctgggcctctccagctcccctccccgtgccccaggcatctttcttgctccacccaactggcaccctacattctaagatgctgcgagggggctccaaagccattgtcgaaggtcaggccacccaggctaggagccccttgcactggggaggtggattcaaggagtgatggggttgccatgaggcggcgcttgctgcaatggccgcccctccttcccttcagctggctgggcaggcagcttggagaggaagccaggcggcaggtagctgagaaagacatcggatccagggggagcagcagagaaagcaaacaaacagggctttgtgtggctgcagattggcggctcagaagggaagccaggcctgtggtagggggaagggagaggaaggaacgggagaccaggccattgctctgggccagagatcggcggctggaccagcccgggctgggcggccgggaagtagcgagtgccactacgtgtggacaggcatctggagtcacagcctggccgagtcccagctctgccacttcactccttaacagatctgggcttgtttgcccacctaatctgggcagtcattcacacgtaggactcgctggcttaggaggagagtcacctgtcctggcccagtcagtgtctgctctcatcctacccttgtcccgtcattgctggcaggacacagaatcaaagggattcagggtctcctgggagctgctagccttgccgggtctcctgggagggcagcgacttctgcttagatctgtgggcactttggagtctttgaccggggaggcagccgtgctgaggggaaacgggttctctgcccaataacggatgcctggggtgtaggtgggcagaggctggcatcaggcctgaggaaccaaactgccccctcctcgtcgcggtggagacgcacgaggtgcggggaggaacatagccaggaagacgggccttcctgtggggagggaggggcatcttttctggggtgtgagtcacattctggatcccagcgagggcagcccccaacctggcccacctctcagagggctgggagggcccgggcctcgaggaaaggcataggtaggagctgtcaggccagacgcccgggcagctccacgctcgcctccgaggccatttcctttcctctctccccgacctcgagaaggggcggcgagagggcaaatgcccgcgcttcctgccggtcccgcccctccccgcccgcggcgcccaccatcttggccgcgccggagcctcctccgcggtggcgtcccacaggccgcggtcggggcccgcgacgccgacgccgggagggggcccgggaccttcggggcgctgaggccaggcggggggcgaggcggggcgggccgctcgcgtcgccatggcagcgcccggcccggcatgcttcgcggggccgcggggcggggcggggtgctgaggccccgccccctggcggatcccgggtctttttccgggaacgcgggggcttccagtcccagcgttgcggccggcgcttgcgggttaccgggccaggcggcgcgcatctctgggcctcgttctcccactccctggatgtttggggataatgaaagagagtctgtgcgggttagcctcgggacgggctctgcttaccgagcccggcaaccccacggcaggggcctcgggaagccgcttccgagggccaggataatggggagactggacccctaccgcttgggggctattaaaagtggaggccaggcggcctctcagctgcagtctctgggtctcgagctcttccccggaactgtccatgggtcagtgaggacctaccctttgccctagggcaggagaaagaagggggccgggactgcacacctcacccggtccaggcctggaccctgcaacctcggccggcctccctccagcccaggagcacaggcctcccctagttggcagtcgttggactgtctggctgggaggcacattcctacctcctgagctcgggcaccccgcctgccctgggggagcctcttccagaactttgctgccaacactgccctgtccccacccggccttctcgtgccctaagtccctagttactactccacagccgccttctttcccctggtctttctctctctctttttttttttttgagctagagtctccctttgtcgcccaggctgtagtgcagtggcgtaatctccgctcactgcaacctccggttcccaagttcaagcgattctcctgcctcagcctcccgagtag

SEQ ID NO: 64432 - DNA, 747 bp, Homo sapiens
tgcctcatttgagacagagccctctgggaagcctgtgcattctgtaggtggggacctttggggccattttttccagaggcccagagagggccgtcttcttgcccaaggtcacacagcaagttcatggcataagctagccagcctcgtactccagagctctcctgagggcccccatgtgtctgtgcgggggtgttgatggggggcaggtgggagggaggaggtaaggctgatttgtttcccagcctcctccccctcccctgctcccttctctccctcacacggtttgtttggagaatgactcacaggaatgcagcaaaatcctgatggatgggaaggcagggccgcagtacccggaaaacctctccagggtagggaggcggggctgagccttggggcctgagaggctggtgataggggagccctgcatgcaggtggggcgactgaggccctggaagaactctggtcacgtcctggctgggggttgtccctcctcgacagaaacacacaggccctggctgccgcagcacccctggagcacccgtcccccatgatttccatctttgtgtccccgaggcatctggtgcactgtagctgacaaacacatgcattttggcactgagtgtgacccaagtcagaccctcctgtgtgtgccctgtcccccaggtcctcccagctccccggagttggggggcgggtgcttgccattcagtcctttcagaggcagccaagggcctacggcatgctgga

SEQ ID NO: 64433 - DNA, 1325 bp, Homo sapiens
tctggggtcgcctgggtctggggcttaggcggggggcccacactgggggcggggcctatggactgtgaagtccgaggtcgtcggtaactggcgggcgggcgtcttttgcagaggctgccgtagtaatccaccccaacggccggaggagccgccggagcccgcctgcccgcccgccgccgaaggagaggagccgcctgcgcagcccccgggcctttgagctgctcccagcgctggtccagagccgatccttgatccgggtcccggatcgtggatccggccgcctagggctcagacttgcggccccgggttgggaggaaaacccgttccggagccgcctgctcccggaaccggacggcacagggcgttcttgcccaccccaggggccaggcttgcggagggggagcccgcggagcggccagactccccggggcgctcagcctccggcgagggtgggagacggctttgtcctggggacactttccctctggaatctcaagacgacgtggcacacattccacgtgggtgctgccgccaccccagtcggtcgtggcgtgcagctgggagccctgggcttgggggtgggggtcgaaacagtactggaagaggcggagggcggctcctagctccgtggactaggcgggggagaaaggaagcctttctgagagcgggctaggccggcactggagaggccggagcctttggaacaaaccgtgcggaacgcgtccaggggccttcccgcccagcctttgccagatctctcgtgcggttcgggcaaagccggggtagacctgggctatgctcagttaggggttgcgggatccccgagtgtgggcgggactgggacaccctttggcctctgtttgtcccctttccagtcctccaccccacccctggagcccagcctgggagcgcaaaacccaagaagcggccagaacgcacctccggctccggcggacgcgcgaccgttgtgcaccaccagggaccgccgcgcctactctgcacgggagcagggacagcgctagatttcgtgtacaaaacctgtgtacccctctatatatatgttacatagaatgtatatatgttgggaacatgctcgcttctcccgtgtgtcgccgccgtgcgtcgtgcgcccgcaacagagccccaaccgggcctttgccgggtaaggggctaccgcgacgccacttgtccacgcagccaccaccggcccgggccagtccctgccagtccgtccgcctgtccgtccgtgtcctcagctctgtccacgcttcgataggcctgacgcagcccccagcccagggccgccctagcaacttcctgtacat

SEQ ID NO: 64434 - DNA, 1475 bp, Homo sapiens
agctgtgactgtcagtagctgctgggggaccacactctggacctgggtgtgcaaggagacgggcgggacccctggcggggaagccagtggcaggccaggcagcggctgctgggtgttcccgggagggcttcctgcagaaataaagcatggggctgcagacacagacctccctctcccactttcaacctgctcttcaggtctctatcaccgactggccttggatgagtcattgccccatgtggcttcctatggacagtccctgcctgggctctgatgcaaatgcactggcttcaagccaggcctccagtgcgaggttgcgcctaccccggcaacaagcacaccaggactgctagtaacagggcatctcaagcagccgagtggagccccagtttctaaagcctgcacagacctctactcacatcacagcagaagcttcttcctgtgctcctggaagccccaccccgggtgtcccctcccgccacacatcccccttacctgtagagaagcctcccggagggctggggtagcctaacacaggggtggagctgaactgcggtggggctggggctgggaagctctgtggcaggagggcccctggcaggggctgtggggtgggggtctgcaggatgctcagtggcactgactcttccttgataccaggcccaggggagaaagcgggcatggacgggtacatcttcaatggagtgggtgcaggctggggaggggacaggggtgagggcgctgcctgcggcccgctcaggaaggcttcaagagaggagctcaatgtggcaggaggtggagacaagctgcctggggagctggtatcggggctggcagggtctgtgccccctgccccactcccagcatagggtgggtcaaataggccagggaagtcactgtcttggttgttgataagctgaagcatgtctgtgaaaaggagaagagggtgcgtgagtgaggcagagactgacccccaaacagggcatcacacacatccaaacacaaccttatttgcacaacccttgttggcacacagctgtatgtgtgggcaatgccaccaggacagaaagccacccacaggagctggtgttcccggacatacagccattttgcgagcacctgtgctgtctaaagcaatgcctgctgctgcgagtgcatcacaatacctggacaaggtgggcaccacaaggctcacaatcttgccccacagctaggctggggctgagcccagggtcgggcccaagactgcagacttcagagcctgagctcttcccaccatccggtatttgcccaaacatctagaaacatccttagtccacagcaaacagcaggctcacattcattcactcatccagtgagcatgtgctgagtgctgagtgcccacactatgccaggcactgctcccggctgtgaataagggaaatccctgcctagaactaagcaactttctggggagctgggagtgtcctgtagct

SEQ ID NO: 64435 - DNA, 2940 bp, Homo sapiens
ccctcctccctgcttcctcctggtcctgtcccaaagcgggtgcagagaatgtagagaagaccaccctctccctccaaaccctcttaggtcgggatgctgcttttgggtctctaagcaaacccttcccccttgagttgcaggggacactaatttggttggaggtagccctccacttccccagcgagctggtaactgtcacaccttctccctcgggaaggggctctttcctgctcaagttgcgtagcccgcatgcccgcccaccccaggagaacctgcaggagacggaggcattgtataaagggctggtggggaggcctccaaaaataccttcgaaagtgcaatccatggctccgcgatctgcgcccgcccttggggcgtccaggccgttggccctacccctccccgcgccgacttcacctgtcaaggcgcggcggatttttgaagccgttgagcgctgcggcgcgcccgccccgccccgccccgcccccagccccgccccagccccgccccgcctgcaggtcccgccccgccccgcccttcggggctgcgggccgggcatggggtgagcgcgcgcggccaatcagcggccgcgctgccgcctcgctagggcccggccccggcccccgccccacctccccacggcggcgggggctcgagtttcaccccgcggcgctgaatggggttggggttactagcggacgtccgcctttaacccgctcggtgccagcgtctgccggggttactggcggtcactggccctcagctcccgcccccttcgttaaagggtcaaagcagagaagtcctggcccaacacaccagaactctgtgttcgaaatcactggttcgctggcaccctgagcgagccttaaccgctccaaccctccgtttactcctccagaaaacaggacagtcattatctccctggcgtcgaatggtagaagggagataatatgggtgcagcacttagtacgcaagaagcgtttaattaaggccaagggctgccgagtggcagctgcggtgggtgcagggacctcccccttctagggcagccccaggaaggggccacccctcaccacagcggggctgatggtctgggatgaggccactcctgaaaacaggtcacttccgggaaactgaggcctggaaataagggtttcctgactgccagcaccgatgtccctctgccagatgggtgaagtctgcccctccccctcaaggcctcacaacccagcagtcaccaagtgagtcccgacccactattcattgtagggccctgggaagccaggaagggctgcagtccctaggacagaagatgggtaaggaaggggtgacaggctctagggttcttttgaggaggtgcctgggcctgtcttccctcttttgtcaaaggtaaaagttacacacacacacacacacaaagtgatcagagcctggccagttgattttgcagccaagtagaccaccagcaaagcctgcctctgccccaaactgcaggccagcgcctctgcctggtccacaccccagttggctgcaacctgagagggtgcctgaaccctgggcagacccagcgactcagcagtccattgggggctggggtccctgcggcctcaaccttgctctctattcaggaccctaagcaagaaaacccagccatgtctctctcgcaacctgtcctcgccaccgccgtccagcccaggcccttatttcccagctttgggaggttcaaggacaacagacggcctctctagcatggcccaaccctcccctcagcccgcgggtgttccctcacccccaaaacaaaacacagcattgctcttggcaaaggctctgacatgagtgacttaagacagggaagcgtccttgacccaaaagcacactgagagctgaactccaggcatgagttccccatggcctcccagcctggttctttcattactttgctccccagtttctgagcctagaatgtggtgagaccaacaagcagatactagcctgagacagcagggccagggccactgtgaacagtcaagcctgtcccctccccttacccatcttggctttaccacatattcctgcctcttattgtgtctttatttgtctcatcttcctgctctaaccccctcccatcccactgaggaagcgcgatgggagagggcggttgctctctgagccccaggggcagcagagtcattaaagactctgatgggggtggggcggggggggccttccaagaggagggggtgtgacctgggaacagagggctggcccttgggcagagggcacagactaagctaagatgccccgaggaagggggaagggcctgggtgccactggccatggccagcctctgaaactcaaggcctggccaaaccctggctcactctcccctggggctgatctactggccaatttcttttttttttttttttttttttgagacagagtctggctctgtcacccaggctggagtgcagtgacacgatctcagctcactgcaacctctacctcccgggttcaagtgactctcctgcctcagcctcctgagtagctgggattacaggtgtgcgccaccacacctgtaatgaaatgtaatttttgtatttttagtagagacagggtttcaccacgttggccaggctggtctcgaactcctgacctcaggtgatcctcccacctcggcctcccaatgtgttgcgattacaggcatgagtcaccgtgccaatttctgtggaagctggtcaccaggttaagactgaaaaaggaaactctagagccagccctgcagcctccctcagagacacacccaagtgggctatctggggctgcatgccaggccctgctcttcctttagcccctcccttgctgtgtgatggggacagtccactccccaccctctgagctcccacacctacgatctccagaggtgggaattctgggaaa

SEQ ID NO: 64436 - DNA, 1681 bp, Homo sapiens
gcatcaattatcttccatggaagccaaggatagggtgcttgttccccatggcggggggtgctccccactggcctagtcagccccatcctgtctctcaccaactccagaccaccacatggtagatgctcagaacttggaaccatagcctggtacatcctagaaacttccagcacaggctccttgggtaattgctgctaacatttgttgagctaaacctatcgcgtgccaggtactggttaggtgctctaaatggtgatttgtttgttttctctaaaacaaacagggccttgctatgttgcccaggctggtcttgaactcctggtctcaagcaatcctccaacctcagcctctaaagtcaataagattataggcgtgagccactgcatctggctaaatggtgataataataacactaactggcattggttcagggcctactatgtgccatgcactgcttaagccttcactcatcggatccccacaattccaagaagctgcttttagtactgctccctttacattgttaagaacctgaaggttcttggacttgtccaaggtcatacagtagggctgcttgttaagacccctgatcccagccttctagctgcagggagcacagggaccccagagcctggcaggggcagcatgcagaggcaaggcctgctgggagacaggtgcagggacggggagtcagttaggaaaggagctcaaacagggttcggggtaggccacaaattccccctagggggatggacccccagccccgtcccacctcccacaagccccaacccagcaggggacccacacctggagccagtctcaatggctccctgacctctcacccctgagccagttaaggctttccccacctcacccccgacacacacagccgcccctgtggagcacatggtgcaggctgtcacacactgtcagtgcccagggtcaaaaggcatgtccacatggcccgtggctgctaggagacaaggtcagaggcacttcctctggccggcctgggctccacctgtcagcaggcaaagtccagatcccaggcctctgctggcagtgactcctgcctggagctgaccgggtcactcaggatgtttgtgtccagctaggtgaatgttgggcagaaggtaactcccaacccggctgagacaagggaactttatcttggagcactagggagccatgaatggttggagaccaggggagttctgtgctgtaagctagggcagtaactagtctagagctgtgttttctaaggagtgccagtgcttggtggaactagggagagaactggggcatgagatatcctggggagaggtatggggtggcagagcgggcccccattgtgccctaccagggctggcctggacccagcaaacagccagacacatgactagaagcaaggccctgttgtggctgggctgggcatgctgggagggacatcagggcgggagaactctgagaacgcactgctcggggcaaggtgacacccagaagggctttctgggaagcagcctctgacggggcttggcagacatctggggtccgacagacaaagagcagacatgacggggtccaggcataggaaagagaccccgaggccctgttccaggctcttggccagaactctgtttccgtctgcctcttctgcactcataagcttgtgcaaaattgg

SEQ ID NO: 64437 - DNA, 3851 bp, Homo sapiens
tcccagctacttgggagactaaggcaggagaatggcgtgaacccaggaggaggagcttgcagtgagccaaaattgcgccactgcagaaaacaaacaaacaaacaaacaaaggtctgtatcagacctgtggcccagaacgggttctgttgtccaacttgcccatgaagggagggtttgcatcatttttctggaggtggaaactaaggtttagagggtgagagggcttgagcaggatgacaaaggaagtgaggagtgtccaggttcaagttctgaccccaaagcgcatgtcctcctggcttggtcacgttgcctcttgggactacactcactgggcccagtgatgtggaactggtagttgagtcaggcccagatctccctagggcttgggatttcagggttcatcactccagagggcagtgaaggacaacccctcgtgccagggataggggaggctgttttggaaaagcctcacaatcagggcctctcctctggggtcctcccctagcccagccccagggggaaggagggagggctgggaagcttctggggctggcaaccagctgggctcatctgcaaggctgcagtagggcaggagtggtggtggcatagatatatctgttttgccaaccccagggtggccacgggttccatggacatgtccattcaggctgtgagtctaggcatcttgttcctgcgaccttggcctcagtttcctcatcaaccaagtgcaacttagctagtgctgctaaaactcctgcacagaaaccatgcaggcaatttgctaggggcttccgtttgctctatctacaaaatggaagcaacgggcctcctaattggcacttggtgccaccattggccccaaaccccttctcatcacagccagggtgatgctccaaagatggaagccggtgccactgttctgctccgccctttccctggccgaccaagtcggtttgcgtcctcctcctccctgacctcactcctttgcaagcctctaactcctcacacttaggccctgcctcgaggcctttgcccttcccttgccgtggcctggaaaacatctttccttgctggtcctgggggtgaccctcaggtctcagcttagaagtccctgaccgctctacccaaagtagccacatccctgccctcccccagcctcgctccacccaaggtacaactaaatacccgtttggtttcccgggagatttttgtgttccctaaaagagggggtacccaggtctgtctgtaaaccctcggtgcctaagacggggcctggcattcggtggatgtcagtgaatgagtgcggaggctgtgcccgtcgcagaccgggagaacccgacacgaggcgggggaagggcgcgaggcagcgcccatgcgcatgcgcaagagctccgacgccgagctgaactctcgggccggagggaatgaccgtgagtaacctcgcaattacgtcacggctggggctggggcggagcttcggcgacgcctgggtccccagcttcagccgtggccatcacagggctggagagtcaccggtcgggcggcacccggcctgggacgcgtagaggcgcacgtgtcccggcccggagccgccaagggaccccggcccggcccaggagccctcacccacaagcgcgcggcccgagacgctagcgcgggaaccagggaggctcggtgaggctcgggacaccgagctcagagacaccgggaagtcccgcgcgagcacagcacggagctggcgcccgtgggggagacaaaggccagggagacacctgcgcgccccctactcgcgccacccggcgcagcttcaagccctgcccgccctgacgcaccttcgatgtcggtcagcagcgccgcgtccagatcgcacggctcgcccagcgcctgctccaaagccgcctcgctgaagggtggctcgtccatggcgcagccgcctcctccgggaggcccgccgggcccgccgcctcgtacggcccttcctagggagcgccgccgcggccccggctctcagtcgccgccgccgctccgcgcgttcgtgtcctgccctggcctcagaggcggcccggcgccggcgaaaagttcctcggaaactgggttcccccggccgcagctctgctgggcggtcgaggcggaggcggggcctttcggggaggacccgccctcccagatagacggccccgccccaccttgagagagcgggggacccctgatccccggtctgcgccacaaatctcccctcagccggcccctcctccagagcgccctccagtcattcattttatccagcctcgcgcacaatggcagcggcctctggccggctgctgcgggaacgcgggcaagccgagccccctctctgggcctctgtttctccagcaccaagcaaggaagccgagtggaagccccaggcctgggcccatcccaaacttcatttcctcatttcctagatttgactctttagaacaagacagaccaggatccaagttataggggtcccaggcctgctgtgttgtgagcaggcctgatgtaactgctgggccagttacatcactctgcctcaattttcctcatttgtaacatgggcctaatgatgctttctcacgggcaggctgggaggctagtgacaatgtggaggggagcatgacctgtgagatcagcctgccccctctctgcaaagaaaccagaagattggcctcttgaggacaggagtggccaaagaaagaggctggaatttcgtcatctggtttcctcccagatccagctgtagggataggataccagtgggcccagtgcagctcctgaaggaggaagccagtacccaaggaagactggccccagggctgtctgaccccagatttggcacttattcccaggagcagccaggataggggccgcaaggaagaggtagctgtgctttagatcagagccaggctgccctggatcatcacaagctgggactagatcagagcaggcagccctgttgagaagagggctggaaaccgaacctggttctgtggcctagggacagagccaggtggggcaggaaggagggaaggggtcccaatgaggtgggttgaaataaaccagaattaacattcaggaatctgaatgtgataaggcagtgagctccctgtccccagaggtatgcaagcagagagaagcacccttggtggagggcagtccaggaaactcatcaggggcctgggcctcaggccttcccgaccccagaccttcataagtcaagccatcctgcagactgccttgctcaaactccagatatagcctatctggccacgccctaagcaggagtaacattcatgatgcattttagaaggggtgtgtgggggagagaagccacagagcccaagtccctggggctcagcctggacatccagctccctttgttcctctcccagaagtggctgcggtggaaaattacccagaatagcggcgccagaagtcataggggtcgccaaaccacatctccccaagtagccctgctcaagggtccacccaggacccactccctccagatgaacaactgctggagaacacagagaacaaagctggcttctcctcagtgccccacccccaccaacactctagaggctgcaggaagctggtgacttccctgaaaatttaaacagcccttcccagggagggggtgggataggaagtgctgggtgaagcctaaataccattttcttcagagctaggcaggtgatctgggttttcacctgcttgctgtgtgacctggatccaatacctcacttctgagtctcagctactgtatctataaaatgggaataaccctttctgcagtccctctgcagaggcagggagggtgttttgga

SEQ ID NO: 64438 - DNA, 2326 bp, Homo sapiens
ttccctcagcctcccgagtagatgggattacagtcatgcactaccacgcccggctaatttttgtatttttagtagagatggggttttgtcatgttggtcagactggtttcgaactcctagcctccagtaatctacccacttcggcttcccaaagtgctcggattacagacgtgagctactgcacccaacccgcctcaccgtttttaaatgggttaccacatatgtaaatagaatagctcaataaatattcactccataactgcaggagttaggggaaagggaaagaaggtaagacaaggtcaacagaagacctgcaccccagaaaatccaacccccatggggcacagtccaacgtgggggtgggaagaatttacatctttgccaccaaagaaacaaatctttgccccacagcctgggattaccagggcaaccctcaacgtgagggtaggggaaaacagaagaggggatccatttttcagggggaacatgcttgtcttggcagtttctctcctcaaagatcctgagacctccaaacaagaccctcgggccccggttggctggggagcgttgagcacgcccaaggaacgtggacacaagcccctctgtaatggtgtgcctatcaggggtcagggatccagcctggtccacggtgaccccggcgggcaggttcggcacagtttacttgctgagcgcttacagagtgttcagtgcggtttaaacccattcactcctctcgacagcctcaggcggttgaggctgttaccatcccattttacagatgagtaaattgaggcacgtggagcgggacggtgaagcgacttgctcaggacctcacagcactgctgcccctggttttgtctggactggaggtagccggagagccggggcggctccgcacgcgcgcgggccagggcagcggctggagacccaggggagccggggcgcagagccagaccagccccgcccccgcgggcccggcgcagccaatgggcgcccggcccggagtggggtgacgcggcgtcagcgcgtaactcccgggagcccagccctgggtcacatgcgccgcgcccgctctacccgggaggtagggaggggcggcggggacaggctgggctcagcccccagtccagacacctggccaggaatgccgccaggtgcgcgtcccgggcaccggaagggctaacacgggacagccccacccgggactgcgtggcgcgcccagagcggaggattccttccaggtcacccagcccggcccctgcccgacctcggcgttgccaactgggagataggaattcgcatctccccgcttcctctccaagcctcttagagactgagaggcagcttctgtgggtttcgagccttttcgggcaggcgtccagcacgggcagggcctcttccaggacgcttgtcctgtccagccatgccctcggtgcccggagctcagccgtggatggcagggcaggcactgggcaggaaaactgggttgtccactctagccattgcctaggctactgaaacccctccccactcccagagcccccctgcccccctgcccccctgcctggccctgcatatccttcactgctgtgggagccaagctgggacctgcccaggttatggcagaggggccaggctgtgggaagagactgctcagagcctgagtctcccctcccccacttctccatctgtatataatggggtcagatgactgttgacatgggtgattctggtcctagatgacgctcgtggtctcattccagcttgggctctgtggtgagctgggcgagttctttccagccctctctgagcctccatggccagctttgcccctggaggctcacacccatgtgggcacctgcaggcttatcatgagtcactgaacacaccctctaccaaagagctacttgaaccccaaagattgctgcacagtgaggggtgtagctcacaaaggctgaggaagactgatacctgttccctggggggtaactggctgtttgaggagaggccaattgcatattgaatggggtgagtctagccggcaacagggagagtgaggaaatcaatgtaataaggcccctgtgggcattgggtttaccacccactacaccagtttaccgatcaggagagtaaagaacagagtgagacagtgacttacccaacacctacagttaagcctgcaaccctagggaggaatggggtggacaggaaatggcaccagacaatggagtccactcaatttccggaagcatcctacttactccctagtgctgagagtagagattttgcgtcctggaatgttgagggcctgggcttggaggccctg

SEQ ID NO: 64439 - DNA, 847 bp, Homo sapiens
ccagagcgagactccatctcaaaaaaagcaatctgcctactgctgggtggaaaacctgctggagtcatcaggacctttgaaaacagggagctagtccaagccacacacacaaagggtgaagggcgggaagtcactcacatctcctgggctcagacccaggcctgggcgctgataatggcaggggtgcagcaggacacaccctggcatggacaaggcaggtcctggacccagagtgagggacaaatgaggtcagcctcataggggcacaacagggctgctcccagtgcaggccagggttggccacgaggaggggatgtcctcaccaggcagtatcctggtaggcccctggctgggctctctaatgcccacgctggggcaggtgggaggacattctaagtaatgggagaatcagagccatgagcactgcattgattttgagtgtcccagtctcaggggttcaggtggcactgcccactcctgtggaaaggcacggcactgaggacccaaggcagccagctggctcttctgcgccctctggtgaccagtgcagagggatgcatgccctcagatccaccaggtgaagaccagcatggatgagggagtgagtcccttcccccaagaaggagcatcccgtggaaaccagcactgctgcctgcctgggcccattggacaggggcttcagaaggctaaaaattgggacccagtaagcaaacagccctttgcaaaccttcctgtccagtggacagatgatcactgccctctctagcccagctgggggacccagacaggagttccagctgttgtcggcagctattccaaggaccctcctcctccctgcccctgcaaa

SEQ ID NO: 64440 - DNA, 1409 bp, Homo sapiens
cttctcctcaggcgctccagctacgctgacagcacagggtgctagagtggcctcagcctctcctcaaatacagccacatacccatgagtctgcaggcaaacagctcacactgccaagcttccctgctgctcttgcttcactatgggaagctacacccaaaagtgctttgcgatgtgcaggaggcaaccgggacataacctgcccacagttatgatcatcctagggctgacaccaccaattatctctcttcctattccccccacctcctaccccaggaatttatacttgaactgggagcagcttctgttggtgggaacatctgggttgtttccatggcctagccagcactctcagctctgtattctctgccccgagcactctggctgccctccagcttgatggagggtcctggggacacattctgattccagcactttctaagcagacagtggtatttctccacatggaaggttggctgttcagtgtggctctgacccttgggagaccctgcctgctggcttttgactgccaggggaagaaggggtgggaagatgtcggcaatggcggaggcgtgcagccaaccagccaggacggctgtgtctgttcacggctgtccacagtgctgcccagctcctgaatctgctgttgctggaaggacagcctcccactggcaccgagagtcattccttttctatttgatttataagatagcagtgagggctgggaggcttggagttggaacaaaacagagggaaggaaaacgtcatgggaagcaacctatttttgaaagctgtgagctgacgccaggagattaggttctgtttgtcttggctgatgggcttgtttaaaaaaaaaaaaaaatcccaaaccccctctccccccaaaacacgaagtattcctgctgtctgggtctgctctggctgtctggaagcatcttggctttgttcaacacaccccctgctgccaggagcacggctctatccagagcaaatcccccctgtcagcaggaattccgacgctgacacagcacaaagctgcctcaagaggccttctcagtttctggactgacctcagaatcctgtgcatctgggtaacgcctggccgaaccttcctgcaggctaggaatggaggccaatgacaatgcattcaagggaagccaggtcccctggagtgtggcacatattcagctggatctgctgagctgaggcaagcctgggctgatgcaggtgtgtcaggagtgaggtctgggaactagggagaggccactcaggactcctcactggggctgggccaagggtacttttctcagcttcaagagcaggctggtgtagttacatggagacaagttgtttcccggtctatttcctgcaaaaagctgcaagctccagggaccacagctcatgcacctc

SEQ ID NO: 64441 - DNA, 1159 bp, Homo sapiens
ggctgaggcaagagaattgcttgaacctgagatgtgaaggttgcagtgagctgagattatgccactgcactccagcctgggtgacagagtaagactccatctcaaaaaaaaaaaaaaaaaagagagaaagaaagaaaaaaagtttaaggagcaaggctactagaagaaaattttaaaacaccctgaatcacctgtttcccattcccagcttgacatatggctgccctgtaggaattcttggcccctgggtcaaagggctgatgagacagacacaaggctccatggggactgggcccaaggccaagtatgtctgcagtacggctgccatttccaaaaggggatgctgatttctgcaaatatgggacttaaccggctctctgctttgaaggctgtttgtggcatgagagctgatgaaattcagtggctactggccaacagcatggactgatttcctctctccaaggctctgccaaaccactgctgtccctgacccacagctgccacacccctcagtcctctcttctgtcctcttgaacttccatggaacaggaaaataggaagagcgcctgagggctgcaatcatttctggctggcagaggaccagcacactcagggctctcctggtgtgggggccacggggtgggaaatcagacagtcagcagcttcctggatgaggtttaaaatgaaaattcatccataggctctgggaagtactggccgagagtgatgggtgagcacaaaagcaagtatttatctctctccccgggggaaaagcttcagagaggaggatcaaagtcatgtcaaaggaaacacaaagtttcaagaagctgcagcagattagatagtgtggagttggaaaccaggagaagagacagaagcatgtgtcaagagccaagatggagcagaaagaaaggatcaggaagaatcagtggcctgtgttgagatggcatcaagccctagcagctttcaggggaaaggtcaggctcctcaggcagtgctcacagcctcgtgatttggcctctgggccatgatcaggctcctcaaagtctccctggaccctagacttataagaactcttccctgatccccaaacaagcctcctgtcatccctccagccacagcctttgtatctttgtccttcagcttcaggactactctc

SEQ ID NO: 64442 - DNA, 2494 bp, Homo sapiens
ggccaggctggtctcaaactcctgacctcaggtgatccacccgcctcagccttcaaagtgctgggattacaggtgtgagccaccgttgcaggcagttcacatcttacataaccactgcacacaggccaaaactaaaaagttaacattggtatagtactattaactgaactccagatgttatttggatttctccagtttttccaataatgccctttttctgctcatgatccgatccagaataccacactgcattttgttttcctctctttgaaaccttctgttttctttaaagaccaataaactctcaaactccccaacttattctcctgtctggagagctcagttctaaaggacagctctgtgtgagccccaattccacaccctggcctcattaggacaccacatcctcccactccccaaacaaaggaacccttcaggccagccaaacaacagagaaaacagaagcttgttagccacacaggcccgaggctgctgacccaagttcttttttaactggaattcccttgaggaggatccacagatttaaaatgcatttggggtgtgctctctagaagcagagccactggtatttgatgtatgccgttctttgtacttaatggaataacttacgtgtgagtcagtgtgtgagagtagctgggggaagaggccaatttagggccaggatggaaattggccatgggggaggaaaggcctctgcaggagccagccaggccccaagatggtgccaggctttggggaagagggggctgtggccagcttgtcccagcctagcaggctgtgctctaatgtcagacaggtgggggtggctgggaggatcaaagtttctctgtgacctggtgatcaggttacagtttctgcttaaagcagagcagataagggaaagtgggggcggggtgggggggtgggattcacctgtcctgtcttcctctcggcctcttcgtgcagtctgctttgctgccaatttcttcttccccagagcgcctcccaggggctgttcccctcgccctcgtgcccaccattcaccaccagcactctcagagaagagaggaggtgtgcctgagaatttcacagtgtgccacactgtcaccagccttttttttgagcttctcccgatgacagagacacatcccagagatgtgaatgccactccttgggaaggattatccaaagacttcccagctcaatttaaaaacttcaactgtgaggcctctccctgccagactgggatggaaagaagtaagatggagcccctacactgaaagcactccccaggaaagacctgcagccagccatccaggacacagggcacagacctgaggctgaacaggggagcagaggggactgtgaaagctaagaaatgggcctggtacaaggaaagagcaggaatttgaagagagaggaacatcataggctatgcaaacagcctcccagggccagggcctcggtgaaggggagcggtgagaggaggccagctctggagtgtcctttcattttctctaaggagtctgggctttccacaggaggcaacatggggcttttcaacaggagtgacaagaatatttatgtctgagacagatcgctctggtaacagcatgggggctgtagtggagtggagagactgcaggcaggaagcagggggcaggttatcacaactgctcagtgagaaaaggagacaggacagcatgttggtcaaggtcatggctttgaatctggggactgggggtcagtcttggctctctctgacctaggacacatttctcacgctctctgaatttcatccataaaacgggcaaaacaattgtacctcctcacagggtgtggttaagatcaaataagttagtgatataagacacgaaacagggaacctggaacatagtgagggcgcaataaatatgaaccacaattcttaacttgtgtattctgtggactgcatctcaggaaagacggaattccagcggggaagcagaaggggagggtgactgtctccaatgcttttattgcagcctccaggtggaatagtgaagtggccaccttaactgcctcctggagtgtgagcagagaggaccaggacaaggctgcaatctgttggccaggcaccaactagcctgtgaggccaaccagggaccgcaggcatcaccaggaacaaggctataaaaaggcctcaaagagtgattacaaaattccacaccaggagaaagactcccagaagtttcccagggctcatacctgctgtgctcattaaagccacagtgttggctgggcgcagtggctcacgcctgtaatcccagcactttggaaggccaaggcaggcggatcgcctgagatcaagagttcaagaccagcctggccaacttgatgaaatcctggtctctactaaacatacaaaaaaattagccaggcgtggtggtgggtgcctgtaatcccagctatttgggaggctgaggcaggagaatcacttgaacccgggaggtgg

SEQ ID NO: 64443 - DNA, 719 bp, Homo sapiens
ggtaactgtgcctgctctaggaggtagcttagaggactggagaaagcagaggatggtgcacctggaagccccaatcctggtcccagggacccagggcaagtcacctcctccctgggtctctatgggatccaatgcaaagctgaattatacaccttattataccatctctaaagtccaccaatgatgccatcatgctccaagagccattaggacataaggaacgaggtcacaagtgatgaaatacagttggcaaatcaacctaaaaatattcaacctcagcaggaattacagaaatgaaaatttaagtgaaatgcacttccacctatcaatttagcaaattctgaggaatgactcacactggtggtgcctgccttgtgcaacagtctgaactggtctcccagaagggaggtcttcccctcctatcctacccagtccatcctccacccagcagctagtggcttttctggaatgcaaatctcatcatgtcactggcctgcatttatagctcctttacggtttcccactgctgttaggacaaagtctacattctgtcacttggcctcgcttgctcctgccctgtcttcctctgcagcccatctctctccaccctcccttcggcctctggccttagctcccccaggcgtgtgcccttcagcagctctgggttttcacacattctgttctctctgcctggatatctaggacagtctctccccacc

SEQ ID NO: 64444 - DNA, 1290 bp, Homo sapiens
tctagcagcaaaaggaagggctgagccttgatgggcagggaagcctggggcatctccgagtccaagttgggcctcaggggtgcctcctggcagagtggcactggcgcgcccgtgaggtggcaccagtgcccgggaggaggcccgaggacacagatgccctgcctgcccgtgggatagcaccggcacccggcgaaggcccagcccccccgggaggtggcaccggcgcccggcgaacgcccgacgaccaggatgcccaacccgcccgtgaggtggcaccgacgcccagtgaaggccagacgaccaggatgcccagcccgcccgtgaggtggcacaagcgcccggcaaaggcccgacgaccaggatgcccagcccgctcgtggagtggcacccgcggctggcggaggcccagcccgctcgtgaagtggcaccggcgcccggcggaggcccgcggtcctcaccagccggatcagcggccgccgttgcccagcctcctgccccacacgcggccttaccgaggcactgccccactggtgtgctgaacgggttccccaggaggaactccatcttgggtggacaacacgcagcggcccgggccccctgtctgccacctaggcctccgctgtaacccgccggactcccgtcctgactgacacttgccccctccccactctctggaacgccgagcttagggcctttggccccgcccccttgccgcgtctctattgggggacacctacgaagcccgcctcctattggtcgttacacctctgtcagcaaagcccccacccaccccgcagcgtccgattgggcggaggagcgagctaggtcaccggagtccctgtcagccgtggcggcacctcccctggcccgcccccaaaggggaagctgcgcattttgattcctctgtatattggtcaatctaaaggattcttactattattggacaaaagacgagtcaatcacgcaaatggacggaacagaggtgaatctaggaatatccccgcccatagaaagtactgattggagaaacatttgttttctctacggctggttggtgtaaggagtgtttcaccacacggagatgtggtcacgtgacttgtcaactttcacccaggatgtctcccttctgacttccccttagcaaccaagtcgcggcgcttggttccccagcaaccgggagacgcgtctgctgcgtggaaccgccgagttcccagcgcttgagaaggtgagacctgggagctgaggctcccggaggacttgcagggacagatagtgcccgacgtaactctt

SEQ ID NO: 64445 - DNA, 560 bp, Homo sapiens
caaacagaatgaaccagctgtgtagctggcgtgggtggtcctcacaggccacaggggccaggcacttccgtgatatcaggaacctgcctcgttcttgcatggatgacttatctcatcccctacgtatggacatttgggagcttttctgccccttacgtgcctgagggattcctttggacatatatacagtgtggagatagattccatgtagagaaattatagttcaaagggcactgactttaaatatttcaaaaaacattgccaaacagtgctccaaaaaggctgaatgaggcaatcaaccctcctaccaacagagacacatgttttcattctatttatcacactgtggaaggaaggcctctgtctgtgtcctgtgtcctaaggtggaccagcctcctggagagtccctggcctggccccagaaacagcacaagcgagtctcctgcccagccaggtccagctcacttccaccccagcaactttttagctccaccctagtaaacctattaggtctttctgtggctctgggtggcagtaccgatccccgcccacctcatagg

SEQ ID NO: 64446 - DNA, 3145 bp, Homo sapiens
tcagaggtggaggtgtcaatttctatttaggagagaaggctgcagatggcagaggttgtggtaggagggaaagtcaggaaacctgcagcagaagtgcccgggatggaggaatgaaggcccaggttctaggtcccttctgggcaggtcttgtgttgggcagtggagacacggaaaacagtcagacagacaccacaaacctctgagagagtctgcctgtaacccagacgaagtcctgattcagagcccaaacttccccttttgaaaacaaagatgacacctgctttccttattaaagggagggcagccataagctttgagaaaacctgcacaggccaaatatcaattactgtatcgtgcgtgactcgctgttccctctcgggtcgtctgcccttgtctgggcttcactttctcatctgtaaaaagacctgactggcctgcataacctcatgagcctgaaccctgcctcagttacttcgctttgcacagccgaagcccgaagcccaccttaccccagctcggccccaacccaaaagaacatgtcatggtcttacctgtcggcggggcgtaagcccgggctggagacgggatggttggccccggactcatagaagcgctggggccacccgccggccgattcaggagacggcgtcccccgtcccgcagccggaggcagctcctccacatcgcgcccgagggtctgggaagatgcgagacgcgaaacctggagcaggaaacacagagcgatgggatccccaaagccgcacggtcgggctgtacggaaacctctcaacgcctcctcagagccctcaacctcccttggacgccgccatcttccgcatgacacctacggcgcgccgtcgccgccgcgcgcctcctgcgcacacccccagtcaatcagcatcacaaacgcacctcgccccgccccctccacgccgcgcctcggcgaggagactacaagtcccagcgggccgctcgcgcaccgcgccacgtgttttctcctcccgccaatgggcggaagcgccgcctgagcctgctcccgccccccaggctcgcctgagccaatcggaaggggcggggtgtgtgtgtgtctgtgtgtgtttgtgtgttgtgtgtctgtgagtgtctgtgtgtgtgtatgtgtgcgcgagggcaagtcgggagggggacccagctcaggactgggaggccctgctcgcaggtccctgggtcccggtggcggccggagcgcttgctccgcaggcagcgggcgggtggtcgcccctcccgcccccaccccgcgcgtgcgcgccccggcctctccctccccgccaccctcctcggctcccgcgcggcggcggcggttcctctcccactccccccagccctggctccgggggaccccgcgatgccggtccgcaccgagtgtcccccgccggccggtgcctccgctgcctccgcggcctcactcatcccgccgccgcccatcaacacccagcagcccggcgtggccaccagcctgctctacagcggctccaagttccgcggccaccagaagagcaaggggaactcgtacgacgtagaggtggtgctgcaggtgagcgccgggccgggccggggcccgagggcctcctcgcggcgctcacgggccgtgcccgcttcggctcctcgaccccgcagccgcggaacaggccctcgccgccggggcctcctgcacccggcgcttcccacccgggaccttcccagcctgtgtctcacactctccgagccccagccctgacctgccccttcggacccagagcccgtcgtgaccggctcctggcggaccccgaacactcccagacttgaagcccgtgaccggcccgtctgggatccggaagcccctcatgactcggagaaggcctgggtccttcctccccatgacctgtcgtccctagatcagggactgccaccagcccttttcagaccctgaagaactctccattggtttcaccagacttgggaccctccccatgtctgggcccacgtcagattctctcagacctgagacatgtcctcctgccccttcctcagttccaggaatccgcagaccttggggtcttcctcctcctgagatctccttaggagggcttcatcagacccccagacgggggagcacctaacccgcaactgattggtcaggccctggcctcacctcaagaccaggcactcactccctgagtgctgctcacagtctgttgggatgttgcctcctgggtcccctgttccactcactgcttctgtctcttcatggtccaggcacccagctccttccagcttctccacccccaggcctcctgcccctgctctgggaccatttgcagtcttttcccagtcttcctggcctctatccagacttccccaccccataccttcgtcttgctcgatcctggttccaggggaccctctttcctgttcttaacttttctctacacaggcacagggcttcctcttagtctctggtacccatgtactgggaaatctaactcacccaattttagttcatgtccagtcgcctccccccatttgacctggattcctgaatacctgctgccagtccctgatcagcttcggaagtacagcttcacttgtctgggcctttcccacacctcactcctctcaggcttgacactttttgccagctgaaatggagtggcagtggtgaatactcttttatctcccctccccacaaaactcttcctcctctatacctacccctgcctgactaaggacccctttccccttccctttgccctttttttccttagtctgacacctcatctgccaggctgttcccagaagcccctccaaacacctgtccctctgaaaggcactgtgtgctgccccactgcctcccccccgccccaccccccggggtgtgagggtggaatgtacagtatatttattcctcaagctctccttttggtcatttaaaacaaatcttagtttcacttctgaagagtaggtctcccatccaaaagacaatgagggtgccttttctttctgctaactgcggagcactcatcactcttttattctcatactgctttgtgggaataaatcattttctctgcttacttgaaacagcatcgtcatgttaatcatatctttgggctgtaaagttctatca

SEQ ID NO: 64447 - DNA, 1758 bp, Homo sapiens
ggctggagtgcaatggcgcgcaatctccactcaccgcaacctccgcctcccgggttcaagcaattctcctgcctcagccttcccagtagctgggattataggcgcgcgccaccacgcccggctaattttgtatttttagtagacatgggtttctccatgttggtcaggctggtctcgaactcccaacctcaggtgatccgcccgtctcggccttccaaagtgctgggattacaggcgtgagccaccgcgcccggccaaaacattgagggtttttttggcgatttttttttaagctcatcagctatcgttagtgttggtgtattttacgtgtggcccaagacaattcttccaatgtggcccagagaagccaaaagattggacacctccatttatagtataaaatgaaagccactaggctttcggctcagccccttttccttacactgccagtcagctgcgctcagggacccgcagttcagagttcaacacgggcagattccctctcttccttgcttgctcctgccagccgcagccgtgggccagtacagcatggcccggccccgccccggctctttccagaggtccgcagcctggccggcccagcgggcggaaccgatagtgtctggcacttggctcgcccggactctgaatcctggagcaccaggcgcccacgagaacgctgttctctttggcttccgggcgcacgctactctgtcgccgccgtcagaccggaattgccggtgccgccgccaccgctgtctgtgcgcccacctctgctgctaccatggggatcttagagaagatctcggagatcgagaaggagatcgctcggacacagaagaacaagggtgagggccggccgggcggggccttcctttctgcctgcctcagttttcctgtctgtaaaatgggggaacaactccagcagtaatgctggggcaagatccgaggccgcggagaagttgccagacaagtgccgaggccgccctgcgcgcccaaggcagggccaggcgggagcgggtctcacgcccaggtctgactgcaaacgtaccccaagagatctggtcagtcccagaccgtgtgcccgagtagagtagtcccagctcacagagcaagcatctgacccagagagaggcggagctggggttcaaacctcagtctcctgatggctgggcctggggcctgggtctactctgttgttttgggaagtgcaagaggagacctctcaggaacagcctcacccagcagctgagagcccattggagcaagggaatcaggactctggagtctggaaggcctgggtttgagccccaggtccaccacgtaccttctgtaaaacattggaaagtcacttcatttcttggagtctcagtgtcctcatctgtaaatggggtaatactcccctgctccatcttagtacacagctgagttaaattagatggcctttacaaagcactgggcacatggtgagcactcagtatttaaagtaaacaccccaacatagataatacataatgaagcctcaaatctggactttagaatgtaagggctggaggagctcacagaagagaggtgaggagagaacgatgacaccaggacaaagtgggacttgagctggttgttggaagggtatcccaggtgggggccactgctgagacaaagacatgggagtgagcatggtatgttcatgggacagtgagaacaatctagatcagaagggggttatggaagagtaatgggagatgcaattggccaggc

SEQ ID NO: 64448 - DNA, 1181 bp, Homo sapiens
cggtgtgtgtctgtaatcccagtttcttgggaagctgaggcaggagaattgcttaaacctgggaggcagaggttgccgtgagccaagatcgcaccatcgcactccagcctgagcagcacagcgagactctgtctcaaaaaaaaaagactgaggtcgaattccatcccttctctgccaaaaccctcctcccacggctcctgcctcactggcagtcgaagccaagccctcattgtggcccacaggccctgcacatgtgcccctgaactctgacctcaccacccagtgcacccccactgccctccagccacctggcctgtctgctcctccacctgcttgggactgtgcactgcccacaggctctctccatggccccatagccactaggccttccctgacttcctgtttaatgtcacaaccccacttcttgctgtcccttccacggcacttacgccccattatctgttactgattttccatgtttattggctttctctccacccacatatggtaactgcatgagggcagggtttttctctgttttgttcacagctgtgtcccagcacttagacggtgcctagcatgcagcacacttcccacagaggcttttgaatgaatgggtgagtgagtaaatgctggctcaggacccttagggaaaggggccaggctgactgaggaatccaggttggggtagcggtgggcaagcactggagaggccttggtgcctgttggaggcccagctgggctctggtttgcccagtggcttggtcagggccctccccctccaggcaggagcaggttgtggggttagcacgactatgctcctggctctgcccagtgtcctaagccactctaaacccagtgatgacccaggagctcagcgggcaggagggcctagtaagggaggtagctctggactcggccaggcctgggttctaccttcccaagccaggtggcctcgagcaagtcccttcatcttttgagtctgagtttcctcatccggagaatggatatactaatagctcatatctcacagacctgctgtgagagtcccatgagaccactgtgcaacacacctgactggggcctcactttggaaactggctccaagaggagctggggcagttgttgatatctccaggctcagaaagaatgtctcggctgggcgccgtggctcacatctg

SEQ ID NO: 64449 - DNA, 1326 bp, Homo sapiens
ctccaaaagccctccatccaatttctctggtttccatcaagccccactccccatccctgtgagactgcctgcaccaggcaccaacagcccctggtgcaactcctctgagtggctgggcactgactggctccaggtgaatcttggggaggaggagcaggaagaagaggaaagtgaagagccagagaaagtgagcagggggaagaggcagacagagagggggagacctcacttgctgcatggtcccctctctgctcctgccacttacctgggaaggcctcaccctgtccctgtttcacagctgagcacgttgaggctctgaagccactgatctgagggcgtggagctggcaagtggcagaaccagggccagaaccttgctgctttggggtctcctatgctaaaccttaaacaaccaaagaattagctctgggaccaaaagagtgaaccagagttcagtgagttgaggtccatcttgaggaggaagaggaggaggagagctggttctgaggcttcaggtctcagagctgccactccccacctccgctggcctgcccagtttttcccaccccctacctcttttagtgcaggttctcaaaagtgagttagactggccaccaaccagactttggacatgcagccttaggtcaggccatatgaagcaatcagctatgcccagagaaggcagtaaccacatggccacagcctactcagccagggcagaaagtaagaggagaggacagggctaggcagggaccccagaaaggagccagcaggaggcatctccagttacccagcagctccatcaggtcttgcttccttttggtgaaggagatggggcatagcttatcactcccattcttcagaggaaactgaggcccagagaggacaaggactttcctggacccacacagccagtcagtgacagagcctagggtctgagccaggcctgacccaacctccatttctgcctctctacccctgcccccgccccaacacacacacacacacaagtggagttccactgaaacgcccctccttgccctgccttctgagccggcagcctggctccccaccccatgtattattcagctcctgagagccagccagctcctgttacactgaccgcagcccagcacctgctctgcccattcccctcctcccttgcctaggacctagagggttcaaagttctcctccaagatgacttggtgggctttggccatcccaccctaggccccacttctggcccagtgcaggtgtgctggtgatttagggcaggtggcattccatctctgtggctcaatgtcttcctctgtgaagccgaagtg

SEQ ID NO: 64450 - DNA, 652 bp, Homo sapiens
gtggttcagtttccccatctatcaatgagtcacaggacattagggtgggaaacctctcccatggtccaaagaggaatgcatcatgctggtggggagggggctgggaaagggacaccaggcctgtcttcaggtgcccaccctgttcttatgtacctggtatatgacatagcccctcacatgtctttggtgtgtaacctccctgccccccttcagctgtgcggggaccatgaggtcatgcgggatgaatgttactgccaagttgtgaagcagatcacagacaataccagctccaagcagtgagtgaactggactttaccccaccatcccctcactgtgtccatgctccaggagggaccagttcagcctcccacctcctcaggcctgacccctcctggattatcttcctctcaccctcatcctcactcaatagagcacgttttttggaattacttggtctggaacacaccatttctgctctctgaactttagtgccctcatctgtaaaatgacagtgataatgtgtaagtccagattcttagttgcaagtgacagaaacccaactcaatctggtttagccaaaagggaacttgttgattcagagaagtgaaaagtcagtgagtatgtggcctcaggcatagctggatccaggtgt

SEQ ID NO: 64451 - DNA, 415 bp, Homo sapiens
cagagcacagtgggctccaacatgaggcagccctgaggcctgccctctgcccctcatttctcattgttgtgagatcatacatggtgtgtgtgagggggagggggtgtcaggctaattcttttgccccaaaaccttttccctagtcaagctgaactatgaggctcaggaagggatgatgtggcagagtgaaaacgagggggcccttttggctttcagaatacaactggggcctcccacacagactacaagcggcttcttggaagtagatcatccaggttgagccaaaatgtgaatcacctcttctctaggttgacacagcctctcccataacggacactgcattggaagcttccctgtgttcctccctgactgctcttgagctaggactctcccctctcggagccccggtgaggga

SEQ ID NO: 64452 - DNA, 4183 bp, Homo sapiens
aggcaggaggatcttgtgcccagtagttccaagaccaatttgacaacatggtgaaaccccatctctgctaaaaacagaaaaattagcggggtgtggtggtacacgcctctacatagttccagctactcaggaggctgaggtgtgggaggatgtcttgaacccgggaggtcgagattgcagtcagccaagatcgtgccactgcacttcagcctgggcaacagagactctgtcaaaaaagaacgaggaggaggaggggaagggggagagagagagggagacgggtgataaggaactggcatgggcaacagccatggcaaacagcctgggcaaaggccaggaggtgagacacagtatgtttgtagacctggcttacaggatgaggaccaggctggggctcagtgtacatggaaagagaggagaggaggagccaaggccagaagagtcttgaagaaaagctttgagtgccaaataaagcaggggaactttatcctgggagacatgggagattttccagcagatcccccccgacccccatttgttggagccctccagtgcatcctgcacggctacgcctttttgttttgttttgcagctctgtcgcccaggccggagtgcagtggcgccagctcggctctctgcagcctcaatcccctgggctcaagggatcctcccacctcagcctcctgagtagctaggaccataggcgcgcgccaccacgcccagttcatttttaaaaattttattgtagagatggggttgccatgttggccaggctggtctcaaactcctgggctcaagtgatccgcccgccttggcctcgcaaagtgctgggattacaggcgtgaggccccgcgcccggcaacgcctttgctgactgcttcaaaacttttttgaattgactgtagtcattatctatagcttagccttagccttgcgcccgttcgtttcctggagttttcttccagagtccccgtaggaggtgcccccacgcccatctccagcaccaaggaggctcgacgccaaccccagcgcgcccccacgctcgccgtcaccgggacgtgactcgtgaaacgtccgctccgggcggcggcggcagcggcggcaggctggcttgtaccccgacaacgcgcgtctggcttctgccggacgttcctatctgggttcagaactggggccgggtgctgcaggtcccgcagtctgagaagttttcgcgggtttcagaagtttccttaggcgttctaagggctttactcaggtggagtctccattcaggcacttatttaaccacccatttctcctttaggggtcctcgctgctcgcccagccgctaattaagtgacggacacagtagctaaggagactgcctgattgacacgcatgattaccaaccgacttccggaaactccagtcagggcctgcccggcgcgtggcccacggcccaattaaagaagtggaagcgccaaagggggaggtaacggagcggcctacgttgtggcggttccctggtgaatgcgccctggggttgaggcgtctgcgggcgttcggacgatgccgtgacgcggcacggcgacactgttggcaatatgagcgcacccctgtagagggagcccttcggtcctggaggcggcgcggcgtgaagacaggttgctatttgagagcgttcccttgaagcccctcagagagtgggggaggggcggcggacggcaagcggttcctgtctgcgcttgcgccggcgcctctgccgacccggcctgcacgcacgcgcatgcccgtagcgcgcggagccgcggtggccggcagcactgcgcgtgcgcggtgaggagcccgctaaggagcggcgctggcggacgtcgggctggctgcccgtgacgtcgtgcggagagctttaaagtgcgggccgggccgggcgtccgagggtctggtcgggagtcgggccgcgtctccgcagcagccctccgcggcatgaggcgctgccggcgcccctgccccgcgggacgtggagaaggtggaggaggaagaagccccgttgtcgccaccgttgcatgacccgccgctcctgaggccctaccccacgcccggaccctcgacgccccccgccgggtcccccactcacgcatgggggttcggcgctaaggacccccctccctccgggggccccggggcgcgtccccttagagccatgcccggctgccccgcccgccccggaggaccctagagcagcgtcgtgggggccatggcggccgccagcggctacacggacctgcgtgagaagctcaagtccatgacgtcccgggacaactataaggcgggcagccgggaggccgccgccgctgccgcagccgccgtagccgccgcagccgcagccgccgctgccgccgaaccttaccctgtgtccggggccaagcgcaagtatcaggaggactcggaccccgagcgcagcgactatgaggagcagcagctgcagaaggaggaggaggcgcgcaaggtgaagagcggcatccgccagatgcgcctcttcagccaggacgagtgcgccaagatcgaggcccgcattgacgaggtggtgtcccgcgctgagaagggcctgtacaacgagcacacggtggaccgggccccactgcgcaacaagtacttcttcggcgaaggctacacttacggcgcccagctgcagaagcgcgggcccggccaggagcgcctctacccgccgggcgacgtggacgagatccccgagtgggtgcaccagctggtgatccaaaagctggtggagcaccgcgtcatccccgagggcttcgtcaacagcgccgtcatcaacgactaccagcccggcggctgcatcgtgtctcacgtggaccccatccacatcttcgagcgccccatcgtgtccgtgtccttctttagcgactctgcgctgtgcttcggctgcaagttccagttcaagcctattcgggtgtcggaaccagtgctttccctgccggtgcgcaggggaagcgtgactgtgctcaggtaacccacccgggtggagggggcggccctgcgcctgctgccttagctacccaccctggcccagaaagcagcagcccgtaggagtctgcgttttttacagttctgaccagttcttctgtttgtagattgtagggagcgagagaagggttttgtgtttaagatacctatagcaagaaaatagggaaccgatgtggaaatcctgtccccgaaggcaggtttgacgggatcactgacttggctgagaattcatcgaaagccatcttttcagaaggctgttccctttgatttttttttttcccaccatccatttcttagcataagtccctttgtgattttccggttttccattctggccttccatttacaaatctatgctttaaaattttttttttttttaatttatctaaaagtctttcttgttctgccatttttggattccttaacagagaaagtagtcacaggcaaaggccccagagattatttaattgaagcacattctccattcccaggagggggagtgacttccctggagttgaacagattagtggttgggccaggcatacagagcagcacactcttaaaattcttccctcctggctgcagaagagcccatcagttctttgtaagaacgtgttacttgtagtcaggactgaatacaacagaatacagctggtctcttgactgtttggccttacagttgcgtgagcagcagaacttaggcttttggcctatattcggttcccagatcctgctgagaattagctcagtgccctggcccccagaggagattgccattgggaacacctttgctgtttatgtgaagtgaaaatttatttggaagcggcctccttccagtcctgaaaaaggtaaacctagtaatgtaattcagtaatacccaaaacatcttaggtttagaccgcagctgttctcagagcagcttggttgaccaccaccaaatacaaggttgaggacacactgggcttttgtcgtgagcagcccaggttctgaagtgagtcagtagggccaaagtcatgaggagaagcagggtccctggagccttcttgatatgagattaggtcatctgtttcatttgagtctaacagctgaggctgcttccatgttggggatggcagcagagccttgtaatgtccaagacgtcctggtgggaaggtgggaagtc

SEQ ID NO: 64453 - DNA, 1312 bp, Homo sapiens
aacatggtgaaaccctgtccctactaaaaatacaaaaattagctgggcatggtggcgtgcacctgtagtcccagctactcatgaggctgaggcaggagaattgcctgaacctgggaggtggaggtgcagtgaaccaagatcgtgccactgcactccagcctggagacagagcaagattgtcttttaaaaaaaaaaaaaaaaaaaagagtttaaatagggacaaggtcttactttgttgcccaggttggtctgaaactcctggcttttaagtaatccttctaccttggcctcccaaagtgctgggattacaggtgtgagccactgtgcctggccccacctgtgctttagaggccatcacagagtagtaggtagtagctttgtgactcaagctagtgatttgctctgggatttagctttgctctccagtccctacagggagaataattcaccccagcagcttctctggaggacctaggataggatcaactccctcccttcccttcggttcacactttagtgctacagccatcctttgttgtgacctcccttgtccctgctttgtcctgacacggtaggtggccgctctgggtatcacggtcaacctcacatgcccgaggtcacatgcccgaggtgctttgctctgacctttgaatactgactcatctgtaaggcaggtcttcattcctgttgccacctgaggaggcctgggtccagaccttactgctagaactgagcctcctgaatccagatttgtgactctctgctaaaccctgaggacctggcctacgccatgagagttggttgccttttaacaggggcatgttctgaagttaagctactggtgggcactgggcttggagtcaagctctagcctggcatcctgcagcttggtgaatttttggaagtgtagggagggcaggagcttctccagctgttatgagatgtacttataacagtcccaggggatgtgtcaagagctctcatcttggtggctctgcttttctcctaccatccatcattcacccgaagaaacaactccagagtgcccccactagggcttcactggggcttttggggcacacaggggccttccttccctgaacatgggctccctggcacctatagagtcttagctttatgggtaccagaggagggactttcttcaatgaggcccttagagtcctttaagtcaagtataaaggctaacattttatttagtctgatttctgccacctggacctctcaacttgatgacacgaagcctggtaaagaaaaggtcattgggccaggcgtggtggctcacgcctttaat

SEQ ID NO: 64454 - DNA, 910 bp, Homo sapiens
gcgcgtccgtcgcgcccggcgcccacccccgtgcaggcccggccccgcgcgcccgcgcccgggccgcctggcgccccgcccgcgccttaggacccgcggggccgcgcggcgcatcctgcgggcggcggcggcgggcgaggcgcctgcagccgggcgcaagatgatgaagtttcggttccggcggcagggcgccgacccgcagcgcgagaagctcaagcaggagcttttcgccttcaacaaggtgcggcggcggcccgggcccgggctcgggcgggagggggcgggacgggggcctgggctgggggcccggggtcggagccacgtcgggcccggggggcgggggctggcatgcagcgcggcgcggggcggggccgggccgggccgcgcaccccctcggcgggccccgctctggctcggactctgggtgggtctgggtctccggccgactttccgtgtctgctccccgagtctctgcgggccgctctggccctggctctgccagtctgtgtgtgtgggggtctgtctctgagactctttgcctgtctctgggtctctgtccctctttctccgccgctgaccggctgtctcgccccagttgtgcctgtgtgtgtggtgggggtgtctctgcctctgccccttcctatctctgcctgtctccctttatctctctgcctctcatttctcttgctgcctgtgcgtctctgagtcttctttgcctgtctctccctgcgtgtctctctctctgtctctgtggagtctctcgacctctgtcgctcacttctgtctctttatcctttttcttaggggctccattgcgtccctgctcggcccttgggacagccctggggcccggtttgttttgtgctttggcacccaggagggtgagagagttagtgggggcgaggcagct

SEQ ID NO: 64455 - DNA, 2205 bp, Homo sapiens
ttcacccatagaatgggaattttaagcccccccgtgacaaaagtgttggcctaagatttgtctctcctactggattctgggccccaggagggccaggacaaaactggcttgtttcaggtgaaagcccagcatccggctctgtggttagctcggctcaaattccttcacctagcattccacactctgactggctgcctggggtgggggatcccccttccaagcctttgcaaaggcgccacctgtgccctcatcctgccatcagcacactggcaactcacggccagggtcaaacccttgcttgcggagaccgtggctccccaccctgcagggcaggccagcatcactgcactcccctggtgtgtgaacgcccacctcggcacctccagcccttgtggcaccaagtctggggcagtaggtgccttcagtgcctgcggctgatattcctttccccctagcgccacattcccagctggtgactcggactctcccagttcagcaaagaggaacggggaccccaggttagggtggtggggatggggtcagggaaaagtggtgtagccacttgtacttggggtcaaaggtgtgtacacaggcaggtaaacgcaggaaaaacctgcctcctcggccccagccccagaccaacaacccaggccgaccctgccagtcacccaccctgaaggtgaggctgaccctccagccagctctccctccctctctttctctgcttcccctttggtcaggcaatgcctgtctcattcttgagtcctggaaccaccccgccgccccacccactggctgcggagggctgggctccggtcccttttctctcagtccagcagctgctcagacaactgccacccagcacctggcacaccggcctgacacactctccacaccaacaaatctcactatactccttgcgtccaaggaggagacttttaagccccttcaccggctgagaaagcctaggctctgagaggggaagtgatctgagaggcccaggatcacacagtatggcgggtggcggtggcggggagagggcagtgatgagtcggctccacacccgcccctgggcagccgggcagccatccctgagtcagggcctggcttgggcgtgtgacctcagaggggcggggaggctcgcccgatccccaggccaccatccagcctagaccgagaacacggacgcggggtgggggctcccggccgggcccccggcgggactccgagcccaagcgtccgtccccggcctgcccagcctcggtctccccgtacaggcactgggcggaggcctcggaggtccattcctggccaggggagagccccaccccgccccggccgcagtccctgggacacgcagggcctggagccgagcgggacaggaagcggaggccaagcgggccgggcggaagagaaggcctgcagggaggcccggcacgcgcccggcccggctcaccttgaagtcgttgccgctgaggtccacgccacgcacgaacggcagcaccccggtggcctccatggcgccgctctcgctgccgggccgcgccgggctagggagcgccggggcgagggcgctggggggagccgcgggctgggccagcgccggccccgcccctttaacccgcccgcgcccgccgcattccgcggggaagtgtaggctttaggcctcttagggcctcagtttccccgtctgttcgaagactgcggaggcaccaaggagtgcgggccccccctgtgctggagttggaggcttccacgatctccaggcttaagtcccagcgccccagggcaggggccgtaacggccgctggtcgaggcaccgtcacctgcgctgctgcagcacatgaagctggccctgacctcagagagattctaaacctcggccccggggcgcagaggcccaggaagtgcctgtacttggctgaccggtggtagtgagacacctggatcctcgggtcctagctctcctgcttctggacttagtttcctcatgtgttgtttttgttttgttgagacagggtcttcttgctctgctgcccaggctggagtgcagtggtgtgatcatagctcactgcagcctcgaactcctgggctcagcctcccgactacctgggattataggcgcaggccaccacacctggctaaatttatttattttatttattttttattttttttgagacagagtctcgctctgtcgcccag

SEQ ID NO: 64456 - DNA, 1948 bp, Homo sapiens
accggaggctcacattacaacgcacagacgtcctggagggtcgcctgtcacgtcacctgttcgcggtctcggaatgcagccctgcacctttaaatccagactgcgtcagggagtcccgccccagagggagtgcggctgtcggctggggggcgggacctgcccttcattggctgaaccgcgcagtattttggcacctgtgcgctggactcgagcgctccgattggagttagggcctgcttgtctgcgtgctgcgaagtccgcggctgcccccggggccctagtcgttgggttccagggtccttcacgttccattcccaggctggtctgagctccggggccgtggtcccgctgcctcctccggtcgtcgtgcggaagctgcgacgcaggtacagctggagcgcggcggggcggcccccagggtcaccgggctcggggcttggcgcgcgacggaacgcagatcgggggcgtggcccgcgatcaccgctggggaaggcggggaggggacctttgggggaccaagggcagcgttcgaatcctagcccagcccccttcccctctcggtctcttggtttatcctgcgaacggggcgtcacccgcccacctagggctgctgcgcggcctgctccgcccgggcccagggcaggcaggtttggcggaggagggaaggccaaacggcctccagggccccgctgcgcaaacttgggttattttcagccacccgtgccctttcctgcttctcggagctggaaggctgtggactgaggcctgcgcgaccccgccagagatggggctgagtcccaatttagacaggttgggagtatttaaagcgctttacagtttgcaaagtagattcctggtctctctgggggcgggtggcagtattgatccccgagtcaccgatgaggagattgaaaccggccctggggccgtggcgggtcacccggttggcctgggatcgccccagagaccgtcttatttttagtctggggcgaatgggcgggtgtacggggctgagtcacacagcgcttcaggcttcagctactccaggcatctggtcacctggcaactgggcccctggcacccacactctggcagggcaggtagaagtccttggtgcccgggcaggctgtgacctcatggtcatctgctcaggcctccccgggagagttctgcttggtgtctaactgatgtcctaaggtcccagcccttctcagctcccagggcctgagggcagtgtccccctcgcagaacgtgaggaatgtggactgggccctaggagatctttgcctccacttcccaagtgctggcccccacccagccacacacttcaaggctgcccacatctgcccctcactgctgcctatgccatcttacaggtgagcaaacaggctggggcccaggccttcaccttactttctgtgttgcttggccttccggcagttgagaagcatcacccaccactacctacacattgtcccaagactgagaggcccagagagccccctgtacagaggcactgggcagccctttctgccctgccaaaggggcttcaaccctgacaagcacatctgcattggcctgcctgggcagcttgggccgtcttactctgcccgtgctctgacttggtagctctgcctcttgggctaccctgtcaagatttgggggtaactggtcccagtggtcccccagactggctggggccccaaattgttggtcttctctggactttgggctcttctgaagaggttatcatagagggctgctgtgccctctgggtaggaaccttcagatgaggctgctgctgaggacctgggcacctggcacagggagaatccgtcagactctgtgggcggatgagagtctggaggccttgcagtcatgggttggagaccttaccactcacttgtgagctggcagcctgtagctctgtaacataggggtagtgatg

SEQ ID NO: 64457 - DNA, 1989 bp, Homo sapiens
ctgaatctctagggaaaaacagtaaaatacacacttccccagcctcacacaagacccgaagggcagccagcgcccgaggcgattccgagaatcagacaagtttgggaacctgctaagcgcaagcaaaacaaaaggtttccacgcaaatgagtgagatgtatcaactacgttttaaaatgcactccagtccgagagcagacaggaggccactgcaataatccagacgaggggcagtgaggcctgagaaatgggagataatcgccttcatctcgattcttggcgcccaccacgctgtcccgctcggtgggcctcccttaaggcacgcagctgatcggaacgcgctttcttacccgcctcatgcgaccgtttgacagcaggtcggcgatccccttggccgcgtcgtttttttcggccacacagaggactttccgcacgcctcggagggccatctccatggcggcgcgggaaaaggcacggtcttcgggccgtcgcagccaccggagcgcgtagcgggcgacaggaaagatcatcctcagacctcgcgcccggagccgctccccggctgccggcgcatcctggggaagccagagatgaggctcaaatggcgcccaccgaaagggaaccagagcctcgcttcggtcacgtccccaccagcctgctggcctttggagcttcagtcactgagcctttcccgtgccgcagccgccgcctcagcaccgaatccagtatcttggcgtggaacttccgcccgccttctccagctacttccgccaggcgcgcgccccacagcgacctggaactacaactcccagactgtcccgcgcccctcgtccaagcacgttcccctctgccaccttcccgccgcccccgtctcactccgcccctctttcccctccttcccggcagtggttggttaatcggactccttcttgcggggagccgccagacactcccatccaaggcctctttctcatgactttttaatctcctgctcggaagtctacgaggacgcttccgggtcacgcggcgcggacaccaggagtcatgtgatgtcaagatggcggcgccgcggtagcaggatccgggttgtggcgtcctaggagccgcgacggtttctgccctcgggcagtgaggggcagcagcgcttggctgacccctgcggcgtcccgtagcctcgcgttaagccttgttcagagcgggggcttttgctgtcgcagtgggttccggagagtgcaggtgatttcgcagcaggtttcttgtgctggccgcgctcgccggacgaagaagagaagggcagttgggcctgcggccttggcgttcatgaggcctcagagagctccggaggagctacaactgtgagggggctgctagagttcttctcctcgggtgtgtgagaagcagcctaggaccccgggttcggggagtcgcaaagaaggccgtaagggcttcacttccttctccggaggcctgccttctgcgcgtcgattaacaccgcattctttcccacttcctctcaatgttttcttcatatatctggaaatatgatcagcgcccctgacgtagtggccttcaccaaagaggaagagtatgaagaagagccttacaatgagccggccctgcctgaggagtactcggtgccgctcttccccttcgccagtcagggtgctaacccctggtcaaaactgtccggggccaagttttcgagggacttcattcttatttccgagttctctgagcaggtgggaccccaacccttactgaccatccccaatgacaccaaagtttttggcacttttgatctcaattacttctccctgcgtatcatgtctgtggattaccaggcttccttcgtgggccatcctcctggatctgcctaccccaagctgaacttcgtggaggactccaaggtggtgctgggagattctaaggagggcgcctttgcatacgtgcaccaccttaccctatacgacctggaggcccgtggcttcg

SEQ ID NO: 64458 - DNA, 1674 bp, Homo sapiens
ttgtgtatttttcgtagagatggagttttatcacgttggtcaggctggtcttgaactcctctcaagtgatccgcctgcctcggcctcccaaagtgctgggattacaggcgtgagccaccatgcctggccgcagcattatattgaatcaaagctcatcgaaacctgttagttctatcaagttgataaactaacactttttttagcctttccctcagaattgcttggtaaacacgagcatgttctattgcaaaaccaccatgtggaacttctggttcctttccaaactgcagacgtcagctcatctccctcagaaatgagaactgaccctcctccccacctgcagggagcccaactccgcctcctctcagccaaacttctcatggatatagcttatctcccacaactaaactaagttccttgaaggtaaggactgagtgctactttttaaaaaatctcctgcggtacccaacactgctatacatgaagaatattttccggccgggcacggtggctcacgcctgcaatcccagcactttgggaggccgaggtgggcagatcacaagatctggagttggagaccatcctggccaacctggtgaaaccccatctctactaaaaatacaaaaaatgagctggacgttgtggcacatgcctgtagtcccagctacttgggaggctgaggcaggagaatctcttgaatctgggaggcagagcttgcagtgagccgagatcacaccactgcactccagcctggccatagagcaagactccacctcaaaaaaaaaaaaaaaaaaaaaaaaaaagagtattttccaaatgactgaacagatgaatcattgacttgaaacaattccactggcagggaactggcaggccctcataaaatagtaaatattcactatttagcaacttttcaaaagattttttgggacacacaagttaatgatgaacaggatataggcagttgggatcatctttccaggatgaccaccagtagtattttataaatgataatgtaagtacagcaaatagcacctattcactcagtctggacacatttctccaggctccagaaaaatgtaaatgggagttttgctataagaagggcctcaaaaatctctgtacgatttttgaatacataaggacctcattttaatcctagcaacactttaatgtgttaatttatttcatacttcaagtaatgaaattgaggctcagggccaggcatggcaactcacacctgtaaccccagcactttgggaggccaggagttcaagaccagcctgggcattgctacaaaaaaaaaagttagctgggcatggtgggatgggcctatagtcctacctactgagctaggactctttttttttttttttttgagacagagtctcactctgtcgcccaggctggagtacagtggcgcgatctcggctcactgcaagctccacctcccgggttcatgccattctcctgcctcagcctcccaagtagccaggaacacaggcacccaccaccatgcctggctaattttttttttattttttcagtagagatggggtttcaccggttagccaggatggtctcggcctcccaaagtgctgggattacaggtgtgagccaccgcgcccagcctgggctaggactcttaaaaaaaaaaaaaaaagaactaaagaa

SEQ ID NO: 64459 - DNA, 2088 bp, Homo sapiens
cttgcagtgagccgagatcgcgccactgctctccggcctgggcaacagagtgagactccgtctcaaaaaaaaaaaaaaagaaaattgggaatcttagggacatcttcattaacattcagtaatacctggtaagtcccccagccaacacagctcactgcaacatcagtcattacaacattggatatttctgtagaggcactgttgctcatgtgtggcatgatcctcaacgtcagggaaaaagacctagtaagtgaagtcacctgcaaggtcaccagcctccccatgcctccaaatcttacctgggcctctgtcacataagaggatccagccaaggatctgctcagggaactaacttgttgcacatcttctatctcacacacattttgtgttctcttctttacagaagaggaaattgaggcccagggagctaacttgtctaaagccatataagagccagaatctgaacaatggtttctcttcagttccaaggccttgtcccaggacattgcactaaataaaaacacaattacccacttccgttccaagttcccccaagtaataaatttacgttatttcttttcttttttttcttttctttctctctctttctttcttttgagatagagtctcactctgtcactcaggctggagtgcagtggcgtgatctccgctcactgcaacctccacctcccgggttcaagcgattctcctgcctcagccttccgagtagctgggattataggtgtgtgccaccatgggcagccaggtttttttgtatttttagtacagacggggtttcaccatgttggccaggctggtctccaactactaacctcaagtgatccgcccacctcggcctcccaaaatgctgggattacaggcatgagccaccgcgcccggcctacaatgttatttctgcaagaacctaaactggtgtttccagtctattctctgggtaactgcccgattgaaggcccgcatctgtgctgacctcagctggaccaagggtcacttaactcccggaatctcgaagccaaggcaccgggccaagaacttcacagtgcaacatttgtctcctagaacagggggtggcagattgcgggcaacaggaagagctcattccccacagggatctggtggcacgggccaaaagtggagcgaccctgcgcgcagcctttaggggcgcaggctttgagaacccgggttctattccgggctctgccatttaagttgcctcctttctcagggccccaccaccttcctcacctgtaaaatgggggaaacagtagcacttgacttgcagctttgttgtgaaggagctaggattgtttaaatcgaaaatgctcaacgagaaaagtgttcagtggagagctactactcacatccccgataagccttcgcattcttgccaaaggccacgggccgccaccccatcataccgaatgtgcctggaactggggcgctgcggctggccgccgcccgatccccagcccaggcgcgacccaagcgctcccctcccgtcattgcggctgcagagggtggggtacggcgggggacagcgaggacgccgaagcaccccccgggctctgggacgccgcggccctcggacccgaagccgcccacctaccggaacacggcccgcgcacgtacctagcgacgcctccgtcctacgccgccgccggtgccaccagtcccagacccgctgacccaacgccccgcgcaccgccgcgggccagccacgtgaccagccgctccaaccccaaaccccgaacttggcgctggaccgctcgagctcaggaaggtgcactctgcgcgccaggcttgggcttggccccgcccccggaggcgcccaatcagagagcgcagccaagcatgggccgccaccaaacgcacccgcgctattggctgcggcgcagcggcgggcagggcctgtttctccggggcgggccggaggccgcgtagtgcagctgcgcacctggggcagggacctgcagaactgacccgctttggctgcagggctggtgtgtggaccaagatttccaggaagactacacagggccttcctcacttaagcctgtcgcttgggcc

SEQ ID NO: 64460 - DNA, 1359 bp, Homo sapiens
cagtcttatggaatgggtgctgctatctttgtttttcagatgaggaaacaagctcagagggttgaaatgacttgtccaaggttacaggccagtggaggcttgaacccaggtatttgtaattccaaatgtcatactctgtccacattcattccttgtaacctgcctgggctgtcacagttggtgtggggctagcagctccccagggaccaaaacaggcgcatccccgcccaccgccccgcccatcgtgccagcccgactccacccctgtggctacacccactgccccgcgccttacccactggtgggccacgcccacagcccccagctaggtgcctccgctgtccgggctctagtcccgccctcgcccctccccgcccaccggcctcgcagtcaccgcggacgccaatcttgtgcatggagtcgccattttgctcctagagaggccgccaggagacccggcgctttcttccttctgcagctgaggctgcggcggggccggggctggggtcggggccaggtaggcgggcgggagccagtggcgagcggcagcgagggctggctggctccggcattgcggggcgcaggtgcaaggggcggggagcccgcggcgccggcaggcggacgggtcggggtccctgggtggtggctgcttgggggctcactggggcgatctcgcgcccgcggcccttccatttttccctcccttcttcctctcccgccaggggtcggcgggggcgggggacgggcgtccggtgcctgggctctctcctctccctgaggcgccgctggggagtcgaaccctgatgatgggacctgtggtgagcagccctgaaagcaagcccagacccagccattctccgtccctaagctgacacggagcccctgattttaatttacctggctttgctagttacgaatatatctctcacctcctaaaggatgattttatccaactcagaactcaccccagcagagattgagggggaaccgtgatgaaatttttaagtattctgcttgatgataataatttttctcttatgttaatgttggctccgtttgggtgtttagcttttgaaaggagtatgaaaatgcggaatggggctttggggcttgaggtgtgatctctagtgtttaaaaaatttaattgcacaaatagaaataattcacccacattattgaaccccactaaagcatatcctttttgtccatattcctttcctgctgccctcgtgtgtaccattattactcagttgtgatttgagctcgttccacttaaagtcattcatagatacttttgcgtcgtgttgaatatttattgaatttctattctgtgttttacttaattactttattatggaa

SEQ ID NO: 64461 - DNA, 924 bp, Homo sapiens
cccaagcagaggggacagcagattccaagcctctgcagcatgcaggaggagttcttggtgtgtctcaggaacgtgggctggagtacagagtgtccaaggaagatggctagtgaggcaggcagagcgggactgcatagtccttcctggggagacatggggttggggtgaggggctaggtaatggattgatgtaacaatttaatgttgactttaaattttataagaagaataactttattttattttactcttatcgatttacgagtctccttaaatagtaaagatactgggtttcttctattactttttcagctttttccccctttctcttctctaggcggctaggggtggagatgggcaaagtgcaggtttaccaggaacctaacagaggtgagctatcttgggcatgtggaacattgacctttttgtgaaatgtggcatattggctccgtccttcatcctttactattgaaacgatttgattcagttgtacatttccattagcaagaagtcaggcaggcaaggtagaacagagtggttttttagctctcactaataccagctagatatctaaccctggtgcaagtcatttctggggcttgaactgcagttctgagacttcattcagtaaaagctgcagacatatttgaaccagctggtcaactgaatgaacatgagctcaactgttgcttaaatttatgtcaccttaggaaggatgagtaaatcctgtcaccttagacaggatgactaaatcctgtgtgaccgcagttttagttagtctttatttgcacctaagctgccttgggttagacttcataaaatattgttaagaaatactttttgctaattgatacatgtcattacataattctcccaagttgtaaaaagaagtgttatttaacctttgtaggtccaggtgtgctgg

SEQ ID NO: 64462 - DNA, 2860 bp, Homo sapiens
cctgtgtgacagagtgagaccctgtctctaaaaaagatagcaggagggaatgaacatttttagtgtattagtctccagtacagcccttttaattgagtgatgattttccactttatagataaacaggatcagaaagagaaagcgacttccctgcagtcacatagtgacaagctggacatgtctgactaaaacctgtgctttttccactgtgttcttgggtctcttggacttagtaatggggatttaaggaggaggaaggcagtgagatagagccagggttcaggatttggggctgggagggtgttaataaagcgtttggctcaggacctcaaagccttttgcttgtgtgtgcatttctcacagcctcacgtgcccaggctgttggtgctggggggtaggcctggggctgccgctccctttcagaatccttgcctggcctcagaggggcttgtgtctaggaacctcagcagaaccctgcaagggctggctgggaccattggtgagatgagccatgcccgggagcatggaagaatatatgttcctcttcagtcctgtaagcacatgggctgtgatgaggaacgcgttggcagtctttagatgaacgctgcttctttggaacttgctgggtgttagcttttggtgtggcctttgggagtggactctggactgcagacactgaactacaggtttcccatctggaaatgagttcataggactggatgatctctatgttctttctaatatttctttactcgtgggatctttatgtttcattcataattttaattataatgtttctatgtttatgttttgactcaagtagtgatcactacaggccgtctttgggaatgcagtagaattttagtttcatagatcctaaatatttgattgtttttatacatttgatgattggacaccctacatagaatacttttttaaggtactagcaaataatatatgaagggaaaagaaagcattcttcctgtagcatctcgaatataaagattttgttatttagtattagattttaaaaattattttgtatcctctgatttcttatagatgaaaatatgcctactaaaaaacaatgaaaatactttttcagaatataagcactatatataatatttgaaaatattatccataaaagttagaagaaaataataattagtgcttgatgccactattcaaagacacaccactttaatttggtgagcctctttttggtttttcacccttattttcataaagctgcgatgcatgcttcatacataattgtgcatgttgctgcctccttctcccagctgcccgacgtgtcatctcaggtcaccagaaactttgacaggaaacagcaatttcttttttttttctttgagactgggtctcactttgtcacccaggctggagtgcagtgacaatcacggctcactgcaaccttgacctcccaggctcaagcgatttgtccacctcagcctcttgtaaacagcatttttatggctaataacccatcgtatgaatgtggcttagactgcccaaccacagcctaatttggggtttttatgttttcttctgttctttgcccttataatgtggcaggaaatatatgtggataaaacacttttcccatactttggcttatttcatttcaagcttctaaaagtgagattaatgagtcagaaggtatgaatataaggctttttgtcaaattgatttcctagagggtgattcattatactttttcaccggcattgaggtcaagtgtcctgggagtaggactgttgaaaatgtaaaaagtcacttcagttctggaatttatcttgctttgctttgttttgttacacttttttgccctctcctgatgctcacctggggtcacacattgcctctggttgtcatatgtctttcatctctttcaatctagagcagtggttctcaattagggagtggatattgtctcctagaggtcatttggaaatgtctggagatagttttgattgtcagaatcaagggggtggctactggcatctagtgagtagaggccaaacatgctgctaaacttctcacagtacgtagggtggtcccttgcagcataaacgtgtctggcccaagatctcagcagttgaaaagtcccaatctagaacagtattttaactttttctttttgtgacattgccttaaaagaaaattgaagtcaaagtcacataacatagaattaaccattttaaagtataaaatttactggctttcagtatattcacagttttgtgcagttaccatttctttctagtttcaaaacttctcattaccccggaagaacaccctgcacccattaagtagtttcaccatgcccccatcccccagcccctggcaaccacttacctcttttctgtttctgtggatgtttgcctaatctggacacttcatataaacggaatcatataatatgtgggcttttgtatctggcttctttctttgagcatgtttttgaggttcatccatgtgatagcacttgtcagtacttcattgcttttggtggctggataatatttcattgtcagcatttgaaaggaatttgggttgtttccacttttggctatgctgctctgtatattcatgtatgagttttctgtgtggatagatgattcatttctcatggtctatacctggtatcggaattgctgcgtcacttggtgtatgtttaactttttgaggaactgccagactcttttttcacagcagctgcaccattttatattcctaccagtaatgtacaaagatttcagtttctccacatcctcatcaacacttattttctactttttattgtagccagcccagtgggcataaagtggcatctcat

SEQ ID NO: 64463 - DNA, 3473 bp, Homo sapiens
gtgggtggtggatgctatggtggggtcctgagcgggagggtgatgtgcacacgttttagaagtgtctcgtggatggctagggggtgatgcagccagaggagggcaggaagggggcctgccctgcagaatctgtgccttatactccgataagtctgtggccctccagggtgcgtggccctacccggcctctcccctgtgcttctcaacacccctgtctctgctgggctctgctccgaggacaggactcacagcaaacctttctccttccccatggccaggacaccacccagcacccaggccaggtcctgtaaatggtcagagattcaattctgtgccggcttacactgtttggcccaggagcaggccaggaaggccctcagagactgtggccaagggagctgagacccaaggagaagagggctccttgggcatgaggagcacagcgggcccctcaactgcctcagctccaaggccaggtcgtcaccggccttttcctggaccctgaacacataagggccctctgtcccagtgtggagtctctggagctgccaagggcctgtgtgttatgagctccaggtgctgacttccctcccccaggtagcaggacctgctgtgagggaggagcagatggtaaaggctggtgctgggcacggcagaccccaggaaggacagggcgagcctggctggaacccaagtgtcgaggatggccaagggcatcccgaagtagaatcacaggtgtaaaggggacctggggctcatctggcccctgtctagggcagtgtgtaagaaatgctcctgggtgccctgagggtctgactcaggaggcctgaggtcaggcagggaatctcagttttaacacccactccagggattcctgactggtctgcctgcatgcctcctgtgatgggagtctcactccctcccgaggggctctgtgccggcttctggctctcggctatgacgtgttcttagtcaggctgagctgtgacgtactggtctgtcccctcacccactcactggccccagcttattcaccccactcattcacatagtcatcaacccctgccgaggcctccagctgcagagatgcctgtgatgaggatcccacctgggaggtgaaggggaggctgagggggtaaacgaaaacaagctgaatgcccaggatcgcagaggagtagcctgaagtgtgaagggctggccgggaggctcccgggagaggatgacataggtcacagggggaggtggggaagcattccagggaagggactcaaagaccaggcatgagaggcctttgtacaagagcacctcaggggaggaggggtgggtgatggagcctgcagagcgagcaggggcgggctcctggtaaaagaccctgcaccggcttaagagcctgagcttggccctggggccagtagggagccatgggaggatttacagcaagagcgatggggttgggtgtgtatctcaggagcagtgctggcatcaggcagtgggtgtgtgaggtgaatgctatgggagaggaggggagcctgagagagcagagctgcccgccatgccatccagcctcctgccctgccagtcctttccgtgtcccagacccctgtggctggggtggccccaggcaagcaaccacagaggcaggcaggtgtgggccgtgggtgagtccccatctgatgcccacctgtgggataaaccatagccttttcatagggcccagtgcagaaggcagataagcctctgctcccagggccgccctcgccggccccccaccccgcaggctgcaggtttgcacacagccagctcagcaggaagctggccacggcccaggacaattagcgctcgtgactttgtacccaacatggagcacgctcggggttgagaagtcggacaaagatcctggaggtggtacgaggccttccctgtcactgagcccaaccgagcccagctccaccgcctcctgcaggctcctggcccggccacagacccctccttagcctggaaaatcggccgccagcatcaggacccttctggacagtgtctgtccccacccatcccaaaccttgtcctgatgagggctcggaaagtcaccacttccatctcagagtgactcagcctccgtgtgagccgcaggcctcggctgggccgctgactcgctgtgactcgaagcaagtcccgggcccttgctgggccttagtctcccttagcacacagcagggcgggcctccaactcttaggcctgttctacctggggctcagcagcaggtgggggcctgcagcagggccccccacctcttgcctcatggcctgctccccagcttgtgcctggatgggccccaccccacggggcctggcctggatgaggtaacgtctcaagactctgggctcgtgtgcgcagaggtggaggatcccacaaagctgcattgtctctgagctcctgggacacccccggcacaggacagcagatgggtggagggatgccggggctggcccaagaggggtgccctggaaaagtctttggaccctctgggacctcagtttcctcataagtaagagaggacgtcaagggcgagtcagggcaggggaggacggccgggtggtgcttcatctgctctcagcgggtggcaaggcaaggtgggggctccagggctggggcaaactacagcaacctgcccccaatccccccaggcctccaggccacatgtgcttaaaggacatgtgatccaactgtgccaagcccgctggtgcgaggcagagggggctgagcccaggagcccctggagtgggtctagggtctaggcattcctgagctccagtcaaacaggctccaatcctagcaccaaatggacgccaaccaaggcctttctttccacgcctcagttttctcatctatgaaagggtctactcatccttgtgctgcaaggctgctgtgaggactgaatagagccacagtacaggtggggccctcccagggaaggtgtccagctcccagtgggtgccccatgaactggaagtggcgcagtgggctgtgggggaccaacacagaggaccacaaaacatccaggagggatggactgcccagggaggccaggactgtcagccgtactgggtgggtggttggtgggctcaggtagggaaagtgacctgcccactgtctcccagtagccctgggctgggccgggactgaggacagggctctttcatcacccacctcctcagggccctgctggccaaacaccgtctcctttaatttcaccctcacacaaccccgtgaggcatcactatggccatggggcgctcgaggcccagagaggtggaaccacacgcccaggtcccacagcaggtcaacagccagtgagccatgtaggcagcaccaggacagcctgtgctggcaggttagctttggttttggttttataatggaagccagtgattacttcccctgcccatagtgggatggccattcctaggtttat

SEQ ID NO: 64464 - DNA, 3749 bp, Homo sapiens
tgacaaatgctgacaaattacaggcgtggagcccggccccttgttaaccagactggcggtgccccttctcctaggaccacaagcctgaaacctgcagaattttgacctgtcagacactggtgctgagcccaagggtctggagcaggcctctaccccactatctttaacttgctagcagtgacatggggtatgtggctccattccctcatctgcaaaatgggaacaactccctatcccactaggctgttgtgaggattaaattaaccaatgcaaagtgcctgtgacagggcctggcgcacggccaatgcaagagaagtattcgccgtcatcacgcacgctcatctgctctcagggaaatgctctgcacgcagcaggtgccaagcgatggctggcagaaggagggctccagacaccaaatgccagggtgtctgggcagaagagcgttggaccaatgagatcctgtagcccagagaagggaggtgacatgcccaaggacacacagcaaaacagtgctgagaaccacagcccaccctgaccccatcggcagccttctctgatccacttctgttccatggtttcccccaccccaaaggttctttctcctctgctcttgtgccttaaattcacttcaactgtgcagccatcgcagaagccttccctggccccagcctgagggagcttcctctgtctgagccagaatctaaaaccagtaaatggaattctaaggagacagatttgggcttaacccaagaaaggacttcctgggagttgaagctctccagaaaggccacgagctacctgaggaggcagtgagcacactatcaccagaggtatgcaagcaaacagataaccgatgtggcatgggctgctctgaaataacatgatgcagcacttggcatgagctccagcacctggtcagcaagcacctaatcagtgtttattttatctctgccacgttggaggtagtgagtatcctgcccctcagggaattcaagcagtggctatgtgactgcttggcaggaggctctaggattactggactctgagtgcctggcacaggactccgtccagagcaggcaggtactcgaagtgtttgttgacagactgaatgacccctgccctccagccacccaggcaagtgaggagcctgctcaccttgaggtgccccaggtgcatgcaggcccgctcacacatgtgcaggaagtacttgacgttactctcatccacgatgatgtacacggccactttcctcttgaagccggcgtccagcaggtccttgaagatgtccacgtcggtgaacatgtccatgaccacagctatcacctgggagcaagaagagagactagggcctgtcagacagtgcagcagtggggacagggtgccctggcagagcgcacagccctcccatgccaccagcctctcacaggtgcccactctggccctactcctggagcctcaggcccgggaccaggaagtgaggggccaggggcctctcttgccctgaagttctagttgcagtcccagctctgggctcagcccaggggccctgtgttggtgcattcccaggccagggccggctacgctctgccctccttgtaacacctgggaatgctgagatgaacctgatgtgtcaatgaccggaagggcagcagctggcgtggcggctcgctggggcatcccctacattcctgggctggtgtggactttggccagtgtctaaacccagatctcttcctgtcagctgacaacatctgtccccatagcaggtgacctcctgctggacctggctcagggtggggccccagtggtcagggccttcccccagcccagccaagcaccaccaacagggcagggggcctggctgagtgaaggtgcaaggtggaacatgcagaaggacaggatgaggtggtatgggcccggccccagtggggctcagtgactgtcaggcttctctcacacctagtcccctccctgtcccttggcagcaaggggagggagtcaggacagggcctgtgcctgggcacagccgcctacactgctgatgcagacacatgtcccacttttgggcagccccacccctcccaccctccgagcctggcaccaccatccctgtcccaggtctgaggaccacctggagaagaggccagggacctgccctaggccacacagcaagctggggacagagtcaggctacagactaccctgacttgtcagagagcaccccagccttgctgggatgcggagattcagggtggtggaggcggcctggagcctgctggggatgtgtctgcacgccccaaagtgagctcaccaggctggcccctgcaggcccatctgggctcctcctgggcctcaggcccccatcgttcacctggcaccaaagcccaaactccagcagaggggagggctccatacctgccctgcctcaaactcactgtgtgaccctgagcaaaacacctggcttctctggacccagttttctcatcagtatagcatgctccatctctcaggagaatggagcacacctgaataccgcagcacctgcaaagagcccgacggggggctggggcgggggctcggtgatgcccgtttgctgcctttctcccacagtcaccccgcacgttcccatttacagggggtcttgtcagcctgactcctgcagcctctcacaggcaccatggtggtgacagcccagcatgcagccaggtaaactgaggctcaatgaggttgtaaggcttgttggatgtcgcaaagcaagttgggccagggcctggacctacctccgagtcaggtcagggttggtctccagtaccttctcttggacgtttagtctcggagagcctgggagagagtggtccccccagagcggacagcggaggtgtgggaccagctgggactcccagaactccaaggcctagggttctctctgttctctggggagatgactgctccctatctctctgtttctgaagggctgttttggggcagagggagtagctggttgatgcagggtctacgactcgcaggggaggcagatgttggcaccagatggggaagcacttgctgcccccagggctgcccaaggttaaacagggatcttaagagggagctcactccctgacctaggagatgttcaaggaaggccagagactgcttggagcgggggtagatgatagggcagagaagacacgatgcaggcaggtcaccatgaccctggaggcagtggtgttgagacactgggcaggggtgtgtggtggtagcagggtcctccctgcctgggatctcccagacccaaagcctctccagccccagaatctccttagttaagccacttctgagcaggcaaacagcctcacgtgccaccctggaaaggagcctaatgagggcgcagtaggcatgcttctccctggagggcaccaggccctgcctaccgtggcagatggggacttgccctgggcttgggctgggggacgtgccccagcaggacccgcaccatgtgcgccactccccacattgccctcagccaggcagggtgcctgatccagggaccatctgctgtcaggttggatatgttggagcctgcactccaaaatggatccccccacagtcctggctctccccaggcattgggttcagtgcctagggtggtcagagatgggtttgtaacaggcacgagcttatgctggggatggggagggggagcctggtgctcccccaggcaacccccaacagcctggcctgtccatgga

SEQ ID NO: 64465 - DNA, 1984 bp, Homo sapiens
gcatgcagagatcagtgttctggccctggccaccggcgcctcacctgccctcagtttcctcaactgtgaaataaggaaggtgtgatctgtccctgccctggggcctcaccctggggctggtgagggatcctgctaaggcccccctgctgtgtcctgttgaggggggctcagcatctgctggaggagcaaccagctagaacatctacatccagctctggctgaggaagccccaacccagcccagcctcacgccttctcaggctgcagccaagtgaggccggggctcgcccctcccaggcgtgatcttacaagcccgtcctctggtatgtagttggaaccccacagcaggttttttcccagataaatcatggctcctggggctaggggaggggcaggcagttgaccttccatcttggagtaggagcccactagggctggagggaggctggagggcacaagctgctgagagtgagacctgggacccacccgcctcttgtcccaggggagtctaggatcacagggcagcaaggtgtcagggctgaaggggcccctaacagtcttcaatacctgttcccattttacagatgggatgaccggggcttggagaggagctggggcttgttccaggtcccacagtcaggcagaggcagagcacggactcttggctcctggtcctgctgtccactagttccattctagtcatttgggaacaggggggactgacagcagtcctgacaggaacacagccgctcccctaagtgctgcgtcacttccctgccccagggtctgcctgttgtgctgacgacaggtaaggtgagtgaggaggcggaaggctgggctgtcctgactcagccccagcagccccagcctaaagcccccggtgggaaggggccagtgtgcggcaaggcggcccaggcagagggatccccatcctaggcagggggcaggcagagttctccctacacaataccagagtgagaaggggaggtggaagcatgggcacgagaggtgattcatggggagagataaggcagggagcgctcccaggaagcaggcagacaaagcgccccgtcagcatccgtcagtgtccgggccctgcccctgtgagcctgggaagcagctggggcaggacagctggaggactgcagtggcctggatgagctgcccctcccagcccctgcctgtcactctgtcctgccagggccagggcacaagggatagcctagagtttgagggaaacacaggcctggtccccacccctctacccgagaactagctaggtgaccttgggcagcgactaaccagtttctacatctgaaaaatgagacagataacactagctgagattataaagcgcctcgcactcagtcaacacttgctattgttattatccctgcccacacatgccacacaagcctgggccacaggtcccaggacagatgtggcagggaaggaagtgcccagggcagaaagcaggggcttggctcaccacaatgctgtggagtcatgaacaaatccctgtccttctctgtgcctcagtatccttgtctgtcagatgaggagcttagtctctactgcctctgaggcccccactgtgggacccttgaggactccctgaggtctgagagtagggagcagtttcagcagtgagtgccccatcctgagggctggaaaagcagaaagcagggcccacctgtccgaggctggaggacatcactcactatggggccatgtagacagactggcacccaaactggagaccagcttcttcctggctatgtcaccttagacaggtgacagcaatcaccttgtgggaagcaaaggaaggcaatgtcaccttaggtgacactaataaccttgtgggacttttgtgggaagcaaaggaagctccaggtggctcatgggactgtacggagtggctgggtcacagctgtagccagagactcagggaggaacctggggtcagcaggtgaagtcctggccct

SEQ ID NO: 64466 - DNA, 4340 bp, Homo sapiens
cagcaggtgtggggcgggtctctcagtctgcaaactatgaaggtcccttcctcctccccctcctcctcctcttcctctaactccttccttacttttgtcacccgatattccatcttcacaatagccaaagatgcagcttttatccacaccacctccatcttatagatcagaaacccgaagcctcaaagctgcccagggtcagtcagtgaattgagagcagccaggccaggggccaggcgcccccacccagctagctgacccaactggtccccttgttgggcagggactccaccttcctggaaactggggccagggccaggggccacctcaccagttcttgacccacgtctggtttctctgcccacgaacttccccaaggccctgtcagttagccaggatggtccccgaagccagcattctggtcttctgcaattggctgccctgctctgggactggaagtataaagggattagacccagctaggaacacctcatcccacaacctgaggcccagacctggcttcagaatccttctcaacacagctcactaggtaagctttatctatcaaattaagatgtgcttggaaacgatgagaaggtacttacgtgcagcaggcattagcacctgctcatggtcacaactgtccagcagtggcctagctgtctctgcaaatggcaagcaccccttctcagaatgtgtgacggtgtgtcagccaagaatggccccccacagctagggcactgcatagcccaacaggggtggagaaggggagggccagagaaggcttgaggtcccttccggtggcaaaattcaggtggacaatgctcaggtggactcactccacttccacagatgaggaccacacctccctcacccaagcatcctggcctggaaagtttccaccattgcaaagctcacaaagaggctcagagagggtgtgcaatctgctcccagttgctcagcacagctaggaaacaggcagtgttgaacaaggacctccaggccagtctcagatggacttggaccatgcctattccctcaccccacaacaaaagctctccccaccagagagctcatggtgtgtgcgcgcctttacagtgaatcagagccactctaagggagagtgagaggaagccctggggttcctcccctccccactccaccctatctcggtgccttcttctggggaaccagaaacaccctccaacaataaagaggccctttgagacggggcagcccactgtcacctgctaggacctgggaaccctaccctgcaaagaaactgcggatccccacgaaggtggggaggaaacctccacccaagaggcagccagggaaaacagcagagatccctagaagcccatgttgggctcccgttttgggctctgagtgagcctgtattgagaggggtccggtggctggttgggccatggctccaggagtccccgcgctgcctcaccttctgtgcctggctgatcatcttccgcaccacctctttgatgtgggcctgcccgtctatggggggctgcatgtagacgctagcccgggtcacgccgcggtaggcgatggtgtcgggccagcccaggtccagctgcgggatggagcggtccgacttctggggccagtactccagggagggcagcggctcggcctcgatggggaccccatccgccccgctggcttcctcgccgtcgccgaccccattgtcctcgggcccctgagaggggcccgtgccccgagggtcctcagagcccgggtcgtacacctcgatggtctccaggatgcgcttgagctccagctccgagaggaagtctcggatgttctcccgcttgagcacctcgtagaaggcgtcccggccgcgggccaccagggcctccagcgccagccgctgctcctcgctgtagaagaactcaggcttggactcgctggagcgccagttcacatggttgtcgtccagacactgcacctgagagaaggccatggcgccgcctgcccgggcactgctgccgggggtgggtgggcaaggtccagctcctagctccggcccagctggggcaccgcgcgctcgggggcctctccgcggcctctgcttctctgcccatgagcaatctgcgggaaagacctgatgagcccggctcggcggggagggcgggccgcgcggggaggggcggcgggggcggggccgggaactcaggtgggcgtgggaaggacggggctggggctggggctgggaagatgaggtgggggcactggactgggatgggaagaaagtaagggatcggaacagcggtgagggagcggtgggccacgtcccagggctcagcgtgcctctacgtgcagggaacccatatcccagatttccggagctgcctgaagtcctcgcaacttctgagggaaactagggcagccggggaacttcccagtagcttcttagagtgggaggcggccccggcacagaggcgccccgcaaaccgagggcttccgggtaagggaggggtcttaaaatttccgggtgccggcaacccaggaggcctgcccggaggaggctggggctctgggaggggtccaggagacccagaaacgcggttgcggggcggcgacgccccgcgagacccgggatccggggggcgcggccgggacttgcttaccgagcgggcgctggcggagcggggcgcacacgcggcggctgcggcggcggcgcgaggctgggcgggggcgcgccggtgactcagggccgccccgcttaccccgccgccgccacctgcggtcacgtgccgcccggggcggggccggaagctgattcacccctcgacagacagacagacctggggcggacgcactgcccacggtcccctggtgcccgaattccgaaaatatcagaggcctaagcccaagagctcctggaacacccatcccagagagggacagtgttctccctgaggtcacacagcgggtcaacagccttggcacccccctgtgcccccagggtctgttggtgatcctggatcaaccctggctgtgcccagtttcgccggcgtggcgggaagtccgtgcggctgtatagatacccagctgtccagttgtggaaacaggtctagggtactgggctgggagcccccaggcagggatagggcactgactgacccaaactcagggctttcctgagcagatacccagttctcagtcctaagccctgatcccctctgggaggggtccccggactgcttctgcgtggcgggcagcacccgacctgaaccctagggcagggaggggccaagagggccgctgtgggctggggtcaggcccagctctctgctgagcgtcccctggggttgggaccctggttatggggagcgtggagaccacatctgaaggcaggctttgagggtgggacagcaaagcccattaaatctggcccaacaaacagcccccaccccatcgcgtgccgcagccagtctgcccggcaccaggcccagcccttcctcccatcccccatacttgctctggatctggatggggctggtttgggtcccgtaaggatgctgcttccgtaggctggtgacatctctaggccttgtgccctcaaaccccccccctccaaggccttctccaccattcatggcccatcaggactccttgcctctgagtccactgccctgggcaatgactagcctcctaggcccagcatccttgtggtccccatcactgacccctcaagcatgaagtcctacactctgccatatagccccccaagggctttatgctactgaacatagtggcccctggggaacaggcacacatatttgcatcctcctcctgccccagggccagagaggggaggtgatcccagcgggggagccctgccttgagggtcctgaagacccatttatagcccctctgctactgtggatcccctgtaagaccttctctgagccgcctcagcttctccctgtgttcttaccaatgcacagaggctggagagttcaggaagggagtccaaggcctcactcccacctccaccaccccaacacttctgcagttgatgagcaggaaggttgtatgcacccagttttccccagtagcgacgttttgcataactataatacaataatatcacagccagaaaattgacactggtgcaatccacaaagcttatttagatttcaccagttttttgtttgttttgggacagggtcttgctctgtcacctaggctggagtgcagtggtatgtacaatcattgctcaatgcagccttgaactcctgggctcaagcctcagcctcctgagtagctgggaccagagacaccatgcccagctaattttttttcttttttctttt

SEQ ID NO: 64467 - DNA, 1391 bp, Homo sapiens
gaggggaagccgcgcaggggccactagggaggggctctggcggggtcgcaggggcgtggtctgcgggcgtgggggcgggacctcggggcctcgggggcggggcctgagggcgcgcgcacgcgtccggcgcgccccctcccggccgccatgttggctggtgtgtgggtgtcaaactgagccagacgcggcggtggcggcggctccgcgggctacggtcgctcccgcctctcgagcgctgccggtggccgcagcggcgcacccacgccggcccggaggagcagaggtgagccacagcccgtggggctccaaggccagagcgagtccccggggcgaggaccctccccctctccagggcgcggacgcccccagagcacaggctcccctacctcaccagccccgccagggcatgcgcccctgccgccccgctggtccctacgccaggctctgggggatccccttctttccaaccaggccccgccccacggactggagcatggcccccttcccatctggatccagctttccgctgcaaggatctccccccttacccgtccctatcaccgagcatctccttttatgtccccagagtccagggcgccccttactcctacctcggatcctggagccccgttcatcttggaacaaccccgccccctccccagagcacgttcctcctctccccgagcccggcgccccttcctcctgagcccagcctggtctcccgccagcccccgtgcagagcccggtccgggcgccctccgggaatcgggggaggggtccttatctctgtccgggatcccgcccgtctcacctttcctgggggctgtagcagggcccccttccgtccttggggaccaggctccccactccccagcccccactcccacggaacagcggggacgggggcggaagagccaggctccagctgccttttgttccgcgtgggatggcagagacccacccggcccggcggtcctgctcggctgatccgggtgggtgaatgggtgcgtggggtctggcctcttccaggagagacttcctctctctccctgtggggcggctcccctagagccgagagccgagcgcgttgggaggctggcctttgctagaggagtcggtgccaacaggtttttgtttgcgacctgaagtttgcccagtggctttccctggggcagcttgagctccctgtgaatccccccgccggagcttgtggaaggccgtttctccgcccaaggagtccgtctgggcgactccttcacagttgtgcttccctggggacgtatctaaaatctgtgctttaagagcggagagggcttaaccatcattagggttcagatgagggaaactgaggcccagaactgcagtaatttgcccaaggtcacgcagtgata

SEQ ID NO: 64468 - DNA, 1270 bp, Homo sapiens
gggactcaagccgctttcatcttgaaacactgctatctttgacagacagccctgaaggtggctatgaagggaaaaatggacaagggtcaagcatagatttcttacagccaggcctggaattgcctcactgccactcacaccagtgccagaattaggccctcggcccccatccagatgtggggtgggtggggatgggcaagtgcaggcttccttagtggtggagggtgggaggtggggaaatgggcttggttaacattgccagtctctatcacagcggactgtctggctcccagagagttatttcagtcttcttctcaaacatagacagtaaggtcctgtgtcctgggctctgtggagtacagagccttctccagcaaggcagacacagcctataaactagaaagacctatgatctgtgcccttcccccaacaataacaacaaagcagggcaggggtcagtacccacagtccagctccatttggaggagcagagaatgggagactgccccacagtgctggaagctgccgcacagactgaggtcgccttgcggtgaggagggaaaggacctgatggtgccctgctctgggctctgccccctggtggggagctggccttttttgtattcccttggctgcagctcttgggccaagctcagctttctcacctgctgcctgtgggtggatggttccaggccaggacctgttttgagtgagccagaggcttcagtccaggctcatggactttgcacacttccatcaaaaatgtggcaatctttgtacttctaatcagttccatgtacaaataactgcattattttggtcagagtgttactttggtggcccctgatggaccttgtctcccagtgtggtctccgtcacctgatgggcgtggccatatgactagatggggccagtgccatgatggcaggaggggcttgataaatgcctgcacatggagcttgacctcttggcatgttctgctggcagcccacatgtcgtactatgagaacttcaaacacatggagaggccacatgggggagaacggaggtgttctgtcagtagcccccatgagccccagacaacagcccaccatgtgagtaatcatcttggtcagctcagtggaatagctctagccagaatcaagtgtagcatagccacccagctgagcccagtcccctgtaggatcatgagtgataaatgatagtggttttaagtgacaaagttttggggtaatttgttacacagcaatggacaactcaagcacacaca

SEQ ID NO: 64469 - DNA, 2869 bp, Homo sapiens
cagcattctggttgaagttcattctgacagagacaggttctagcaggggaggggtgcagccccagttgtgttttaggaacaccgtttttcttgctatgtgaagactagactggaggggtggcagcaggctgaatgacggcccctcaaagatagcagatcctagtcctgggaaaccgtgcacgtgaccttattgagaaacagggtcacgtgcactttgcacagatatgattaggctaaggatcttgaggcgactatccaggtggaccctaaaggccaggactcgagtgatgaggccacaagccaaggaaggctggggccaccagaaactgaaagggcaataaacagagtctcccctagagccttgggagggagcacagccctgtggtgccttttctgggcccagtgacctggattttgaactctggccttcagcatacatttctgctgttttcagctatcacatttgtgtgttttgttgcagcagccaccgtgggaaacgaatacagtggccaagagtgtttggggcaggccctaggccagcgctggaggatgtggggagaggctgggagaggggtggggatgaccgaggtgtcagcctgagcaaggagcctccatatctgggaagattctgccaatcaaactgccttcactaatcagaactttctccagtttttgtaatccaagcacatactgccttgcccagttgcgagcccctccacaggggctgtgaaaccctttcctcagcgagctgtcccctggaggcccaaagtcctccttggagctgtgggcggtggaacagggtgaataacccagcctggatggctgtgtgggtccccagtctcttaggctttcccaacccactgatgggcactgcctcgctgcctccctgacagcctgtggcatggggattgtcacctccaggtgatactggcccaggtcatctgggaaagaagtcctttgctacagggtggcctcccagaaggactcctaggggcagtaggcacacaaattctcaggctgaggccagcggagaccctgcccttcctcccctccacggctctcagagctcagtgaagcattctcggccctgggcgcgatgctgtccctccacccagcagggctctggcctggtctcacgcccagtactggccaggctcgcaggggctgcttgccggctgctgccctggaacccagggagtcctccatgttccacttgtgcctcactaatctgccggtgggcggcagaggcttgctgcccaactgcgctaatggtcctcgagtcagaaggccagggcccagctggccctctaagctcccacttggatgtgagcaggggtaagaggccttcatgctggggctgcatccaggcatcccctgggccctccctgcaggcccttgtgtcctggcccctgcctgcctccctgatgtctccctcattctgcctggcttaccacttactggccacactgccgtcctggccacaccaccgtcctggcttctctagcatgctaagctcacgctctcctcagcctggcaggcactgttccctgtgcctgatgttcttccccggctcttccctccacactaagcctctgcgcaaatgtcagctccggccagagactcccacatgtaaaggcatttatcatgattactgttccaaggtgtctgactcatactgctatatcctcttgtttcccaccttttaatgtcacattatgtcatgagcatttttcccatctgacaagagtttttcctctgctccctcagacacaaagatttttcacagggcacagggtaaaatcgcccggccttctgctgctggaacagggctgaagggagccccgtgactcagcactcccaggggacctgtttctatttgtcctcagtgggtggagcagcttgcagatctgaggaggcgaccaggcacaaactgaggggtagaatgggacatccattcatccagtagatcaggaggggctggggttatgggtacaaaactcaccttgtaaacttctgcagtttagacgtagattctgggacaaacatggggatggtccttttgtgcctgaaacaaatgtttttgcagacagagatgctgagtaagagacctttctgagcctccagggagaagaaaccctcagatcaggccagtgcagctgcagcgtgggccaagtcagggccaatgtcaacgaatccaacctgtgctaactgagcaccccctgtgtctgggcaaggtgctgagcgccaggagacagcctcatggaggtcagagtccctcagggtcttttcttttctgggtcccactacctccccaacccacctggtgtgtggctggcaccacccatctgaaaggttctcctcccaaatacaggctacaacccccctggccaccaggctgagctgcccaggcccctggagaccccagagcattcccagcctgaacctaagacagaaaacgaggtgaagtctgtcctaggacaagtcctgcccagggcccaggtcagaatgaggacctaccggccaggtgagaagggcacgtgcacggccccatagcctcgaaccacatcgttcccgaacacatctggtccatacacgctgagcacgatctgtggcccttgggaaggacaaggcagggggtgggcacatgaggacacacaggggaggtgcagggcagagaacagggcgtgtccagctgagggtgctcaaaggatggagctcaaaactctggggtggcaggcttgagaggggacaggagcaggcatgggaacccagactgtgccaaagacttctgcccaccctggtacttcctgtgtctccactgaggcctgggcacacattccacaccccttctcaccgctatggagtcagt

SEQ ID NO: 64470 - DNA, 1830 bp, Homo sapiens
cggtcttaggcactaggctaaggcagaggcggacagggtgggagcatggagtagtatccctgatgaaataggaaggcaggagacacctacaaagcatcaggccctgtcagagccttacccaaaccgtctcagtcaatcctcacaataatattataaaataataataaacaccacctccaacagcctggaaggacagtgtagtgaagctttgaggtcagataggcgtgggttcaattcccagacaggccagttcctttggtatatttccccagctgtaaaatgggggtgttagtagtgcctatctggtaaggctgtaagggtggaccagtgcggagcaccgactttgggacatattgaggacttggtgagcgttggtttatatttacaataaatgattcctctaaagtgtagggggatggggaatagcgtccctcgggcctagcaggcacaccttccttgggtcaattccaggccaccaccattgttggatggttggattcgaacccgagttcaaggatctggggattcagaacgcgggacagtaactccacacgggacacagcgcaaatgctggaaactcggccaagcctcggctcctcgcgttaaccccaggaggctcctgccagtgatccaagcaagtgggcatgacccgtgcgagggcccacaggcttgcccgagtgtgacctcggtactagctcaacatctcgaggtctgcttctattcctgcacatcgggactcaggatccgggcaacctcgcgccaagctctccaatgctggctcccctcccccgcctaaccgagaggctcagaggaatgacgtggctctccgggggccacagggcagcccggggggttgcgggaagggccccgggggacgctggggggcgggccccggcggggtccacggccgctcacctgggcgctctccacctgcccgttgaccatgagtagaaagacgctaggactcgcggtcgccatggcaggtctgggggtgccggggggacccacctaggccgcgcgcggttgctaagagacgccggcgttgccctagaaacagacggcgtagcgcgcaggacacgtttcttggcagcgacaccttcgcgaaggccacgcgagtgcgcgtgtggcatgcgcaggcgcagtgaacgggcgccgttataagggggcggggcacaaggggcggggatccacgccgaggctccacccctccttagggcaggtatgaccgagagctggggcgggagcgttgacctgtcgggtaaagccagccctaccgctcgactcagttgcacgcgcagggagtgtgtgttcactctgactcggcccggctccccgtccccgccgaagcgcagaggcgaatgagagctgagtcctggggagcagcgctccgactcacgccctcagcaagccgagtgtttaaaatacattcagccactagatgtcgctgtggccccaccgcgaggacgcggagggaggcgctgcagagcacgggcgacgtgaccacagctgtcggggctaactctggaatgccgggtgctcggaggagcctccccagctggggccaagcagcgtccaagcaggtgaaaaggatgcgcccctgtggcttggagacgcttgccctcgaaaaagtttattaaacaaacttgggagggacctcaagaatccttacatccaagccatcgctctttagttcgaagctggggaaactgaggcccgcagcgggcggcgcctggcaccccaatcagccagcgctcaggggagttgctagccaaaatccacgaatctgtcaagatacagtcttgtatcttagtggcctgtcacagagtaagc

SEQ ID NO: 64471 - DNA, 2415 bp, Homo sapiens
gccaatcaggatatgtttaaatctacctgtgacttggaagcccctcccctttgagttgtcccgcccttccagaatagacattgaacagacatttccccaaaggagacaaatggccaataagcacatcaaatcaatgtcaatcttgcatgtattgacttatgtattatgtcttcctgaaatgtataaaggctgactatgccccgaccatcttgggcacatgttgtaggacctcctgaggctgtcaccaccatgtccttaacattggcaaaataaactttctaaattgacttgagacttgtctcagatacttggttcacataggtttcttttaggggcgatgaaaatgttccataaaccactctacctaaaattaggtagtgatgatggctgctcaactgtgaatataccaaaaaacactgaattgtacactataaaaggatgagttttatggtatgttattaaaagttgtttaaaagtgagggacccctccagttattgatatggaatgatcttcaggaaaagagcataatatgctacatttttgtacaccaaaggggaggtaggtacgaatatgcatacatattgcttttttctagaagccgcctaggagtgaaaccaaaattcttcacttcttttcggccctacctcgagctccctttagaaaacctttccttccagctcacagtatccaccatgtccaccttcgcctcccggcactgagccttagaggggcggtgctccataaacatttgctacatgaatgaacgaataaactatcggattttggggtgggtcgggacagctcggttccagcgagggctccgcccacccgcgggctccgcagaggagcagaggttgggcggccgcctcggttaactccgctgcagcccaaagcacgggaatcgcgggacagacaaacgagcggagggaagatacctagaagccaggaaaccgcgagctgcagtccaacttggccggaagctgcggagaggctcagccaccggaagtcagtggagggttcggccggacgctctagaatcccggaggaccgggatctctgtggttggccgtgacgggcaccctctaccggggatgacacattcccagagctcctgggaccaagcaaatggcggacacaattccctgggcggaaggggacttcgggagccagtagccaaggtaacagtcccagacctgggcatctcaggccgggcagttccccgagctcacgggactagctgtgattggccggatgaggttgagagcttcatggggacgcgcgcgctacgtgcaggggcgttgccttccattcacttggcgcccgactgccagtgcgcatgcgtttgaaggcggtgcagggcggggagcacacccctgcgaagtgccgggcaccctttgggcggctcccgccggcgagctggacagcggcgcgcgccaggcgtggctttctcggccggtgggctaggattggacgcagtaggtagaaggggcaggaccctccgcagcagtagctcagcgattggccaggagctggagggagcgtggccttgggaggcggggcggagggggacggacagggcagctcaagacgctgaggtggtggctgcggcctttgaacaagtaagtgagccaccctcggagacccccgcgctggggacgggaggccggcgagcctcgggacctctgaaagccttgaggaggcgcgggggtgagtgcggccctgaggaaacccaggtgccccgcccctccctttcttcctggcccgcgcctcgcctacccctcccccgaccctggcgggcccccggctctgggcccggacccctggggtagctagtctgccacgaaccagccgcgcgcttctgcccttgtcggtttaggaaactgggaagttccctggtcctgctccccagcccgcagaggggacactgaggcccacggtaggtggtcctctcctcacccgagtctccacacagacaccatggccgagcctctgaaggaggaagacggcgaggacggctctgcggagccccccgggcccgtgaaggccgaacccgcccacaccgctgcctctgtagcggccaagaacctggccctgcttaaagcccgctccttcgatgtgacctttgacgtgggcgacgagtacgagatcatcgagaccataggcaacggggcctatggagtggtgtcctccgcccgccgccgcctcaccggtgagcttcctgagccgtcgcctcccagatgtggcagcgtcgcagggagtgggaaaccggcctgtcccagacagccgggaaggaaagcggggtgcgagttctggctccagtcaacacacactgaccagggccttctgcctgccaggctccggggaggctcggttctctgaaactccggcctggtggttttgccatcctgcctgcc

SEQ ID NO: 64472 - DNA, 1264 bp, Homo sapiens
agccccgcgcccccgcgtcccccgcgccgccatccgctctcggccgccacgccgggttcctgccgcctcccgacgacaacgtcgccgcttcacaggaggcagggcacccggcgagcggcgaccgcgaacgcctctgacggccgcccagccgcccccagccaggccccgtcgtccccagccccgcccggagtcaacccacctccctcctcggcgttccctcctccacccgcgtccccacccccgccccgacgtcccctcgctccctctcagagtcccttctaccccggggtccccctgccctctgggcttcctctagtccctcgttcctcccctggacatctcctcacccctaacccccggcgtcctcaccgctcctcggagtcacccacccccgcgtcccctagtccgccccggcgtccccttctcccctgcgtccccttctcccctgcgtcccctcgctccctcccagaatccccatggcccagggatccccccgatcctgggcctcctcctgggcatctccttaatcccaccccccggtgccagtccccgcaccccggcgtcccctcgccgggtcactacgcgacgcggaggaggcggagcccgagtctcggccgccgggtggctgctccgctgcggcgccgcagttcaggctgggatgctccagcgcgtctgtgttcccgcaccggagaaaccacactcgctagcgctctgaattggtgctggaattcaggaaagagggcgtctttcctccttagcctcccagccctagaaccatactgcagaaacgaggtctttagcgatgcggagtcaccactttggtgtgacctcgtggcgcaatggtagcgcgtctgactccagatcagaaggttgcgtgttcaagtcacgtcggggtcaaggttgggtttttttttttttctttcttaattgtagaggattggaaagagcggaataaaagtcataaatgagaaattaagccccctgcaagatatgttgtccttccaacgcaacggaaagcaacttctttttcctttccctgggaataaaaacgccgttccgttccgagggaggggcagcaccaaccctccgagcgaaccgcgagggagccggaagccacccagccgtgtcgcagggagggcgccccgcccgccactcccacgcccacttctgcccgccccccactcacctgggctctcacctggaaggggtccctcgcttcccggaagtgggttccccaccctaaggactggtgtcttttgcatct

SEQ ID NO: 64473 - DNA, 1165 bp, Homo sapiens
gacagtagctcttctagaattattaatatttccaaggctaagaaactcatcactagatcagtcagcaaaagaagattgtgtaagttcagaacttagaccaagagtgtgttccactgtcacccagctccaagacagggacccgttgattctgtgacctgcatgctgcgatggatcattcaaatgcacaacaggctcctgaggccatcacaggccgcctggctcttgtcaggccctcctggtggggagattttgaccacagttagcaaaggatagagcaaaggacagtttcgctgtctaaaaagcaaaatctcagaacaccggcagagggcgcaaacggcaagcccaggaatcacagggacgtcactgcgaacatctttttcctccaacatagaactaattaactttgtgcttgggtattctctaaaataatttctggaaaaccatgtaacccttgtacattttctaagtgggcataaaacattttcaccataattaaaaatagttgcgagggctggcatatcgcaaatagtaacatttaaaaataaaacgattacatcattgttttaaatatatccaatgacatatacacaacacaatttgatactgtcacccattttttaaaaatacatgaacaagttcttccttaacagtcagaatcattcatctttcctttttctcttcatatttccgttccttcccccatcaatttgtaatatacttttatgctgaaagtcttttatttaccactctaccatgactcttgccacaaaaatacaaatgtaaattgaaaattaaaatgtctcatttcctgagaccttcaaaggctaagtattaacaatttttctttgggatagaattatcactattttaaaaaatattttttggctccctcaaatcatgggaactataattaatatcaacacagcattgctacaaacaacacaaatatattacacatcttgataatgtattatgaggttttgaagttgtcagactgcctctttggcacctgacaagtgtttccaccttggagcaatgtgaggtacaatgtaggtgagaaggtgtctttctttagtgacaaatacactgagaagagaaaggagaaggcagttttaaccagaaacttgggaatctggaacagtagttgctttttttttttctttga

SEQ ID NO: 64474 - DNA, 1182 bp, Homo sapiens
caaaaaaaaggagtcatagtgtacttttacactcattttatcctttgatcctcccaataaggatgcatttccttttttttttttttttttttttgagacagagtctcgctctgtcgcccaggctggagtgcagtggctcgatctcggctcactgcaagctcaacctcctgggttcacgccattttcctgcctcagcctcccgagtagctgggactacaggcgcctgccactgcgcccgggtaatttttttgttgctgttgtatttttagtagagacggggtttcaccgtgttagccaggatggtctcgatctcctgacctcatgatccgcccgcctcggcctcccaaaccaaagtgctgggattacaggcgtgagccactgcgcccggccaaggatgaatttcatgatgcaataaagcttaaagcttaactctcacgaatctgttttttttttttttttttttttttttttttttttttttttgtgagacagtttcttgttgcccaggctggagtgcagtggcgtgatctcggctcactgcaacctccacctcctgggttcaagcgattctcctgcctcaacctcctgagcagctgggattacaggcttgcgccaccatgcccagctaatttttgtatttttagtagagaaggggtttcaccagacctcagatgatccgcccgcctcggccccgcagagtgctgggattacaggcgtgagccaccgcgccgcctcctgtgtttttttaactgtttgctggctttgtttctgttttactttctagattctgtctgattcttggccaggtctgtttctggcttgtgttctgatttgtatacagcgacttatggccccttcagtgaggttttcatgatctgaccattaggcgaactctgccagacagcagactgagcaggaattctgattattggtagtagatttttgttgttcttgttttggtttgtgtgtttatcttggagatcccaatgtctcctggctcctcagttttgtctttattgtttatatacagtgtgagtgcaatttattcaattagaaaagggccttttctttccctggaatggagagcagcctttgattcctgtagctcaaccaattggtcagttttgagttctgcgttttcctttatgatttgtgggcaaagttaacaaaactgaaaaagtt

SEQ ID NO: 64475 - DNA, 1687 bp, Homo sapiens
ccctaaccagcatcaaagggtgtacccaactcaatctgcacagcaaatgcgcccaaccccacacaccccgcggggtgctaaccgagtcacggctcgaggcctctgggtccttccacgccaggtcattcagaacctgaaacccccagcggaggtggagagccggggtgagtcctggcgtccgagacgtggaggacccagcccccggagcgcgttccgttagtttacagagctttttcaaactttgccttccaagtgcaggagttccttggtctttgcaagacccgcaggcgtccgcagtggtgcagagagaggtgcaaggggcgcgcccaaggtcgcaggctgcctggctgcgcgctcagtcgggcccccgggcgccaggcgcggggcgggctctgggcgggcggccggggcggggactgcagagcaggctgcactgcgcggtacccactgccggcctgcgcggtactcactgccggcctccgcggtacccactgccggcctccgcgctacccggccgcagcgcgcgagtcacatggaagctcctgaggagcccgcgccagtgcgcggaggcccggaggccacccttgaggtccgtgggtcgcgctgcttgcggctgtccgccttccgagaagagctgcgggcgctcttggtcctggctggccccgcggtgagtaaggtggcctcagtggcaggccggtaccggcgggctggggacctggtgatttctgcctccgcgggtgactttggcgggctttggggaccgagcgagctgtccgccggcgggctccggggagcatcgtgccaggagccgggcgggcaccccagctcctctgcctgcgtcccggccgctttccgctccgcaccacccgactgggggccccgcggggcactgcgggaacggctggtacgcgcccgggcgcatgttggctcggagaggccggcggctccagcctcctgcgccaggagacaccggagagctgggacctttgcccctaacggggctctaccaggtccaggctgcatttgcatccgggggtgccttctctgggagctgattccggccaataaaacgcaagttgcctgaacttcaaaacacaagggaacttgtttctttgaaaagtagcggtcaaaagttcgggagctctgcgatctaaataatcccgaggcacggaggagggggtgcgtggtctgtcgtggactcagagctgcgaaatgatttcttcagaattcagtcaacctctaccgaggaaaccagaggcatcctgtaccaccccctccccgccagtaattatgtatgtgaaagaaaaaaggggttttaatgtggttctttgtggggtcgaggtgttcttatctgtgggattcttttctttttaatcattaggttagggctgtttctgccttgtctcctaaaaataatgtggttttaaaaaccacaaaaacacaatcctatccacgttctcctgccagcttgggtggttttcaaaccgagagggtaggacgcggcacaagaagcaactggtatgcacttaaggcgtgaataagcttttgactttgaggcccacattctgcacctgcgcgggctgaggggggccgctgtgcctctggagtgggggctcggtagtttgtgggatattgtggcacccgctgtggtgtgcaggacagcaagggtaatgccgaggtcaaagcc

SEQ ID NO: 64476 - DNA, 1282 bp, Homo sapiens
gtaatagctgccttcttttccccagaagcaggaggcacagatggccattttgtagttatgatgggatgcaaaaacacaaaacaaaatacccaaaaaacgctggcaacacagtccactgtagagtgtcagctgcctgctctcgtgatggcagggctgatgggcagctgtggcccactgccctgacaggcactgcaagtctgagactacacatcactatccggggaaaagatcaatatcccaaattccaagtacagtttctactgaatgtacattgcttttgcaccattgcaaagctgaaaaattgtaagtcaggaccatctgtactgtgggtcccgtggggcaggaatggagtaatggtgtctaactcacacctgttcccccagtgctgggatgtactttgtgctccaaagacagtggccttatgtaaccatctgagttgagagtcaggtggctgggctagttgcgaaacctcctgggctgtgcttcctcacatgtaaaagaaggggggctgtcccaggtgacctctcagcttctttccagtgagtgaactttcagcaatcatgggagggggtaggagaggctgtctggaggtgcctggccctggagagcaacttctaaagctgccaggcgctgaaggtctttatctgactgccaagtttgcttattgttgtctggccaaaatctgagcagggtcactgtgacaagaagggacggaagcacggtcagtctggaagtttctttgtttgaagcagggtctcgctgtgtcacccaggctggaatgcagtggtgagctgagctcaagtgatccttcctgcttcaggctcctgagtggctggaattgcaggtgcatgccaccacgcatgctatttttggtattttctgtagagacggggtctctacaaaatgttgcctgggctggtcttgaactcctgggctcaagcagtcctcttgcctcagcctccccaagtgctgcgattgcagggataagccaccgtgcccggcccagtctggcaatttctgtcatccattcagctctgtccaagccactgccagttcaggctgttcttcagacagcagctgctgagacatctagcggaacaggcctttgtccagaattggttcattccccgagcacagaaatatgctctgtgacagcacagtcccagagggtctggagcactctcaaagtgtggccctggaccacatgcatcttgcctggtgtgtatgagggagcatggggatatactgaaatgaagattcctcagccccagggaactcctgg

SEQ ID NO: 64477 - DNA, 599 bp, Homo sapiens
ccgtgggtgaaaggtagccaccatatctgtgagctcagtgtattggctcagtcttagatgattcttatctgtggtgttggtgccttcaaggaagcctgtttttatttatgcctgttaaggacacaacagatgttcatctcaaggaacaccaagattgaggctactccaggacgtctggagtagagctggagagacctccagaatcatccatggagaagagtgcaaacttttattgtaaacaagggcaaagtctcacccatctcagaacccctgagggtgtcacttagaacctttagacttttttttggtctgctgcgtttgaccacacagaaccttaagcatgggttaatgtttgacacagcagtgtgtggccaatgaacaatgagagctaagtggtttttttgtttgtttgtttggtgtttttgagacagggtctcattccatcacccaggctgaagtacagtgggatcgtcatagctcactgcagccttgacctcctgggctcaagccatcatcctgcctcagcctcctgagttgctggaactacaggcacatgccaccacacttggctaattttttagttttgtagagacagggtc

SEQ ID NO: 64478 - DNA, 4694 bp, Homo sapiens
aaaacagggtcagggacagaaagtagcagagactgatattttagacatggtggtcagggaagtcttctttagggaggtaatattgaagcagcaattgaattaagtgagaatgatagctggacactacaggcaaaggaaacagaatgaatgcaaaagccccgggctgggaatgtgtttagaatgctcagtagtgtacagcaaggaaggcactctggctgaaactcactaagtgggagaatcctacaaaaagaggttgaagatgtagtcacgggccagggcatttagggcttgtagaatatgtgtagaaaaattcacattttgaattttattctaaacgtgaggggaggctattggaaagttttaagcagtgaattaacatgatcagggtaccttcggacaccaatggctaggtggagaacaggctacaacaaagtgttatcagagtccagtcacgaaagataaactatctagttatttcatgcagagggaattttaagagtaatagatgtcaaaaagaataatggagtgacatcatagataaaaaagctgctaaaaatacccttagctggaaccaatggaactgcaccagcttctgtgccatttggagacactatcactttcatcctctgtctactagagaggtgccaccttgaccatggaaggaattcctagagtaaagaataatccctcctccactttcactatagaaatggccagcaactgccacacgattgaatccagaagcagtaagttactctccacctcctgccttctgatttccttatagtgccccctactggcagaagccagcgggcacgagagcctgggaaatggggttcacacactctaggtccctgcagtagagtataaaagggcaagtgtagaactgagaaataacaatctctagagtcaagagtagaagcagggggccggcgaggtggctcacatctgtaatcccagcacttcgggaggctgagggagggggatcacttgagcccaggagtcggagaccagcctgggcaacatcgcaagccctcatctctacaaaaaatacaaaaaaatttagccaggcatggtgacacatacctgtagtcccagctacttgggaggtggaggtgggaggatcacttgagcctgggagctggaggctgcagtgagccatgatcatggccactgcactccagcctgggtgacaagagtgacaccttgtctaaaaaaaaaaaaaaaaaaaaacccgaaagagtagaagcagggaaaccatcaggatgcccggcctgttttttctttttcatttttttcccctcagctgtggtaatttagccaattcaaagaccttgttctccataatttcaactttccttcagatttgaccaagtcaagtagagctggtcaaacccaatgggaaaaagaccaaaacaacaacagaaacaaacaaagaaacagttaagcaaaagaaatgatcgcacaatttgtattattgagcgctctaatggtaaggagaaattaagaccagctggttgttaatcttaactttagtcaccaaggagagtttccaagacaaaactccaattcaggtgcttacctaggaatagggtccaggctcaagactgctctttaccattttagaaggagaaaaaaaactcagactcaccttccctgctggaagccagatgaaattccagaaaggagttgcctcccctccatcgtcatggaggcaggaaaacgcaccttctttgttgggagtaagtaaaactgcagacaaagaggtgtacagcaaaataaactttagatctcaaccaaattttgggacatcagggattctctggagtggggtgctcccaggcctcagcaaattgtcctgtttgagcaataaaaatagcccaagctggtaccaagcactgatagatttgtcaaaggtcagggccacctccactgagtcacttcctttggctgccagcttgtaaaccaaaaccagctctcaatcaatttggaagtttattttgccaaggttaaggacatgcttgggagggaggtctgtgcctttatctaaagatgattttgagggcttcaatatttaaaagggaggagcgggctggaggggaaagagggagaacatggtcattactgaatccacacattgcacaaatagaaaaaggaacaggcaggggaatagtcaattatgtatttgcctcctgctgtgtaaatcagcacttcagtaagataaggtgaggacagagcagctacctgtggggacatttaaccttttatctgtagctatctgcttagggacatagagaaaggcagtttcttgcatgactcagctttttgcttaattttttccttttggcatagtgaattgagctcccacggtttttgttgttttgtacataagtggagagttcatttgggccagggccccgagttattttcttttcacaaatataccctttagagttcagaggaaaggctgggattagagccttctgtgagcactattcatgggattacatgagggagtggctgtgaaaagagggccccggactaagccctgggcacctgaacaagtgagaggtcaggaaggggagaaaaatccagcaaaggaaccccagaggacccggccagtgagctaaaaagaaaagtgcagaagagtgcagggaaatggtaaagaaaagaaagctttccacaagacaggaccgatcagctgagccaactgctgctgagtacagtgatgagagctgaagtctctcgcccgaaaggcaataaggcgggagggggaaacctgagggcagcgggttctctcttgggagcgggaacacggaaccatgggcagcgaggcaaatgcagcctggggagaagctctgagtaacggacgtgcgaggatgatgcttgtgcaagaaggaaatgaccgctgtcccggctccgcgggagacgaaccccggcttcccgccctcagggactagctctccagggaactgggacggtcagtgccggtcgaggcagctcctcgctgaaggaaggagcaggggacagggaagcggaatggggagcgctaggcctccaactacgtccatctggccatgtttgaagagccacaaaatggaggagggaacccctcagagcgtgccagagcggagactgctctccgtcgcagtcggggcgcttccggcagggcgcccactcccagccgagcgccctccgcctgctcctccaggattcctcttcgccctttctggggccgccccggggcgctctcagcaggatggccaacaccttccctccatccctacaccccgccgccccctggcccgtggccgcgctcggctcccgcactgctcactccaccccctacatcccagcccgctgccagagccggggagagggcgggggccgcgtgggcgaggccgtgaacagcggctgtcacgtgggccgcccaggccaataggggtgaggctttgggtcgagctcagtcctcccccggcgcctccgactggcagtgggactcagcgggcgtggaggtcgcggctgagcgagcgagccctgggcgagtgaattgtggctgtgggttgacggtggagacaccccccggagggaggcggagggaagggaggcgaggcctgcacctgcatgcttcccgcctcccactccccagcgcccccggaccgtgcagttctctgcaggaccaggccatggagctcgaagtccggcgggtccgacaggcgttcctgtccggccggtcgcgacctctgcggtttcggctgcagcagctggaggccctgcggaggatggtgcaggagcgcgagaaggatatcctgacggccatcgccgccgacctgtgcaaggtacgcacgcgtgcggcggggtgtggggaaactggcccccgccgcgcacttgtggactggagcttcggctgggttttgtttttgcttttacatttcggattactccagcactgggagtatgatctccagcgatacagataaagccaaagttcccgcagactttcccggtcctctagcactcagaagggcatatgttacctagcttctgtggttccttttctgccttttctattcttgtccatttttctgttacatttgtggttcttttccttatgatgtgtaggaactctttgtatattctggatttaagtaatttgtcagtttactgtattgtggatactttctttgggtttctttcttttctttttttttaagccaaatttagcagtgggagagttgcataccaacttgaataacagtaatattaataagttctgaataacccattaccatcagaccagcctctgggtctatttcttgtcttttagctttgtttatggtttctttgttagacagagttttgtttttaagttatagttgcagtcaaatttttcttcataactttgtgtattattaggtcagttctcctcaaattttaatgcactaacagtcacctggggatcttgttaaaatgcagattatggttcagtatgtcgggggtgggatctgagattccaagtttctaacaaggtccccagtgatatcatatgcctcttttggaagcacgctttgtgtagcaaagtttttattgttttgatttgtgtgtgtggtttttttgtttgtttgcttgttttgttttgcttttaagacggagtctcactgtgtctcccaggctggagtgcagtggtgcgatct

SEQ ID NO: 64479 - DNA, 2035 bp, Homo sapiens
tttttgtttttgttttttttcttgaggcggagtctcgctctttctcccaggccggactgcagtggtgctcttttggctcactgcaagctccacctcccgggttcacaccattctcctgcctcagcctcccaagtagctgggactacaggcgcccgccaccgtgcccggctaattttttgtatttttagtagagacggggtttcactgtgttagccaggatggtctccatctcctgaccttgtgatccgcccgcctcagcctcccaaagtgctgggattatagacgtgagccaccgtgcctggcctatcatcttgtttttactttttatctgcattacatgtgtagcaaggctttgctctgggtttgtgatttttcccttccccacaatcccctcaatcaaagattattttaataagtcgtaatagtggtagtactagtagcaactatgaaatttcttttagagtacttttggtggaaaggggctgtgatattaaataaacaagatggggtaattaagattccaaaaagtctgtgtcatttaatcatacttgaagaactaaatgtttgtgtgagtatgtgtgtatataggatgactcaagaaatacaataagttccctgtcctcaagagttttaaacttgactgggaaacagaacatacacagatgaaatgtgagtgatagttataaaccagtgtgttaaggatgaatattaagatgcaggtcaaaagcatgattgctgtaatatataaagtgtgttcagagcagacctttattgctcaaggaaatcttcctgaaagaggtaatatttaagcctggcttttaaagggtgtggattactaaagaaggatttactaatggtattcgactagtgttactactccctgaaataatctttgatttttttaaaagaaatatattagagaattagcaagcccttaccaggggcgtgaagggtgcaaaaggagtctgaatggcaaacagctagtctgataatgccagttgttgtcactacaggtgtacctggtgtgagtgttctgacattcagggccaagtgtatcatacttactctgcaagattaactgtgattctcttataacagagtgaattcaatgtgtacagtcaggaagtcattactgtccttggggaaattgattttatgcttgagaatcttcctgaatgggttactgctaaaccagttaagaagaacgtgctcaccatgctggatgaggcctatattcagccacagcctctgggagtggtgctgataatcggagcttggaattaccccttcgttctcaccattcagccactgataggagccatcgctgcaggtctggtgccaccttatgtctatatacctttttagggaggcttattttctcatattaattggaaattaaggatagtggctaattaaatacatttacttggtgatttgcctttgtttacaccaccagtgtactgagaattcatacataccatacatatttttaaatgggctgctgaggagatttgtgtggctatgttttgaagcacctggggaatgaacctgtgggagtgtaaagatgtgtgagtcagcaggcccaggagtttggagtcaggcatccatgttctaatatggtttcagttgctggctctggcttcggatgaaccatttgattctgtctgaccagtttcttcattcaaataaagactatgagagtaatgctagcttgggtatatagcaaatgccaggagattaatttctcactttgcaggatccagatagagagatgtatgttgaaatggctcacttgcccaataattccagggcagagaggacaatctaagggcagaagtgggagaaaagcgatagaaagctggaggagtgggaaaggctgctggaacccattgtcagtgacctgaagatgaggacagctaaggagttagccttagaagagaaagtgagatgagctcttatgctaattatgaggatatgcagcattgagagctgcagaaataattgggagtacctagcctgttcttcccactgaaca

SEQ ID NO: 64480 - DNA, 623 bp, Homo sapiens
taggaaatgctgtgattataaagccttctgaactgagtgaaaatacagccaagatcttggcaaagcttctccctcagtatttagaccaggtaagaatttcttgactcatctccaacatatgtgtttactgtggaaaacacacattttattttcttgctattgcatgttattgctggccggggacccaattgcagtctctttaagccttcaacagttggcttagcaaaagaagttcggttccaaaatacacggagtgtattttgtgtggagtcacccagctcttggggttacacaatatatgtaggcccatggcttcatgccaaacagattctgtgtttgtctgggatttggggttaatttttgagctaacatgattttaggtgttttcatttaatggattatttaatgagggactggtactgtgctgggtgctgacatatttctgttactaacaatctcttttgttctaacaaaatgtacttttctgtgattatataagagtactttttttttttttttgagatggaatcttgctctgtcacccaggctgtagtgctgtggtgtgatctcggctcactgcaacctttgcctcctgggtgcaagcgattcttctgcctcagcct

SEQ ID NO: 64481 - DNA, 805 bp, Homo sapiens
ttgctgagctcatgtaaaaaaacactggagtctccagattagttctatgtgggttcatgcttcccagatgccatcggactgtgtgttctcctcttgtccttggtcagttccctctcccatccctcacagggactggtcttgacactctctgggttttactgaatgttacatgtttatgttgaagagattgctgatgttagacgttaggatttatttggcagtgcaagagtttgtgtttctctttctttgaggatctctatattgttattaatggtggtgttgaggaaaccacggagctcctgaagcagcgatttgaccacattttctatacgggaaacactgcggttggcaaaattgtcatggaagctgctgccaagcatctgacccctgtgactcttgaactgggagggaaaagtccatgttatattgataaagattgtgacctggacattgtttgcaggtgagtctggctctctgattttctgaggttttcccagcacaatggagacttttcctgacaatgttactctttgtacttgaaccccataccttatggctccaagatacattattaagctttggtggttgatgtcctcaagagtaacaggagtctttcactgtctcttggcgccactgtcaaaaatggtgagctgtaagtcctgacatcatgtggttgtccttaggaattttaaaaaagttatatctgttctcaagattacagctagatctagcaagaaattttaacgttcttctggccagtgatctgtgaagtacataatccaaagtattgtgtgtgcctaataaa

SEQ ID NO: 64482 - DNA, 553 bp, Homo sapiens
agattccaggtcagggttccaggttggcttcctaagtagaaatccatttgtcaaaaccagacaccctcagttagtgaatgtttagggcatgggtttctgcccatgcataggaaaggtcttcccaagtggggcagggctccacaaagaggaggatggccttggaggctggctgacatcctgctttatacctgaacatcttgcaggcagagccaaaagccacaaccaggagagtctgtaccgaactctggtcatccaggactttcctttggctggactggaagaggggaaaggacattgggaggctgtttctcctcttttcctgcagcaggcaatggcttcactgtttaccaagtactgtttgccgtgagctggcctgagaacttccctgctatgtaaaatattccacctcatttggaaaatactttctaagttccaaacaactgatttagaaatgagtttttaacttttttataaaaattgccagataaatatatgaatctattttagttgcaagacattcaaacaacacaatgtaacaaatgaatatttgact

SEQ ID NO: 64483 - DNA, 889 bp, Homo sapiens
tactcttaacacagtggttctcaagctacatgttaccctagtgagccatttaaaaacaagtttgcaagccttaccctccaaagattcagctcgtctgaggcctccaggtgattctatgatgcattcagcattgaaaactactgttggtgactctcgagtcagagcccaggcacatgcattttagcaagctgcaccagtgattccgaccacccagacttgagaattgctcttggtagaggttggatgaacaatgttcattttgatttgggatgaaattgggaactctcacaaggctttgaagtgatgcagcaattcagtaattttgtttgttttactaagtaaatattgattgtatgattattgacgttcttttaccttggtaatttaccaaagctgtattttgatccttcgggtggtttcaccatcatgtgtaagtggtggaaataccagttcaaagaagaccaaaacaacaaagtggagcaaagattggcaaatggtttctgtaaagggctagatggtaaatatttcaggctttgcagatgttagggtctctgctgtaactaccgaacttactgtagggggaaagcaggcacagccaatgtgctaacaaataggcaactctgatgcagagcaagacttctttccccagcctgctcccactgtcagccccaggaggtgaaggcctgtgggtggactctaagagatccataagaacctttggaactatggacaatgacagatctctgtgtgtgtgcatgctttattttctggtcctcgacctgccaaaaagctgaaacttgctactatcatactactgttaaattacttgaggggtggggtgttagattctgtgaggatataaaaccagattgattttggggcatggctg

SEQ ID NO: 64484 - DNA, 1535 bp, Homo sapiens
aaatgagagccacagctctagaagaggtgcaagtccttgtcttgctcatggaaagcatcctgtttgacagggaaattgacttttccagggaagttggtaaggacttcctgaaaagagatacttcagctggcagagatgttcagtggggttcccaggcagcagggagtgcatgtgagctttcccggtcgttgttagacagaagtagcttgcatcatctacagtgaagcttgttttgtctgttccctttatttcaggttccagtgggatgggagcttatcacggaaaacatagttttgatactttttctcatcagcgtccctgtttattaaaaagtttaaagagagaaggtgctaacaaactcagatatcctcccaacagccagtcaaaggtggattggggaaaattttttctcttgaaacggttcaacaaagaaaaactcggtctcctgttgctcactttcctgggtattgtagccgctgtgcttgtcaaggtgagtccctataacccatgagtgccattcagtctggtcctggcctgatggctgccagatgcatattctagcaggactctacattaacttgtagagtctaagacagggtcagtgaaccacagcctgctggccagctacccgtttttgtcactgaagttattggaacacagccacacccacttgtttaatcatccacagctgctttcatgggacagtgacagagctgagtagttgcaacagaggctgaatggccctcagagcctaaattattacagaaaagtttgctgatctctggtctaagagattaaaacagcgtagaacttgattgcagaattctgagctgtctgatcaaagggttagccctttgatccttttggtattggactttccttgtcacttacagctttgttcttgaatgtgcatgaaatcagcttaccacagaggtgaaggcaagaactctggtacaacagctttggtgagggatattttattaggcttgagtttttttcctccaaagttcactacctgataaagtttatctttggtgattagtcattatagggatgggcttgcaaagaggccctcatgatagctgccttctcaaagcagtttgcgtattttgagatgaaagaggaaatccgtaattaaagttaagatggaatgaggaaggcaattgtgtctgtggtgccctcagccgttcaactgaggatataacattgaaaatattgaccatatcagtgaagaatgggcttggaaaaggcaatggtaatagttgtgtttatgttttgtttaaaatttgaaagggggccggcgcagtggctcacacctgtaatcctagcacttcgggaggctgaggcaggggaatcacgaggtcaggagttcaagaccagcctgaccaatatggtgaaaccctgtctctactaaaaatacaaaaattagccaggcatggtggcacgcacctgtagtcccagctactcgggaggctgagggaggagaatcacttgaacccgggaggtggaggttgcagtgagccaagatcatgcca

SEQ ID NO: 64485 - DNA, 724 bp, Homo sapiens
tgggagggacgcctgctgctcagggaggggcagctgtcagcttatcagcagaggctgacctgggtcagatggcaggtccagcaggcttggaagataaacctggcagctcccgaggccagccctgcctccagcatgccagccttcctgtggcccaggctggtgactcaggccaacgtttgaaggcccaccaggagaggactccacctacctatgctgagcacgcccgagacggccgagcgcttggcctgcacagtatccgcagcccccagagccatccccactcggacacagaccccgatgctgagccccaagggaatctgggatcaaagataagaaagcactgtcagtgggcccaccctccaacccctgaagtcctgagccagcctgggccaagagggacgtgagcgggaaggcagagcagatctcaggcatgcagtgtaagaggcacgtcacattcttgctgctgacaatgaggcagggagggctggggctgggagaagggtgggggtacccccagtgacacagccagtcccaccaccacctgcgccatcagaagcagcacaggcaggcgggccttgcaaccgaaatcactgtgttgtccaaatcaaatgagtaaacagattttaaagaggtgactgtggtcttagtcccagaaaagctccctgtaagaaaaaagatatttcagcagaaaccacttgtaaaaataagaatctctaaattgatt

SEQ ID NO: 64486 - DNA, 779 bp, Homo sapiens
cctgggcctggggtctctgttatgtgaaaccagctgcttccagctgacagggcctctggggagagcagtcacctgctggccttggcctgtcacctcctgtcgcagcattgcagtgagccctgcagccagaagcaatacttcttgggagcccatggcgatgggggtgttcagggagcccacacgtggaggtataggcagaagaatccatctcactccaggtcacttttaatgaggacagctggttcccgtgcccccaccaagctggaaggtgttcagtgcagacgccccgccatcagctcggtgacatcaggctttatccagagctgaccagtgttcagcactcagctgcacaggacaaaggtcgggtcatcttcccgagggccagtcctaggccgagcatctccaaaatcccttctcaggaacattcccaggatttttgtgatagaagccaatgcattcctacattttcttcgggaagacactctcctcctacactcctctcagaatttcaatccccagaccccagtgggtttgaccctggggaggagcaagggcgattactgactccactgccatgcattggccgccccaggcaaaggtggtgcaggcagagtggggggtggggggaagccacctcctccaggtgaggggtgtcagagctccgtgagtcctccatagtctcctggcaatgccttcaggccctccttttgtggtggtaactgcagactcagcagcaccgccctgcagccacctgcagactcagctccgagttgggtttt

SEQ ID NO: 64487 - DNA, 578 bp, Homo sapiens
tgtggtctcagatactgcacacaacagacggatcagcagctcactctcaggaacagggctgccaatcccctagaatatacaagcaagtccgggcgatgctggaccctttcccttctcagctgatcacttgtttccaaggcccttatttcctggggcacatggcctatgacattctcccgatgccagttgccgtgtcagccacgttctctgatggaaacagtagaaacgaactgggatcatgtcagcagatggaagaagggaggaagggggagaggagatcattattgccaggtgatacagaagagggctgagccgccagccttgagaagggagactctggactctcagggtgattcagggaaaggtgactcagcccaaacaccttcagtcccagaggcaaattcctggaagactggggcaagagccaacctgaacaagaatggaggtggaaagggtgggaaggagggaagctgtgagctacctgaagtggggcagggggccccccagaggatgggatgctatgaaagtgaaaacatggctacacaccctgcctcatttatctattaccagccccccca

SEQ ID NO: 64488 - DNA, 636 bp, Homo sapiens
tcctggcaagcccccagcacacaccctgggattagggaggctcccagccagcaagaggaagcttgacccagggggagctgctcccccagccccagcagcctcgctgaggcagagccaagaggcatgtgggcatgccaggaagtccccctcacttgagggctcagctcctgcaggctcggagcctgctgggggcaagggccaggtccttgggccctgccttcacgtgactaatttcctggagtcctgccaagtacagtctgggtccagggcctctgttaaccttttctcacttggttacacctcactgggcccaaaggtgttgcatttgccctttggctcccagagacatgcaccacaagggctgtggaccaatgtcctttcctctaacccctctccgctgcctcctgactgcaaaacacccatttctcccttgggagggtggggactctggctgatggctcagccccacattcagggcaaaggacagttggggaggattgagctgtccgccccctgcctcgtcccccaggtctcccaccagacagtgaccaacaactgctaaatccctgaggcgcccctcctccactcctcctcaactgtctcatagattttggcagctgcctctctctctctgcc

SEQ ID NO: 64489 - DNA, 1745 bp, Homo sapiens
tcagaatatgaggctgagtctgtctcctatccaagtgcacatcctttctacttcatctgggatgacagatagcttttctccagcctgccagttctactctgttgtactgcattgctatattgtgaattcagcggattcagcaaagcaaacaagagtgcggtgatcaacttgtaatgtctgccatggacactggatagaggagtaacagtatgtgtgcttatggaaaaacctctccaacttacatcatagtgagcacaggtttaggagcagaactagaaagaaaatatttttttctgtctgtctagcaactgttggcctgaaaaagaactcagtgtcagaatggtcaggaaggcccagccttcctactgtcagggtgtctagccggggctaggtctctctgtcctcacccctttgccttcccaaggtagggaaggtgtagaaaatccagttgggaatttctggtagaaacttctactcctggtgccaatttctaccagtcagctaccctgtaaacttctatcaggcatacaagccttgggaaacagagagctgttgtcttgctcaagcacaagttaccagcaacaaacatttgtttcccagcagatcacatgaggacttgtgagatcatgtctggccctggctcaaatagaagatgttccattaaagcagttcccggggaccaggcctaggcaactttcctaggatgggcaaggcagttgttcgggaagcttggcacctgcacagccccattgtcatgtgaggaaacgaagggtgtgagctttcccccacctgtccacttagaagcgtgggtcaaagcagagaagaggggatatctccttcccatctgcccttgtcctcccaccccacccaggctgaggtgcctcctactcctcctgctctgctaagaggctgagatctgtctgagctgttggcagaaccctagaaagtgctcccaggtcatcccaggcctcccagaggcagggtctggcagggtggagagctgccatcatggcagagaactgcagcatcaggcagggaaaccaaggcagggcccaatgggtgtgggtgaaagctgcacatccagaagtacacggcttcccccaggcaccgcagatcctggccctgaacgacaagagtgcctgacctcacgattgccagcagctgcctgtcctgcaaggcctggccctgtgccagggcagctgctttgcgtgtggctgcctctcctgcccaaacaatttctgttgcctttaggaatgaaggagctcaggccaagcccagttggtgttttcaaaatttcctgtaaacaaaggaaaagatgaagcttatataacacccttggctggagaatcagcggctgcttggcatagctgagagagaggcctgggcgcagacagtggtgtgtccaggcaggcaggggcctgggtcatccctctcaggactattctttctgaaccttctgcaaactctccagtgacctctggggcccatttcagaggtctgagcagctcaggcttggagaaccacagagctagaaggaaaaagtattggaaataataagaactaatattcattagcccccgattaggcgcaagtgctttacctgcacaatctcatttaatccacaccaaccctaggaggcaaacactgaggtaaccaattagtagctgaaagataggcccgggggtgggccagccacccacgttcacatggttgggtatgatcgatcacttggccctcagcttccc

SEQ ID NO: 64490 - DNA, 958 bp, Homo sapiens
cacatgcatctctgtcagcagctcatgcctttagcactcggctctgctgccttccttccagtcatggagtctgacggcccatcagggcctctcactccacggccaccttggtgtccctgctccgcggatccctgggacctctgcctcctggtttgggggatggcagagctgccagaggtccaggaggatgctccagagatgatggtcccagaggcagggaccccctggagagatgatgtaggactcttgacacttagggccccggctctgagtgcagactccacctagacaagagaaaaaataaggaatgcagggaagaggattacctttgacacagcctctcccggtaactggggctcctggaacggcaagagccaagaggggacgtatttaaggaccctgcttcccgtccattgagcccttggagttcctgcccaggaagtttgcgtgacaagaaaaaaaaatattcaaatgtggggtgtggcgtcctctggacctctgctccctacagcccaggttttggggattaggtcccgggctgtttgcttttgttcacttctgaaatgcgagaatgtttctgaaggcttgggcagggcacatctccaatcttcaaaagagcctatgtttgccctgggcgtgggggctgctgattgattcagcctggcatggagctcttccagctttccagacttgccgctgccagatgcggttctctgagttctctggttacataagatcggcagggctcagccacgaaccacagtgagagcatgcagctcccccgaaacgcacccccagccaccgctgccccgggcccttcacatcccccagtgtgcacagggccccattgagtcagagatcctaaccctggggagccacaggctggggacttttgatgggggtctccaatccataaatctgctctctcgttgaatagctgagaagagggccaagggtc

SEQ ID NO: 64491 - DNA, 2191 bp, Homo sapiens
aatcatgccagtgcactccagcctgggggacagagtgaccaggtagaccctgtctcaaaaaaaaaagagagagtagaaaggagaaaattaggcagtgggtctcagggacctccccgttggttaaaagtgttatgactcaggaagacaaatgccacatgttctccctcatgtgtgggagccaaacaagtggatctcatgaagatagagaatagatcggtggttaccagggctgggaagggtggggaggtgggggaataaagagagcttgcttagtgcgtacaaacacatatttaggtagaaataatacgacttagtgttcagccaggcacggtgactcacacctgtaatcccagcactttgggaggaagaggcgggcagatcacctgaggtcaggagtttgagaccagcctgggtgaccaagcaagaccctatctctacaaaaaatgtaaaaatctgctgggcgtggtggcacgcacctgcagtcccagctactcggggaagctgaggtgggaggatcgcttgagcccaggagttgaaggccacagagagctgtaatccagtcaccgtgcccagccaagagcagtcagtctgttacaaagccctctgttactgttacaaagcccctctttggagaggcatgaagtcagcagaactggctgtgcccggggcaatttccccactgtgtccacaccttctggggacttgtaggaaaggacttctggggcttcttcatctctttatctgctgccagtcatagtgccttgggtcagagaagctgcaggtttgcagccagcggaggtgagtgcgagcaagggggagcctcccctaagatgctgcagaggccccagtcctcaccccatctcccttggactttcctgctcccaggaagctgtggctcccaggcccaggccctggctcccaggaagcctctgccgagtcaggacaaagggcatcttagcggggcagaaggcatgagtgctggctggaggggaagtgggtactagggccatcctggctaagtcagcctgccaggcaggatggcagcaaagtgcaagtcatggtgagttaggcacgggcagcctcacagcaggaatgcccggccctcctagcccaggcggaacctgcctgagtcaccgcctggctgcagccccagctgcagagcctctgcagaccagcccacaccccggccatcctggaagggacacagcgggcatgccaggaggacatgccagggcacgcttgggttggtactgccagtctcttggggtctgggaagccccgtcctggatcttaacggacacggaatgcaccctcatcacacatgaaatataatgtttactcgaaaaatgcaaagaaaatttaagttttgtttcttcacaataatcacacaaatgtaattttacaaacataatacacattgtttagctcagactttttcttttgtacgtacttggtttgcccctttctcaatatgagtgtctcatctgtaatccacaatattttccctaagtttttctcagtgcttatttgacatacacaaaaatgtacatgacacactggaagctgtcagcattttaaaagcagagcctcatcatgcaccctcttctgcatcttctgaccccactccctccggggcggccgggagctggagtccattcctcctcatggccgtgtgaaagcagtggtaagcatgtagaatgtgcaagcaaccacaatgttccccgtggatgggagaccactttgccttccactttggatcaatgctccatgggccgctttgcatgtcttggcgtgtgtatttctgcgtgttagatcccagggatgctggctttgtcagtcttcacaggtgttgccggtgactatccaccaaggtggccctaaggggctgttgtagttccagctggcctggcagtgtgtggcactctgccgtttccctgccgcctagtggctggtgcattcctcactgtgcaatggccattggcatttgcccatttcttggaagggtttgtgttttccttgtcagtgtctaggagctctttgtatattacagccatctgcatcactagtattttcctgaatctatcatttatccacggactttatttatggtatattttgttatataaaagtttttataaagctaaatagaactctcctgttttagtttagattaggagggtactccttgccc

SEQ ID NO: 64492 - DNA, 1082 bp, Homo sapiens
cttctcaagccaagggcagatctgaccagccccaagaggggatcgaggaatctttggggcaagacagcagagcttctttggggaaaagggacttgaggactcacctcactgcttcccttaagaagggagatgggcttccggggagctgggagtccccaacatctagtgacaggggggcaccaagagggcagctctcacgttttctgtgagtttgtgccttttctgaggttttcctcagactctcaaaggggtccctgctggcgaccccttgggaagaagttacctcactgtcccttctcccctccccatgcaagacactgtcctttctcagggagcagcctgagaagcctcactgcctgggggcgggcgccctctgccggttgagggctggcccaggtctggctcagcccacggggcgctgctggcagtagggctggtcggggagacacatggggctggacaggtgtgtggggcctgacctaagctccttctccaaaggcagagaaggcactgaggtgggacatgagtcccaggggtggggcctgccgctgacagtgtgtggctgtgggggtccagaggcacatgacctcaaaagagtttgtttcaattcagacaggcaagggctagagtacacattttgtatttaaaaaacagaggacatagctaaaatatttatagaggatcgaccccatggttttttgtcagccccacagcaaggaaccagaacttggttttgcaaaaatcaatatgcttacatagccctgctgagagacagggcaacagcccaaggcctggctccccggcactgtaggcagctgttgctaggaacaggggcatcagatcccagcatggcagggagagcttcactttgcttgctgccaccatttgttgagcacttgctaaatgccaggcactgtgcaaagagcattttccccacacaggtaggattagaaagtagtagtcctcttatcttctctaatggatggaaaaactgaggctcaggatgggaaggtaacttgtccaaataacacacaggaagattaaaagtagaacacctcatttctcaaagcagcagaaaaaca

SEQ ID NO: 64493 - DNA, 1740 bp, Homo sapiens
ataagaaaagtagcattacttcatccgataagcaacaaagtcagcccacttttaacacgccccttgggcaacaatcagaactgccacaccctttaagattatttccactcccgatatgcctttccaaattctttagattctaaaacctcgtgtaactgtacttgcgaaacagcaaaggcttaaaacaatttttttaaggcttaaaggtgatttcatgttcaaggtgattgaaaatgaattgtccaaccacctttctcacccggagctcgtctatctgactccgggggggaaaacggtacgggggctcttcggggtgcaggggaccagtgctgggaaaggtgacacctcccaggctgcgaaagcctgaggctaatgggacatccgcccattttccgctgggtctgtaattatcaacctcaaaagtgaccagccctgggcacggggaaaaaaaccaaaggtccattcacgcccaaccctcgagtctgcacggtgcagtaccgtctattttgggtccagggtaacctgggtgcaaacgctcctgcgggcggaccgcggggtgggccccgggcacacaggaggatcagcagcagccggtcggtaggcggagcgctgccagaggcttgggcctcacaacaaccctcacaggaccaaaacaaacggcgagacgggctgcgcgcacaatagcatacccgggcggctagccgagtcgggggtctcggctcgcggctgcgccaagtttcagaaccacctagccccgtgcctgccgcccggggcccggcctcgccccggccggcgctcacctggcggtgccgcccccggaagaccacggcgaaggccccgtgtcccacgagatccctcttgctgtactcgaagtcacccaccacctccatggccgcgcccccggggcacacagcggacgggcgggcggcgcagtgcggcgcaggtatcagcaccgcggctccgcgggcccggagcgcgccagcgtgcggcgggtctggggcagccgcagccccgggcccgggcggactctcatgccgagagaccggagcggaaactggggaagctgccgcgcggagccagggtcagcgaggcccggcccggcccctgccgctcatggcccggcctgccgccggccgctggctgtctggcgaagcggcctcggcgctgccgggccaggggtgccgtcaccgtcactgtgcgcgcccagagccgcacacgcgctctgaggcagtgaggggcccggtactctccatccccagctcgtcgggcctcctcggccctccccgctcggggcgctgctgcgacggcgacggccgccgccctagaacccgcaccgccgcggccccgcgcttccccgcctcgcggcggcgcccaacgccctcgcgcgcgctacccgctcccgcgcgactggctgccctccgcgacgtccgcgcgccttgaaggccgcagcgccagccggctccctccgccggggaaaggagtgcggccagggcttggcgcccgcagctgggcagatcctcggccgctcctgaggcggggacgaagggcgcgacccgctgcggccacagcgggttacgggctgcgggctccgttctgggcctggggagcagattcgagccgaccacgccccgggctccaggccgctgggaggcggacttcagagaagcgggtcttgaaccccagctgcaggcaggacgggattatctgcgcagggtagacccccagattcctgccagagca

SEQ ID NO: 64494 - DNA, 2998 bp, Homo sapiens
gattataggtgcccatcaccacatctggctaacttttgtctttttagtagagatggagtttcaccatgttgtccaggctggtctcgaactcctgtcctcaagtgatctgcccatcttgggccttccaaaatgctgtaattacaggcgtgagccactgcacctagcccaaaattctttttcttatttttatttttggagacagagtctccctctgtcacccaggctggaatgcagtgacacggtctcggctcattgcacaacctccgcctccaggttcaagcgattcccctgtctcagccacccacgtagctgggattacaggcgtgcgccaccatgcccagctaatttttgtatttttagtaaagacagggtttcaccatgttggccaggctggcctcgaacccctgacctcaagtgatccgcctgtctcggcctcccaaagtgttgcaattacaggcatgagccaccgtgcccggccccaaaattcttaacattaagaactgtcttgggcctgtctggatcaggagttcaacccaggtccaatcaactggtgtgtgggcaagagggaggagagggcgagagaaaaggtcactgtgtagaaacataaaccccactcctgaagtcaggcaggtacccaaacactgtcactggagagaggtcagtcacttcatcaggtgcttagctctcagtacttaaataaaacagcaaagaagtttgtactttgttacaattcagaatgaccttcccctccaaattcctactgaactagtcaaacctccagtactgtaaactacttacatttcgaaaagctctactgaatgttgaaatccaagtagaaaaagttataaaaagttactccctgttttattgctgttcactggatttggctgacatttgctttttactttcatcaaatcttaccgaatgatgaagacacatcaagttacaaaggtaccactttctctctaatatcttttctttttaaacaatttgtgtcaatgtcaacaacatgataaagatgaagggtgttcaactgattatttgaacccataaaaactccaccagggaatcttattttgtgggcacaatgcacagagcctggaacatggtgggtgctcaatgttggaggaatcaaattccaactttaaaatgagtacaaggacctactttagatcaaatattaaatctggctaataatttcgggccacactccgcttctgtgtctcaaagcaggtggggcagaaaaaagtagccgagtctcaaatttgctgctattctctttataagcagtttacaactacttggcatctctagctcagaagcacaaaatgtatatacaaagaaatgattagaatttatcttaactgaaagcactagtttaaacagcctagagtcttgtagaaattgttattccaaaacatgcagaggcagcaagagttgcccaaaaccacattttattctataacctttatattgcttttctgttaaagattgaagcaatgtgaagtggatggaaatattttgttaaaagaacaaaatgaattaatcacagcatagatgactaataaaaaccttgggtttatgccatacacttcaaacacaaggcaaagtccagtagtggctcatgttctgggtttttagaaagcaaatgaaaatatttggaaagatcaatatatttcaacagaagagccataaatgccctgaaagcagaaagttgacacaattttaaatagaattcatatatatatattttaaaatcaaacacaattaaatataatatggtttaagtacatgaatacttcagctttaaaagaataacagaggtggtacatagtaccaaaaacttacacaaagcctttttgcttcttctgtcgatgaaacagtgtgcctctatacaatcaaatattgcaatggaataaattctctgttcattcaagactttctcaaggacaaaagtgattaataattatatatttatacatatatatatatatttttttttttgcaaagtctgagcaaaagcagtaacatctaagagaactttctttcctctcaatcatgtgcattgaggaagcgctggcgccacgtggtcaatggagtgtgctcaccaactgggcagtcctgctgatggctgtgtgatcccgatgcagaagccaactgagcagaagtgcagtgagtgagtctcttactatcctaaagaaaggagaagaaagacgaccaactgcacactttccagctcacagcaaagaatgggggaggcagtcaaagtcaaatgtttctctctccccagtcatcctgctcaccttatttaaaaaaaaaaaaagtataatttgggaagaactgctttgttcaaggtgccacaggggcaaaagtggagtcatcgctatttctttctttctttccacatgtattctgaagggaaagttaagtaactggagtgcagaattccaaaggggcaaatcctaatgctcaaagtaaaccagattcacacccttctgttagcaggggagagaatggttttaagtatagtgcatctcaggaggaggaattaaaatgtgaaaactatatactgccatcagaggaaggaggaagtcactgaaacttgacccatgacttgtcagtttccttccaaattaatgccgctgtcaagaagactgcataattaactctcaccctgttccgctgaagctgctagcaccacgctgccactcaaagctgcctggctctcggtggggctgactcacctgctttggaaggacaaagcaaaccacctctggcacctgctttacaatgctgattagggatgagttaccactacgagtgtgcatcaagtatcagttctatgcttatctgcttcccagaggatgtggtccctgtctattccagtaggctaaaacactctcataaatgggttattgccattggaaaactaataattttctagtaatgtaaacaataccattttgtatctttaagactctcactgtgtgaacatcat

SEQ ID NO: 64495 - DNA, 679 bp, Homo sapiens
taattaaaaacatgcactctcttacatgcagtagtttaattaggtttctcaaaattagagttatttaatacattgaattttcatgttctctctaatatattattaaattactcttgccatcagaaacaacttgaaacaatgatacatctttttggaaatgacttggctcttctgtgttatttcctatagacagggccccagcattgatagttagaggctggaatgctcgaatagagtgtgaaaagaaatgcagactttacctcagagaaataaaagagggctgactcacagaagagaatgtcagccaggtaaacagttccactggtcagcacttcaatctggtatttacagaaatggtgacttcgcagaaactcactaaagtgcctgcacatggacaaaagggaaaatttgagggaacgaccaaggaaagagtttaagtgggaaaaatatactctttccatactgtccctattgtatcttaaaggcctaggtcaacactaccttactccccatggtgtcattcctgattcctttacctgtatgtaatctctcccacctttttatgactttgtagttctcccctgacatttaacacatgccacttcatattacagtaaccaaacaacatgccctatgtcttttattaggctgtaacttccttcaagactggcactatgcc

SEQ ID NO: 64496 - DNA, 599 bp, Homo sapiens
cttctaaaaatacaaaaatcagccaggcatggtggtgggcacctgtaatcccagctactcagggggctgaggcaagagaatcgcttgaacccgggaggtggaggttgcagtgagctgagagtacgtcattgcactccagcctgggtgacagagtgagactccatctcaaaaaaaaaacaattacagaaacagactttggacttccatttccagaaacaggttagaaactcttcccaatactgaattctctcaaaatgttttttaaaaaggtgagtttgtgttaaactaaggaaaatagtgggaggcagaaacaaatacaggcagtgcccttatcttaaacatttggggccagtagtattctggaattcagaattttggagttttacagggacaacacattaagtttaacagagagcatattaatactccagcaccatctgggacaataccccataatcaaacaccatatttctacagtaagtataaacctgtactcatacaggatcagtacgagcacccaagacaaaaattcagttttaagtggtaccagaagggtagtgacccaggccccaggtgcatggcaaaagaaaatgcaaaac

SEQ ID NO: 64497 - DNA, 543 bp, Homo sapiens
tgcttagtaaattaaaaaaagaaagtgagacacatatgtacacacaagaaaatcacatactcacttttcattagttttcctgacaattcttttagtggagaagcgggactatttctactggctactgtaagtgtagaggaagattcttgggtttccatggaaacttggtgagttcctgctctggccatttcaagacggagagaatgggcactgtcacattcctgggaaagcagcaagtgattctgagtgctgttagttctattattcaggtcaattccttctgaatgagtcataaacaactgtgctgagccagaatcctccaatctcttatcaagagaatcagttaaaaaagacgctgtagtttcatgctttttagatggagagacaggctcagccagtgagctctgcttcactgtgtttagactgtgtgctcttattcgcgaccaagttgttgaatgaaaactttcagcctctaaccaaaatttcaccaaatgctccattcgccgaagttccatgaattgaatgaagtaagggaggacaata

SEQ ID NO: 64498 - DNA, 1993 bp, Homo sapiens
ggctggtcttgaactcccgatctcaggtgatccacccgccaagcctcccaaagtgctgggattacaggcgtgagccaccgcgcccggcctctgtctggtacattttatctgaagcaacaggaattgacaggaaaaatcactgctgtccacagacccatacttgctcacttcggatatgtatttttaatgaagtgcaacaacgttacccagaatcaaaattaagctgtttctacgtaaacattgggcaggtaatacaactggaaatcaaaaatgtaagtagttcgtttgtaagttagggttccagtagttagcaaacttgccaaagtcatcaaaagtagtggtcttcctgttggggaactttagcaataagtaattttattttagtaacagcagtaactacccctccccccaaagaggaaattggaagacagcactgggtgaagaaaacaattttttcacgtgttgcttttagacataaaaccctcaacatttggaaacttcagacttccataataaggttctaaagagatttccttgatcttgatccacggtcctcaaagaaacacaaaaaaactaacccccacctaagaactgttcttaaccaaacaggcaggaacttctatgggctttagcaatcgcttctgaaccagcgcgacaatactcctctgacctcgcgcaagaaggccaccttctccctcccagaagagtcccggagcagagcaaggcactcagggggcatctgcgccgaggtcgaggctcgctgaaggccttgctgccgccttggggaaagccctcgcaggcccacctgccccaccgccgcccctgaggcccggcctgactccccgccggcgccccctcagctacctttccgccggaagaaggacatggcggggcccgggtcgggacggagggtgcggggggactggcgcggggagggcccggctcccctcattcagcaaccggcccggacttccgggtccagaggggccgctgcactagcgcgaaaagggacccttcttccgggagtgggccccaccgcctcctcgggatgcccaggcagctccagccgccatattatcaacaagccgcccgcccggagttccggtccttccccgcgctaggcttcacgggaggtcaagcgccggccccgccccttttccccatccccctcccgcgggtgcaggggcgcacgcccgcatcgcccacgtgacccgcgcgtgctacccgcgcctctttcccgggccctgggtgcctggagcgagccaccgttcctgcagctgttttgtggcgtctgtcgccggcccccggtggagcgctgcagacccagtctctgcaaaactaactccctggggcgggagccctcccagcagctggaacggggcgggccttaggtccccggcttccggcccctgggtacccttcaaattgtgcccttctaaaaggcagggtcaaccctgccacgctccagctcgacccctcctgctcctccgtttgagttttgctcacaggcgctggccggcacgagcagcttcaccctgcaccccagtccctgcttcctcaggagaacccgccacggcctgcgggttcgaggcgatgcagaaccctgattaggaaaaggcacaacctgccgcatgcggaaccagcagctccctggatcattagcgaatgaaaaggggaagcgggcttatttcggagtgcagtccctgcgaatgctcaactttgtaagggactgcaacataaaagcctcgccagtatttaaaagctagctccagtgaatcatccttgctcaaatgccattttcctgtgaatcttctgaccctctactcccaaagcaaaatcaatcaagcctccctgtctttggtgcttcttaacacccggcgagtgcgctcagcggctgaggttgtaactgctccctggggttggggttggggagggcaggaaggtaatagtaactcaataaatgttcgctggggtttttaaaccaatgaagttt

SEQ ID NO: 64499 - DNA, 1118 bp, Homo sapiens
gagggcgggcttgatgcagatgagggggcggggcccacgggcgcgggagagcagcggctccgccggcagctgctgggaactggaaggcgcccggtcctttctttgactggagcggacccgccggacgcaaccgcctcgccagccggagccagcgcgagctcggcacggtggacacccggtccgaggccggcaagccggctggtgcccgagtcggccaagcatgggcaaccactcaggacggcccgaggatccggaaccaggtctgtgcggctggcgggggtcgcgccgcagccgcaaccccaccccccctccaggcgcccttcccccaccgcctccggctcgcggcgccgactggggcgagcgaaaggctaaggtcctggggtgtgattcttgtcgttggaatgcgccgcttgggattgtgaaattacctgtgccgacgccgcgaccagaaaacgctgctcgtcctgaacgcgcacctgggcgccggggccgccgggcaggcaccgctgggtccctgccgcggggttccccactccgcgcctggcctgcgcctagaccaggtctcctgagcgcgcaggccgccctcggactttccgggcgtttgcggggagggcgtgccccgcggcctctccctgtcggccgccggccccgcagtttgtggcgcccgcggctctgcccctcacactcacgccagggctgccccgcgactgttcctaacccagaatagtccgtgcttgttctggggtgtcgggcgcgcctctggttatcccgtttttacttcctcagtcctgagtgagcttcgtggagtcagttgggccgtagttttcgtcctctggtagctcatgtcggcccccagcagagttagatgccgataagcagggttgcttttaaaaacaaaacgaaacatttctggactgtcacgtgaagcaaaagggatttagttttgcctgaaaaatggcatcttggctgataggaaagaggtggttgacctgactctggagtccttgtgggggtggggggccggtgacaggtatgtgtttctgtgggagagtcagaactgtaaatattttccaaaggcgtaatatttgaattttaatttgaatgaggactttgaggct

SEQ ID NO: 64500 - DNA, 1283 bp, Homo sapiens
tactcgggaggctgagacacgagaatcgcttgaacccaggagacggaggttgcagtgaaccgagatcatgcctctgcactccagcctgggcaacaaagcaagaccttgtctcaaaaaaacaaaaattacgcatgcctgttttacttgttttccagacttgtctctggcttgatcagggcatataactatgtattttttgtatctgtgtaacaaaaaatatgttggtttttaaaaataaaaacataaaaggagcctccagcccgcagcggctggagccggagggtgcgcttgaacaggccagggagccacgaggcggcgcaggacctgagcccagagaaacgacctggaaaggaagcttctcacagaatgcggcgcggacagcggctgccgagcaggggatctggaaagcactggcccctgagccccagcgcagcgcagggtgtcgcaggggttagcccgggtggcgggaagagcccagggagcaaggcccccccccacgcgcaggcgcgctgcgctcccccgcgctgtgacatcattgatgaccccgcgcagaggcctcctcaatgcaggcgcctccctctcagcgctagagcccaggccactgccagggaagtgtccctaccaggcgagtggccctgccaggccctcctgctgctgctcgcggtcgctcgccaggaaaattttatgtggcatgtcccctaaaagcgctcgcatttcagggtaaaatgttttaattatgttgcagccctttaaaacaatcgctgatcattattgatttcctcaggtatttattgtcacaatattaatcatgatgacctcgctcggtattaatatgcatgtcccaactagttcttgcagtgattaattgcacaattattttaagggttaccagttttcctcatgtctcctacgtggcaggagtttgggttgcatttttgcagatacagggtgcagcaggtacacttgtcctctaccttcggggtcaaaatcagtcctgtgtttaaatctcacaggctacttgagctccttgctctccgttttcattcgtagtctcaatatgccaactttattaatcttttaaagattactcatccaatacaggtgactgtacattaaatatggatggaagttggcctgtgaggaaatacattattttttaaaaggcaaccaacaagtactagttcttaactaaaaagtgggggcaagctgagaaactaaagcagaaaaggaaattttaccagtccgaaatagatccattctcggaattcacagaattttcataa

SEQ ID NO: 64501 - DNA, 1264 bp, Homo sapiens
tcccatccccactgcaggccagcaactcacacctagtcacccttaacctggacatcatttcagatttgcaaatccaggttccaggaccacagcaaatttagaagccaacaagaaaaagggagggagacatgaatcaaagcaatgtacagaagaaagaaaaaggagcagggcattaccaagaaacagacctcacaaacctgaaatgttaatcacggcaatgatgagcacagtggtaaacaaccgttacacccccaaccacccaggagtgccactgactcacaatactaacgggacgtgtgaacagggacagccgccactggcaatagttgcacaattcgagcacagaaatgagtaagaggaattatttatactgagttttaaaagaatccgtaagtccagattgataaacatatacacctactatgtacccatcagattttttaaaaaagaaattaatactatacaaacacaaagtcttcttcgcaggagaattccatctaataaatatcgtaaaaagacaaaaatacaagatcttcattttatgcttatcatagtagtaactaattcaggcaagaatcatcagtagatgctagaaccactgggtaaaaaaatactgtgtcattcacaactgtgaaaatagtagaaaaggtccatatagtcatcaacagatgagtggatgaacaaactgtagcatatacacaatggaatattaattactccaccacagaaaggagtgaagtactgacacatgctacagtgcagactagccttgaaaatatcatgctaagtgaaggaagccagaaacaaagggtcacgtattctatgagtctatttacatgaaatactcaggatagataaatccaccaacacaactcaggacgttgccaggggctggggacagggagaacaaggaacaaataaaaacattttcaaatttgatacaggtaaggcagtgactgcacagcagtgtaaaccacgaaatgttgctgaatgattcctctaaaacagtcaactgtattatgtgaatttcacctggattaaaaaaatatattaagttacataaacaattgtccctcggtatctaggaattgattccaggatcccctcaggtaccaaactccatggatactcaagtccctgatacaaaatgtacttgcaaataacctatgcacatcctcccataaactttcaatcatctctagattacttacaatacctaatacaaagtagatgctatgcaaacagtggttataatatattgttt

SEQ ID NO: 64502 - DNA, 2767 bp, Homo sapiens
tggatcacctgagatcaggagttccagaccagcctggccaacatggtgaaaccccgtctctactaaaaatacaaaaattagccgggcgtggtagcaggagcctgtaatcccagctactcaggaggctgaggcaggagaatcggctgaacccgggaggcggagattgtagtgagccgaaatcgcgccactgcactccagcctggggtacaaagcgagacttcgtctcaaaaaaataattttttttttgaattactgcttaacataccctacaatctcagcgagcctgttggtattcccataaataaaaaaatgccactcaaggtggaaactgccctcacaactcccaatctcggattgtaatctacaaaagcgcgtgaaactgtaaaaataaactttattcacatagaagaatcacgttacgttttgatttccaaacccttaccaagcctaactgcgggacgcaagactgggctccccgaggggactcactcctggttaaggcctcccacagcccacggcgcgcttccaagtctactcctcagccgcaacgcaaacccgggctgtggctccgcacccacaggctcgccccggccccagcccctgccgccctccacctccagctcctcgcgggccccgaggcagccgcgaagctccggccccgcgccccccagcccgcctcctgccccagctcccgtccaaggtcgctcctggcggcgggtgaccgctgcagaccaacgcccagaactcgacagccccccatcctttactcatttttttgaaatatttctttctctgcacccgcatccagccccgaaccctccagaaccaggagagttccccgcaaggacctcgcgcaggaacgcccgggaccgcccaccgaagtcccaggctccccaggcagcagggcaggagaacaccacccccggcccggaagcactcgcccctcccgggccaagaaggataagggagggggagggcggagagaaaggagggggaggggacagagaggagggggaggggacagagaggagggggagggaaaggaagaatgggggaaggggggagaggggaaggataggaagatgaggagataagggaagggagagagttgaggggggaaggaaaggagggggaaggggtaaagagaagagagggcagaaggagagaggaagaggaaggacagggaaaggcaacgggggaagggaagagggcaggaaaagggcccctccgccggccggcctcaggagcggcagaaggccccgagcccgccgcgcggtgggctgccgggcgcaccttgcgcttgcgggcctcagccgtgccgctccacacgaagcactggtagatggcccgcaggttctgcttccagttgtccaccttgaagctgcccaggtgcgagcagcccggcggcgctaccgccagctcggcgtccatggcctcgccctcgggctctggccgggacaccatggggggcaaggcccggccgcgcgcggggggcggcggcgagggaggcgaggacgacgccagcgcggcgtgggggctgctcggcggctggccaggctggccaaggcccgggcgccgagaacaaagcgcggaggccggacaaagatggggctgcgcgatcgccgaggggaggctgcaaggcaggcaccgcccccgagctgcggctgctgcggaccgcctgcgctgcgctctcgcggttcgcggagggtgtcgcggggcggggcgccgcggccgcggacggagattacgtcaccccccccccccctcccggccggcaccgcactgcgcagtctccagcccgcgccaggcccttcccccacactcgcgcgcccgttaggctctgggtagacccgcgcccgaggaagcgtggtaggggggggaagctaacgagggcccgcccctccccttcctttattggtagtaggccaccccccccccccccccggcaccttcggctattgtcataggctctcagtatagtccgtctggtacagagccgcctcccgggaccctggcggctagacgttccctgtctcttccagaggactggggaggcgggggcgtgctgcggttgggcggcgcgagacgtcagtcctagcactgaaccggtttgcgccggcctgagctctgccgcaaagaggcggggcgatgagctggagcgccgcaggtcgggcctccatccagggcctgcgctttcccacccaaaagcaccccctaatcgggagctgtttgcagggcccccggttgccgtaacctggctcgggccctgcagtgccgtggcccggggctggaactgcctgccaactgcctggtaggcgctgcccccggccgcaagctggggcgcctcctgtcgggagcccgctgatagtgagggccaacccggcgccatccagtttaaagaggcatctgcgcgccacacgcctgacacttcacatttgctagtggctacatttttctaatgaaaaaagaaagttacagtaatatatctcaacccaataaagtcaaattatttcagcatgtaggcagtattgcaaaatcgttagtggaatgttttacagtttttgcagcaagtcttggaaatctggtatttacacttaaagcacatccaattcctactagctgctaccgcagtgggcggcacaggtctaatcggtatacaaataactgacccaaggcaaactgagaagacatttaaagacgaatgcaaacgaagttctgggggaaccagggcgccaagggtctgggggaacttggataaggtgtcagg

SEQ ID NO: 64503 - DNA, 1690 bp, Homo sapiens
ctaacacgttattttcctctcttatggtcataatattctgcgattttattgtctagagttgtattgttcacattcaggtctaccatccgtctagaattattttacttgagataggagtcaaggttcatttccccccaatcgaccttcaattgacctagcactatatattgaaaaaactcttcttattgcattacagtggctacttgtaggaggaaaaagtgactacatagctgcaggtctgtttctggtctctctctttttcattcattgtttttacctttgtgccagttatcacactgttctgattactgtggcattataatcatcttgataactgtatcgtgaattctccaactgtgttcttcgccggaagtccacggaacaccaaccacgaccttcggaatttccctccggaagatgaaggcactgtagttatgcgggtggaccctatcagatctcgggtccatcgggtcctgtgtacaccttgagggacgcccacccaacgcgcatgcgcagcctcaatgctgggattggacggagcctcgccggctgcgtacacgtcacttccgaggcgggaggatgaagttgattgactatggtctctccggctaccaggtaggggctggggaagaaggaacctccgagatgaggcgatagggtctggccttgagctgaggcgacgccccggcttgggtgaggggaagcggtgtagtggtcgagctaaggccgcgggccctgggcggcttccggatccccgcgacgccgaactctgaaggaagactcagcccaggcgctgggaccagagccctggctccggcgagtgcgtggcggggaaacccgcctgtcgccgaggtgtcttgagtccagtttccgctgctgggaatgggtgtcgcgccgggcgctgtgtgtgaaaggcctcgcgcccacagggctcctggcttcaacctgtttattcccacatttctgcgcgacgtaggggaggctccgcagcgtctgcgagtggcaggaccgagggttgagcgctgggggccagtggcaccttagccagtgacggcgagttaggactagcaaaggaagtccggtttttcagaaggcaggaggagggtgctgactcgagcgtccacgggaatggctggttgagatatcttgctcttccaatacttactctgcggcttcctggctgtgcggctttgggcaaatgttttaaactctgagtgtttcttcagctgtaactttgggagtaacaagcccactcataaggttgttgtgaagcgtaaatgagactgcgcgtgcaaggtgctcagctggtgtctggcacatagtaggtattcaacaaatggtagccacataatgctctttttttcagtttccaaaccttccatgtagtgattggagaatcgtgaagttacttttgaagtaacgtttgggtttcacacactcatacatttagtaagcagaattcttgcttacactgttgccgattgcaacggtgtgtttgcataatggaagctatgtttgtgcctttgccaagggtgtggaatatgccttccctaccatgtacatgtccccttttctccattccttaataatagttgatattttttgagtgtttgctatgttacaggcactgtactaatccctttactgaattattcaatcctgtaataaccctaatcataggaactataat

SEQ ID NO: 64504 - DNA, 1156 bp, Homo sapiens
gtgagagaaataagaagagaagacatgtatctgtgaagaaaagtgggaaatctaacagtgggtgaaatagattgattacttactgtatgactgtccgaaagagacacagccgtgtcctcaggaaatatttgctaggacgcttggtaaaagaaagtgatagggcacctgctaggctatttttaaatgaaatcatagatgttgggagtggcacagccttctcagctcatgacactttgcttcccagtcagttcttcccacatgtgcccttcctcctctgtgtttgctggcattaaaagtcagtgtactaaacgttttcaggagagttgttatataaactttcaaaacctcccttagaataaagagcattttctagttaaatttcacaaaaatgtttttcacacagctctaaaaataacttggaattcagggtgagccatcatcctagataaattacagtaaggcacatttgtctgagagaaagggagccaacagagacatgatgatttatctaactttgtgaggaaaccaagacaggaatttgttagaattcaaagtattatgatttcaaccatgagactacatgaaattaagcaacatttaatgtttaatccctagcgaatgacatacttttgctctgggatgtgatttgtttgccgtaattcgttttagtgatattttgctgagataaagctgcaggaatgtttgcttttcttatggcaactggcaaatagttaaaatggactgtgagaacatttgttcttcaggattctgtttaatactgagtgtaggcaaataaaacaacacatctgggctctgtttttttctgtaatctgatggtattggattagattatttccatgatacaatcttattcaacaaacatttatgaagttctcaccacatagatggtgtgggagtcagaataaaaggccagaccctcagagaactgctgtcttgggaggcacgtggcagtgaagggaaatcattgtgatgttttgtgagatgctatggaggctacactgaaaaggaagtgattaaccctgtccagatatggagggcagggttgctgggtggcttgaaaggtttcagggagatggtgcccaagcaggacttgaagattggataggagttatcaaagaggacagcaggcaagaac

SEQ ID NO: 64505 - DNA, 2329 bp, Homo sapiens
atttctagtggctgaacagcttctagtggtttccactagctgaaactgcttcccagatgcaaaaactgcaacttgaacatgaaacacggaaactactccaatctcatcttctagaaatcagttattcaaatggaggtccctgttggaagaaacacgctcctagctccctgcccacacaccattcattaggaaaggtcactttaaaggacttctacggcaggagcgcttgcacagaaccatccaaaagtcttcagaatcttccctcgaggaagtggccggctctgggctcggaagagacacatctggcgggagctaaagctccctagtaaacgtgcagatcaaactacccctgccgcggccggcctgctctgtgaaggcttccccttctttctctctccgggggccctgccttcctctacacgtctggggccgcggccgagatggccacgcgcgtgcccaggcgggaagggtgcttcagcagccgatcggcccgcgggcagctaggcgggtccctgaggcctgcgctgggcgccagttcctttcagcacggcccggcctcgggccccgccccgcatggccgctgcctaccttactcagcccggctaacgccccttcccctaagctctccgccgaggccttcgacctcgctcccacccggatcccggatcctccggaactggaacccagtatgcccggcgagggtagggggagcgcggggaaaccagggaaggaaggctgctgcagccctcggaggccgcgctgggctctccggccgctgagccgcctgcactgggggcaacaagcccttggatctcacctctctcgggcgctgccgccactgctgcccgggccaagacgcctccttccccaagcggccatcttggagacactctgcttgccaacgtctcgcgccaaggcggcatcgggagagcaggcgggccgacgggaagtgtagtccggcctgcggtccggggccgctcggcaggcggaagccagacccggcggaactaccgtgcccacaaggcagcgcgccggaagccccgcccccggggtcgccggggcccgtagtccttctgcgagggcgcgaggactccaggagccgtcctggttcgagcatttctgaagaaactgagttcccggcgttcgcagcctgggagtcacaggcgcccacccaccggtaggtccttgagtttcgagagccagtagctgaaggagagaggagaggcaagtgcctacaactcccagagcactgcgcggaggcgcccggccgcgctgtcctggccgccaggctgcctctcccgctgggggccgccgcgctgtctgcgggctactagcgccgggcccctccgcgtcgccacgcctgcccttcacagccttggcccataaggtcaccgaggggcgggaggcgccgcccgggccctccttggaggcgggcgctgctcccgcaccatcctcccccagttctcttagactccggggtactttggaggccgagacagacacgctgtccctgctgccacggaggtccctgcttgcaggtgcaggctgttagaggagagggtctgaaaacaagaaaggggaatagctgtatgataactgcttgaaggcgagagggcccagcgacagctctgttttagacagggcctccaggcctcttagactcagtccctgccacgcacccactcctgccctggccgctgcgacggcataatctcgggatctttgaaggcagatgcggggctaaaccatcccacctgacgggaaccctgccacaggacccgacatatccctgtctggacactgctgtaacgagtcaaagtcaggaaggactaactggagcccagagattcccaggtgctgctgcctcagacctgtggactctttggaggatctcttacagtttgtgaacttctcagttcctctactgctcccacagacaacgttgctaaacatattaattggtcccataaatacttgagcaaaacaaatgcgaaaatctgtcccgaattcagcctagaagaagcccagccctgcgcgtcacacttctgtgtagtggaaccccccttcccaccccgccgcaggccacagcaggagggccagcagacggaaaggcgaccctctccttgttgaggattcctttcgatttccttccagctgacattctaccacagttttagctgcttgcaatcctctcaccgtccctcatcacctacagtgtgtgattcaaattccttagcacaatcaagaagcccctccttagtttggaagttgcctagctctccaaattcaactgcctacctttcccgtctggaacttgccaggctagtaa

SEQ ID NO: 64506 - DNA, 1451 bp, Homo sapiens
gctggtctgatcctttacatttgttacagtctttcatccttacaactagccaatggggtgtgcactggtattattcccattgcagagagggagaaactaaggcacacagaagtgaggcaaatggccagtcccagagccactgaagtcttgatagtgatagccatccccccgcccctcactccccccaggggaccacaagcccctttcgcggtcagccccaggtccgcaggcctcccccgtgtagaaagactaagattcccaggggcagcaggaagccatataccacccgcagaaggggacaggtcacggctgaccaactttccaggatctcaaacaggagccttcagtgggtgcccaacagtcgtgaacaagtgggcctgagcaggtgcgggtcccctgcggctgagacaggggacccgcgctgccccagctcctgcctctgcctttccaggggcccctgtccgccctggcccctgctctcccgggaagtctgcccccgcccagcccgttccacttcccggagcgccggccgcgcccccacctggccccgagcacaacccggcccgcgcccggagctccggccgcccgggaccaccccgcggcgcgcgcttgcaacagccttcccgggcggcgggccggagccgggccgcgggcgcgcgggggacaggcacccagcaagggggcggccccggcgggccccgctcgctcgcagacaaaaggtcggggcgggccggggccgccttaccgttgagccggacagtgaactggcggcgccggcggtcgtgctccacgcggatggggcagcctgctccagcgcgcccagcggcacggcggcagccgagtgcgccatctgcgcgcggggctgcggcgcggcgccggcgggggccggggcgcgcggggaaaggtcaggcgcgcggcggggctggagcgcgggcgcaggcggcaggcggtggggtagttacggcctgggagaccgcaggcggcggcgctgaaagtgacactcggcggcggcggcagcaacaaaaagggtggggggggggccaggaaatcagctgtgaggtcacgtgcggcgcgcagccagtggacgcgcggcctttttgttttgatacattccagtcacctcttaaaggggccgcgccggccgcgttcctctcgcagccccaaacaaaacaacacgggccgccgccgcgccgcgccggctacttttccgtcttgcgtttgtcccacgtgcaactttgggacccccgcaaggagccttctaaaaaagacgtaacaatcttttgtatggacattctaatcgtccccaaggcagccaccatttattaagcacttgctgtgtgcacggcctgtgtatagcaaagccctggcgcacagggcgctcagtaatcactgcgctgagatttatcaccagaagcctgagaaataggtatgcttgactccattttacagat

SEQ ID NO: 64507 - DNA, 924 bp, Homo sapiens
agaggagaagcggcctcttctcagcatggggatgtggggagccgctcagggagagaaaacgaggcctttacagcaccggtttaacagcctcggccacgcatctgcccgcacagatctaaggcttggcttcgggtccggctccacgcctgccccatgtccccacggtccgcggccctcgggaggcccggccctgggggctgagctctgccctgggaccgaaggccactctcccagccaaggccggagggctctgccctgggcacatgcgccccatccgcctgccctgagctgaccccgccgctccacaccaccccactcgcggctgaaaagctgaaggcagccgcacactcgcccttgcagcttgccctgcagcccgcgcggccatgtgagcaagcgcagccaatcagaggctcgccctggactccgtcccgggctggggggcgtggctggagggcgtggccgggcggtacccgcggcgtctctgcgctgccgcctttgcttgcgcggctgtgtagggggttgtggcgggccggagagtccccgagtgacttaacattctctaaaaataccccatttttgaacttcgacgacctgggttggcctgctcactctgtgtccctgcgctcctctgcttctctgctccttcggtcttgtgtgctggggacacgtgggcctttccagttccctgcagccacctttggtctgtaggaaggcagtggcgcagggagcggtgggagcccgggtctgcagggctcaaggtggcgacggcgaagcggtctgccccacccgccacccccacccgcaggatgcgcatcgccagtgcagcccgggtcgtggccccccaacagacccagtcccgccgcgacacggcagcagcacctcttcgccgcgacacggcagcagcacctcttcggccctttgagc

SEQ ID NO: 64508 - DNA, 6215 bp, Homo sapiens
tagggagcttgctagggtgaggcagctgcaggttcagagagccaggaggcagcccagcagcgcacttttaacccccgcccacttcggcaggcccagccgtgccacctttagggatctcgggttttttccagacgacgcacccaggagaacgcgcccgcgcatcgcacccgccggggctgcgggtctgggggtgccgggctgggcctgggcgcctgcagggagcagcgggctcagtgggtcccgggagtgggtggggcttgcatgttgacgggcagcgcgaggggcgcggctttagtccagggggcggagcctgaccggacctgggtttttcgggcggctggcggacttgacagagagcgggaggggcccggatcctgggcctaaggagggtggggcgtgtgcttgacaggcagggacaggccggcgtctgataggcagaggacgggccttggaaacgaaaggaccaatcgggcacgcaggggcggggcctgagtcagcgcagttcggccggggtctccccggcgctgcccagtctgtctccggcgccgcccgtcgcggactcgtccttgctgcagtcgccgccgcagtcctcgccgcagtcgccgccgccgccgccgccgccgccgctgctcctccgcctggcctgggccgtctgcccgcagccatgagcgtgctcggccccggtggagcccgcagtcctctagattagtctccaccgccgtccaggacccacttgcagcatggagtcgcccgcctcgagccagcccgccagcatgccccagtccaaaggtaggcgctcccggccgggacctcggcctgaccccgcgcctaatctggggccgggctgcaaaccccgacctttctttggtcccaccccatcctgttctcgacctggcagcggcgtccggtcccggaaccccttcctgttcggggtcccgggaccagcccccgcctgggccctcacctggacccccacgttaggccttgggactgcactcaggcccgagatcacccaggctggacccagactaggactttgttctgctcaccccatccaagtcaggagcctcattctgacctcatttgggccttatggctgcagcctggacatgaactctcccagtcttctccctcagcgggacccaggtgagattcacactggccttcacctgggtccttgggcagcacccagtcccatttctagcttcgggtcccagggctgtatccaggttgggatttaacttgagtctccatctgggccccagagtgctcctgttgttgcggacctcactgtaccccctatgcgggtgctctggctacaccccagctcggaactccccgtccttctctcccccagctcttcttatccttataggccctatgttgccccttccctggctggcctgcaccctgtcctgcagccctgggctcccaggaaccttccttgtcctcccacccctccctaaggtacagccccctctctaccggcctctctctgtcttgagttgcaagcttctccctgcactgggggttctcaccccatcttattcttgtcctggctgcctgggatctgggccagccgccaggccagggtgctggctgtgcaagggatttgctcttctccaagtagctggccttcctggaaatttttgtgaggtggcagcagcaggatttgtcatgcggagggggaaggatgaaactcggagggcaaaaggggaattttttttttttcaggaagaggaaaggatgtttttggtgcgtcggagtttcagtaggctgggttgtgcgagagatttccaaaccggacatagccgtaatgaatgggctgcctcctggctttctgaacctgcagctgcttcaccccagcaagctccctggtgtctctgggcctcagtttccttttctgtaaattggaagtaatcgcacctgcttctgtggacgtgggagtgtggtgtggggtggtgaatagtaaagagctctgaggcgttctctcagcgtagcacctggcgcagagccggtgctcaccagggtacactggctgcacacatctcgctattgtttccattcttcttgctggaaaggcctccactgctggaagtgcagcctcagagtgagcaggaggaagcacctagcagcgggcacctagtgggcacttcatcaggggtcagccgctcttctgttctggagggtgcaggccaatgggagccctatgtgggcctggggagggcatgggctcttcctggcccctgctgctggctgctatggtggctggagccgggtgggctggataattatgccttacataagtgggaggccggatccctgaccattgcccaaccactgtgagtaactcgggaggcactcgacgggggaggtgtctggggagggacttgcactgcacagacctcgtggagcttgggaaccaggaaatcagacacttctccactctggagagctcggggaagggtaggaagcactgtttgttttggaggctttttagctctccaggcagagaatgcctcatcaaaataaaagttccagttgcagagttgtgaaaggagaggggtcatagatgcagtgagaatgctgtgagagggccaaaatgaacttctagatgtggacccaggtcctagatgaggttgagggggctggatggagggtcagggacctccctcaggcccagggactctgtagtctctttggggtctggggaaggatgtggtggcagagccacaatgcccttcaccaaaaaccctatgagctccttctttttttccatgtgccatgcattttctcatttattcctcatagccccatttactgataaggaaactgaggcgttaagtgccttgcctgaggccacacagctgtgacaggcggagctagggttccccctaggactgtgtttccacagtggccttccccgtgctcccctatgtgcccctcccatgctggatgcctgagctgagctggtggggtgcccccacccctggccttgctcagagcatgtgcagtgggcctgtcctcatggccacgtcagacctagaggacagactgaggcagaggtgatgcctctcctgtgcacagcgctttacactgggcctgttgcattctcgctgcaaaatcccactcatttgacagatgcagaactcagcttggatggaggagtggccggactgcccccataggtggagagcctcactctgtgcccaccccatcctgggcactgggcctcccagcactgatcccttctccaccttctcaaaggaatttgaacaaagcagggagtggctggcgcttgaccttactggagctttacctttgagcttcctgcctggcagcaggtgccctgcactgtttccatgccatgggcctggggagttttctatgagtgtgtgaggccctcaggcccacagctctgctggttttcccctggcctccttgcccacatggccatctctggctggggttagaggccaagtggctggcgctggggccagtgggtgggggcatgtgtgcaagccacatttgtccttggagggtaccacacgtgtcctgttgtcgttcagaacatgggttctgccccttctgccctaagagtgccacctgtgggagcacttcatggctaatcttcacacagcttggactgtggctgtaggactcctgactgcccgatggtgacactgaggtttcatagagcactgttgtatcctagccctgcctgctgtggccacccccccaacccctggctgtcggaaagactggaggtggcacctcggggacttcccccacccctcttgtgacgcacaggaaactctctgtcagccaacccatggcccagcgcccaaagggagcaaagttctcagttggcccgtgtgaggagaaggccggggcagcggaggcttccggcggtgagtcagcgggcactgggtgctgactcacccgctgggcatgccagccggctgcctacagcttaaaggggcgatgcctgccagcctggtgggtggggagggggttacgtgtcctgcaggtggcacctagccctgagctggggcactggaggtggccccttcctgggcctcggactgggctgggaacccctgggcaggccctctgtgccccacccaggaacttcctctattaggcaaggggctctgcttcctcttgctcacagagcaggagcaggtggcagtgactgtttaccacccttggcccaggggacacctcaggttcagctgtgcagctgggactcagggagggtgaggagcagaggtggtgcagggtcggctggggtgggacccggcctgagctcctggaagatggtgatgtggagaggctaagacctcagtttccagagcctgactgcctgggtccaaaccccagctctgtcccttttgcgatgtgacgtgggacaagttgcatctggtccactctctgcactctgtaaatgatttctgtcccctgggcatggcccagctctcagaggagaagcttccatttcctcatctgcagactgagaatggggaccctgcttgtctggatgtagacagttccattccacacttgctaagtgtcaggcacaagtcatagtgagactgccctctgcctgcagagaacccagccgaggcatgcctctgtcaggcaggaagccgggggtcctgggctctgctgggatggccctgggttcgaatcctggctccactacttccttacctgggcaagtcttgtgccctctttagccctcagtctcctcttctgtaaagtgggagtaaacatgctcccttgcagggtagtggtcgagattgaagatagcatttgttaagtgaatggcacctgttattattttattattgttacttttgtgggtgtagttcattggtaggtggataaacagtagcagggcttcgtgacaatgtgctcgtaggcgctgtgacatgaggcctcttggctgtagggtcctttcacgcaggccagaatttaccaggctttagggcctcttaacccactggtccccaacgtggggctggggactgcccctggcctcctgggcctcccttgggagggtgagtggggaacagagagctggggcctgctcctgcaggcctgccctgcccctggctttggcatgcagcattaacaggacgaatatggggaaggtggggtgggactgggaattagaactcaggcccctgggccagcccgggaagcaagagggcctggggtcatggttctaggggctcagtcctgagtcaggggtgttggggggtggtgggccaagctgaggggagcaactgggtgccagtgtcttgggagggtcccagaggagggctgctgggcagcagcatggaggacacagcattgtggcagggccccacgactgatgcccacatgccgtccacgcctgcccttgtccgcgcctcctggcgctgcccacctccatcaggcctgtgtgcccagtggcttctgcagatgcctccccgaagcagtggccctggaaacctcaaacagcctcttgccaggggcatgaaggccatacagggccaggggaggcagaagcagtttgttgggccccttgcagcttccagataccaagcctgactgcggcagctccagagagggccccagactttcttcccctgaccccagtcctgggcacatgtccttgtcacctccctgccctgcactccagggccaccttccctggtttctctggggaggccatgtccagctgtccctctcccagctggtcccctgcccagggtggccggcaccacctcctgccatgtggcccatggccgggattgcacctggctctgctgacacctcctggcggctatatcgagtgccctgactgtccttgcctgcatcactgtgctgatgcccccaagggcttccaaggcccgtcccaaggtttacatgtgccagtgtgtgcggtgatgcggtgacaggccagggggctgcctcactggggcagggctgcgaggggctgtggatgccagcggtgtgttcagacctaatcaggaggtgtgtgggggctggggagcactgctgcctgggagggttgctttggcggtgtcagttggcagctgaggcacacgttggaggcctgcccaggacggctctgggtatggggatggagacagctcccatccccttgtcattctgctcttgcctggcttagccttctggtcaacccatagcctcctgccgttggc

SEQ ID NO: 64509 - DNA, 934 bp, Homo sapiens
gtagaacaccccctcccccgtcttcctgtggctggctccccccaaccccatcccggtctcccatgtcacctcctcagcgaggtcttccaggaccactctggctcaaacagcctccgcccactaggcccagccaatctagcttattatcctgggttatcctggccgagacctgacttgtcactgttgtgtcgtcagcgctgagaatgctgccgacaccgagggagcgctcggcttctgctgaatgaacacatgaaagaatgaatgagggagggagggaaggggggagggagggaatgaatcccttgccggggcgcggccccaggctctgtctcctgtagccgccagggggcggtagagctcggcttcaaccgcgtgtcctggagccccgcccggccccgagcgcccgtccgcgtcctcgtgcgtcctcggcgcagctggaggccgcgggcttgccacgcgtcagcccagttctcggcctctgcggctgtcctgcccgtgtgcaccccctggcccggccctcggggcttccggggactctgcagcctgcagacagcagcagacccaacgcctagagatttaccgtgcgcgcccctgaagttacccagcgccccgcaggccaccgcgcccctcgcggctcgcaggcctggctggacgccgcaggcctggctggatgccgcagcccttcacagagagcaggctcctccgcgcacgactgcagccccagtcgtttgcagttcccttgccatttatgggaccctttggcttttacagagcgtgtccagccatcagagtgcggaagccagtgcgcaggtcactaacatttacaaagcacaggcccttgacagtttatactacccgtggaggtctcaagcggcagggcccctctcccctgttccctgtccctgaggtgggggaatggggatggggagcggcc

SEQ ID NO: 64510 - DNA, 1191 bp, Homo sapiens
atgacctccacgttcatccatgttgtcgccaatggcaggatttccttttattcaaaggcgggacagtaccccgtggtgtacatacaccacattttctttatccgttcagccactagtagatgcttccatatcttggctaggttgcttccgtatcttggctactgtgaatgaaatcaatattcttatcttatgcataagcgatccccacactcatttgttatcttttgactttgcttgtgtattttgttcaaactttatgttgtcaagccgatcaatcatttccttgatggcttctgggtttatttaatgctttagaaaggcttccccattccgaaaagacagaataaaagcgattcacccatgttctccctttcacggtttcaacttcactgtctctcccgccgccagagcccagcaaaactttctaatccgcgaggagcccgggaccccgctgcgctgggaagccgaggcagggcgccggcctgcgggggtcttcggaaacgttcccggttcccgcggaagatcgcccggcccggagccgcgtgggctgtctgtcctcgcaggtagcagtcactcggagcagaacggtagttaggaaaaattttcaagtctccttcggctgcggggtcgcgccattccaggcggtgccaactgggagctccttcacccgccccaggccgagaaacgcgatcccagttggtcagggactaggagaggcctcgcccgccggagatgcggatccgatccgcggccgctggcgccggctgtcgggcgccacctggctgcactgttaaggttttctctccggcgctctggcgaagccggcaagaaaggggatttggccacagggcgcggtgcagagttccaggggactggcagcgctggcaggatgagcccggctttgctgggtgtactcttcgtcctttcgtcggagattaaacctgagggtcagcgttgtaggcgcgctcttgagctcggagtgctgtggcctgagcgggtcaattagtacacgcgggaatcgctgggccttccgagagtgtgaacgggggatggggtatcccgcccggacgctgactggcgtggggcccggtcctcaggccttccattacacccattatctccaagccccgacccggaggtgaggaccggcccggctgttccaggaggactgcgaagggtagcatgggcccg

SEQ ID NO: 64511 - DNA, 1552 bp, Homo sapiens
gatgaggcctgtgcactcttgaagtattctctgacttcaagggagaaccagtgggaacgtcaggcttggaagaccaagtcagggactcaattacggcctcactgtcattgtttctagctacaaactataaacaccgactgcctgaatggagaagaaaatgtatcagaaggtaaacaggcagctcacagaaccaccacaagaccctaaaactaggtttaaagctgcacagtcagggacaacaccccccgacggaacccaaaccctatgtgccgagaaacctcgatgtgtccccagccggctcagcggcccctgctgtgccaggaattcagatgtgctgcactgccgaccatccacagtggacattctcgggagtcctggcctccctcagaacccccacgctcccctaaggtctggcacaggcccctctggttggccagccctcgtcacatgcgctggctgtagttgcaaaagggaggctgagaaaggggaaacggaacatttccgtttctctagtagaaggtgaggacctcctcccgatccaatcataaagtaggagtcccccaaacatgagaaaggagttcaaatgcccagtggctccaaaaagaagataaatgtcctccacctgttggaagtggggcataaagaagatggatgagtcctagaggaggaagggagaggagaccctccacagagcaggggcagctgagtctgttaagtgaaatttgacttagtggtgcaggaacatgacgcatgaggcataactccactatcccaatagcacagggctagggttgccagatgaaagtcacatgcttggggaattgcaacacaggaagagaaattgagcaatgaagagaaattgagaaatgaagtctccgtacattaaagaggaagggaaggctaatctcttcctaccctggttaagaaagaatttgaatggagaagaggaggaaaggaggctgatttgcattaagcacctactatttttgagcaccaggccctgaaatgtggctggcgtgatctcctttaatgtggagaaacagaaacagtacaatcttgataatttggggatttgggaaaagactcctttcccgtatgtttcttccgttagtgttacagcctcctggcctctccccttcctgcaagcccctcctggaaagaggaggtgattgtgagctgcagagggcagtgtaagcctggctctgcctgcctcctgctttcccttgggtggggcctcccatcggcagctggcgagcacagctgtcatgcagccagccctgcagtgaggcccgcatgtctgagtcctgcctatgaccaggcaggtgggtctaattctgggtatgacattaggatgttggttgttgcctggttcatctaagccacaccctcaatccgggcctttatcagcaatgagggtgatactgcaatccatacctatcttactcctttatgtctcaatagtttagaactcacactgaggaaaagggatgctccttaccaatcccccttctcaaatctcaccagtaatttctgataggattagcacagcatt

SEQ ID NO: 64512 - DNA, 1019 bp, Homo sapiens
ctattccactgtgtgactggagcataattaatttaaccaattccctaccatgggatgtatatgttatttggaatcttttttaaaggatagaatccagctcaagaacttctagccatgcaagtgactcaaagctttaatgcagagtaactttaggcaagttgcttaacctctctgaggttaagtgtttcttatcttccttcccaccacaatggctccccagagcccatcactgccctggggaagtgcttttatatttccagccccacacagtagcatccaccttcatctggggagtgggggtcgaggaggcaggaataggaggtttcaaccagaggacaggtccccagtgtcttggccaagggagcctggtggggggctctctctggctgcttctcacgcccttatgttgtcaccctctgaaatatgctgtttgccttccctgacgctgacctagttggcaaggactgcagaacaatgtcaggcccagggcctggtgcatcctggggatgtcaccgcagagcaaacatgagtttgctggctgggtgtcaacaggaagatacattaagggcaaataggagcgagatccctggcatggaaacaagaagaaggctggctgctggctctgtgtgggagtttgtttatttattctataaaacagctttattgatatgtaattctcataccatacaattcaaccatttaaagtggacaatctagtggtttttgtgtattcacagagctgtgcaaccatcgtcacaaggaattttagaacattttcatcacccagaaaagaaatgccatgccccttaggcaatcactctcccatgcccgccctcttttcagtcctaggcagccactaatctactttatgactctatagatttgcctgttctggacatttcatacaaattgaatcatataatacatgggtttttttgactggcttttttaacttaagcataatgtttccaaggcttatccatgtcgtaacaccagtactcacttcttttcatcaccaa

SEQ ID NO: 64513 - DNA, 553 bp, Homo sapiens
tcaaataaataaataataattttaaatctaacactaaaatcagaaacacaataacttaaataaattctgtccatacaaaatattgtatgtgatcttataatcatcatcatgatttatttggcaaagtcaccaaataagttttgcaatttccagttgcttgagctactctactattcagagcactctgttaaatattgttccatattgtttgccttccttatcagtatttcccaaacttccctgatgatatgaatcacctgaaaaacatgaggtgcctctgtcactcaggatttggtgcccatagtggaagaacaatctgcaattctcaacatccaccaacatgttcaagccccagtgctctcagcttttgctcttcgtttgcaacatgaaaggtgacagaacaatgcctcaaaattgggcaatagcaggctttatttagttagtcagtttattttttatcagctgcaataaatacctttactataggtatttattgaattgcttttgaatttttaaattgacacattataattgtactttttttttttttgag

SEQ ID NO: 64514 - DNA, 2589 bp, Homo sapiens
gccacatatttgaattcccagtcttatacgccccaggcctttgcaatgtttagggtccacacgagaagccattaaaatgcaaatacgtcatctgtgaccgggaaccaagctggcatctagcagatactgacacatttatcagtctgatgtgtggacaactaggtgcctcccagaggccttcaggtaaggtggaggaagggccaattctgagctgacacagtgggatccatcttggccaggacagtgggatccatcttggccaggacaaaggcagtccagagaggccccgcggcgcggtgcggcgcgatcacgcccgagtctccttctcgttcccctcggcccttcctaaaacctgctggctcaggtctgaacaatcgcagctggacaggtggtgcacaacgatgttaattttcatcctgtctttttcatcagtgcatccttcagttccctattacttgtgggctggggagttggccaaattgagtgaaaacctgaaatgtctttttgttcttttggttcagccagtttaagttccatgcaatctttaagctaggaggctaataataatacaattctctgcttgcccttttcaaagccacttcagcttataaactccatattagaccatccaggcccagaagacgccaccggcctacaggcagagtcagcggaaccagcctgggctggatctccccctgcgaggcccccaggcaacgcccgcgccgggccggggagatcacgtcccgtgcgtcgggaggcgggggcctcgggctgtgacgtcacgtggccgcgcccctgccgcccagatatctccggcgccgcccgccattttgactccagtgtctcgtttgcagtcggcgctttaggggaactgtcttcctccgcaggcgcgaggctgggtacagggtctattgtctgtggttgactccgtactttggtctgaggccttcgggagctttcccgaggcagttagcagaagccgcagcggccgcccccgcccgtctcctctgtccctgggcccgggagggaccaacttggcgtcacgcccctcagcggtcgccactctcttctctgttgttgggtccgcatcgtattcccggaatcagacggtgccccatagatggccagctttcccccgagggtcaacgagaaagagatcggtgaggattgggaccgtgggtgggcgcatgagggccgaggagaggcagggactccccggaggaggtttgggaggaagcgactccaagtctgagggaagagctccagtgcgccagggccagcccactagcgaggaggaggaagccgcctcggtgggagttggctgaggggtaaacggcaccgacgtggatgcagcacctactgtgctccctcgcggttgctgtgtggctggggcgggcaaggaccccggtttcttcgtcggaggtccgcgcagggctcttgtcctgggagttcttggctcagggcatgactgtcgagtggacagggaagggccactcagggactttaggtttacaatggggaaaagtaaacttgtgggttgtaagcggtaatgaaaggagggggtcctcgtgtgtaccaaccactcttagatagaaatgagatggaagaggtcccaacagcctggcaaaagcaatacagtatttttaaaatggtgtggccttaagaaacgcagcggttcgggggaggagacttttagaattatctttcaaacacttaagggaggagctgggtggttgggtggagtgacagaaggaaagcttttgtgcggaagaggaaactctggaaaaggcttttctggcttagtgtctagccctggtcggcttagtaaagggcaattagtgttgaaggttgtgcgtccacacctacttagtggctcagtggaaagcacgtcgcattatttaaatcctcttttaaagtaaaataactggaacaacgtttgacggtgttggggggtgctgtacattggctgataacacttagcaaacactgatcttactgtgtgaagtaataattagctgcggccgctgagcagagagcatttacattttcctactcttgaagtgaatgtgtgcctttactaagtacaaggaggagttatttctagagaagggaagaggctgaagtagccaaaacgcgcactattttgtatgtgggtgaatttttatatctagaaacagctgttttagaattctggacttttgttgtcttagggatgattgattaggaagggactttaaccctggttttaataaccatttttaaagatacaaacacagaaaaaaaagggaaaaaattgtagcagagttcacacagaaaaaagaaaaaaaaagatgcaaagaacacagaatttgtgtccagttattattttaactgtattttaagactagaaagtatgtcgcgaagtgggacaaagaactcaaaagttcttatcagtccagtgggtttttcttttactttagtacaccataatgttatagacgagtgatctgccttttttttaaatctgtattttacttcatcctgataaaccattttgaaaactttgcggtcctgttttctctctctcttttttttttttgagatggagtt

SEQ ID NO: 64515 - DNA, 2498 bp, Homo sapiens
tcacttgaggctgggagttcgagaccagcctggtcaacatggtgaaaccccatctctactaaaaatacaaaaattagcaaggcttggtggtgtgcatctgtagttccacctacttaggaggctgaggcaggaggatcgcttgaacctgggaggtggaggctgcagtgagccaagattgtgccactgcactccagcctaagctacagagtgagactccatctgaaaaaaaaaaaagagagaaaagaaaagaaagaagaggaagggctactgcactctggactcagtgccctccttggtctcacacccttgctgacctccctcctggcacatgaggtcttcatgctgctcaggcccatggctgacctcctctcctctggagtggtccatccctaccagatctcctcctgtccagctgagcagaccaggcctatacaggctgcttctggctccactgaggcccaggagcttacacctttggaccgggtgtcaaaagtgtccttcttattagcaaaaagaattttggagggaaaaacaaatgacatcctcagacatcctagggcagagtcagaagcagagaggagactgaatgggctcgggtgggtgtggaaggtcactgcaggccgccataggacaggcctgggctcacaggagcaggatgtggggagggggattgccaggcaggggtggggaccaaagtgaaggccacctggtgggagccagtcagaggggtggggcagggttagatcacaagggaatccaatgccagggggccaggggatgttttgcaatgtgggcaactgaacctgagatgtgacaagaccagtgatttggcgacctgcccaggcaggcccagcccccagggtattgagatgacacattctaaactcaggtgacccgggccttgggagtgcactagcaactggctgtcagtcacggggctcttcagatatttgtcacgtgaatgagccagacagtaagtggagatgcccttcctagtcacctactgccggcgttcacgctgtgaaccagcgaactaggccaccggcctgacccagttttccctgtggcctgccaagccaaggagaagcagacgcggccggcgcaggcgtccagggtgactcggaggcgtggctctgcagtcgcggctctgcagtcgccttggagcggctgcccttccgaccccgcctgggctatgactcatcttcggtggaggagaaaggggcctttgtgagcgcccagctccggcgtctcctggacagcaccgccctccggtggccgcgagtcaggagggctggggaagccgcccgagaggcagcgcccgagctccccacgagctgctgtgccattggaagcgccagcgccctcccctcggagtccagccaagtcggggggaagactgggagagaaatcgtcaccccctagagggcaagtgggctcagccctaggaaatgcttgtttctccagcccctcccagacgccccggggaaacggcatcccagagctccgctccctggaggcccctccagagagggacccggggccccgccccgcagctggagaaggggtgaatgcctttcctacctaacgcctggtccgcggccctgcttgttgcgtctccaagaccacgtgtctgctgcattttaaaaatagttgtgaacatctgactttctccttttgtgagttgcctattcatatccttggtctgcttttctattttctattttttctcttgttgacgtacagaagcactttaaaaatgtcagttctgtcgaatgtgttgcaaatatttttctaagcttagaattttaccttctgattttgtttttggtgatatttgatacaccacacgacattttgatgtgggatgaccttttgatgtttttctttttctttctttagttttttatttttgagtcagcgcctcactctgtcacccaggctggagtacagtggcgtgatcttggctccctgcagtctccgcctcccggctcaagccatcctcccaccttagcctccctagtagctggaaccacaggtgcacaccactacgcccggctaatttttgtatcttttgtagagaggaggtctcgctatgttgcccaggctggtcttgaactcctgggctcaagcaacctgcctgccttgggcctcccaaagtgctgggattacaggcttgagccactactcccggccttgatgttttcctttattctttctcccttttgtttttttttaattgtaaaactgctcccatctgagtatcacacagacatttcagatctatattttttcttttctgctcctcttccccccttcccttcctccatttcctcttactccttcatttggcttttaaacccacctgggactaattttgatataaactggaagataaagatctaaacttatttttttctgaatagtcaacttttcatatgtcattattcaggctttctctcttgtttgtttgtttgtttgttttgagacagtcttgcttt

SEQ ID NO: 64516 - DNA, 797 bp, Homo sapiens
acacacacacattcctatacacacatagacacacacatacacactatatacacacatacattcacacatacacaatacatacatatactcacacatatacacacatgctcatgtaactgatgggtttttccttcctgctgcacaaataaagaacacaccatagcagtagggaaagaatttaattgacttgtagccagccacaccacacaggagatggagttatcactcatatcaatctccaaggctcaaaggcagtttgggtaaggggtgggggtggccagccaatgggtgcttgctgctgattggttggagtggagatgaactcagagggggtcaaagctgttgtgttgagctgagtcactcctgggtggggccacaggagtcatcaggtccaggtggagtcatgggtgtcagacatgcaaaaaatatctgaaaagatatctcaaaaggtcagtctacaatagtgatgttatctgcaggatccccctggaataatggctacaccttatcagaaatcagattcctcttctctccctagtctaatggcctttcatcagctttaaaaggcagttgacttttggggaaggcctagtataatttaaactgtaactttggcagggtgctgtagttcatgcctgtaatcccagcacactcggaggccaaggtgggtggatcacttgagaccaggaattcgagaccagcctgggcaacatggcaaaccccatctctagtaaaaatacaataaaagtagctgagtgtagtggcacggacctgtctcagctactcaggaggctgag

SEQ ID NO: 64517 - DNA, 1073 bp, Homo sapiens
caaattggtagaagcttaaaatcttttatttgcaattccaaaatagaaaaactctgaaaactaagtttgctcccctaaatttggtttaaactcctttatgtatgtatgcatgtatgtatgtatgtatgtatgtatgtatgtatgtatgtatttttgagacgagtctcgctgtgtcacccaggctggagtgcagtggcgggatctcggctcactgcattctctacctcccgggttcaagagattctcctgcctcagcctcctggcaacctccaccacatctggctaatttttgtatttttagtagagaaggggttttgctatgttggccaggctggtctcgaactcctgacctcaggcgatccacccgcctgggcctcccaaaatgccgggatgacaggcgtgagccacagcgcccgtcctggtttaaactcactttgtgacaaaacctgatggcagcggcgggccgtccgccgcgctggggcgcgggcggcggtggcaggagcggctgctggagcagcagtggcggcgggtaccctgtgcccgcgtccccgaggcaaccgactgcgccgcccccaccctcgcgcggccgggcgggacgtgcctccagatcagggcctccggaccctggccccgcgtcgccgctcttgcccgctgctgccgccaggaggccgctgggaggaggcgaagctggggccgcattcggaagcccagcgccgtaagggagaggcggcgcctgccctaccaaaggtgcggagttcctgcgcctccggaggaggctctgcgcagggccgcccggggcagcgtccctggggtccacccctcatcggggtgaccgcgggcctgacacaacagacggctgggccctggcccacgatccgctcccggaggcgccctgccccgggccgtgcggcgagccgggcgaggggaactccaggctgcccctgagcgccggggccacggggctaggctcgtggagaggacgcccctgccccagacccggccccggcccagcgaggaccaggcgcccccgccccaggccgcgaggggtgcggctcgggcatcacgcttcacgt

SEQ ID NO: 64518 - DNA, 2398 bp, Homo sapiens
tggaagccatctactccaggcccttgaggaagctgagcggctccctgagtagggttgaggtggatccagaaggcaacatcctctggaaggaaggagagtcaggatggtgggggcctcactatggttttgatttgcgtttccctaaagattagtgatgttgaacatcttcccaagtgcttattggccgcttgtttattttctttggagaaatgcctattcaagtcctttgcccatttttgaatcaggattgattttctatggtctagctgtagttctttatacactgtggatattgattccttatcagagctatgatttgaaaatattttctcccattctataggttgcttttttcactctgttgattatactctttgacacacccatggagaagattttaaagggcaggtagaagtcagacagtttgagcagcagcgtagtgaagagaaggcctttcaatcgaaggaaatagtctgtgcaaacacacagaggagagaaccgcaacatgcaggtagttgggtcttgctagtacactggtgaggggtaggaggtggggacaggtgagactggaggaaccacatgacagaggacggttctaggtccgccaagtagcaggacttcgttctaaggtggcactactcaaaagagtggtctgaggaccctggcccagcaccccctactaggagtttgttaaaaatgcaaattccggctgggatcctggctgatgcctgtaatcccagcacgttgccgagctgaggcgggaggattgcttgagtctaggagtttgagaccagcctgggcaacacagtgagaccccatctcaataaaaaaggataatttaaaaaatgcaaattcatggaggcccagttttgtcctgctgaatcagaatctccggggtggggccgggggatccgggttttaacctgcccccgggattattctgaggttcagtagagtttaagggaagtggaggaaccgccaaggggtcggctaaggttttggaaacatccttggtgagaaagacggcccgggttgttcttcaggccgggcaccctgggcttggctgcgtccccatcctcttccagccaccccgtccccacacgaccccgcctgagttctggccgccttccgacccctcggggcccgccctgcgccccagcctcctccccgccgtggggtccggggtcaggggcgcgcggctgcagtcaggcccacattcctcttacttcccgccattgtcctgggttcctgtggccgcgtctccacactcgctcccggccgccccacggtcccagggagtgatgactcatttcctttcctccgctgacatcatcgtgcccccagcgtggcccggccggggcggcggcctccgccctcccaggtctcctcccagcccctctcggcgagcgggcgcaggcgcggtgcggcccttctcggccggcagggggcgccggagcccgccggggcctctagggcctccccagccacggcccgggccggcgaagagggaggggcagagagccgccgcggtcccgctctcccggggagagcctggctgggagtcagagctctcacggtaacggatagggaagctgagttccgagccttgaccaaggcagcacagcccaccctgagaagtgggggactggaattcaggacgctcggccccaggcccgtggtttcccacagacttgcaggtgttaatcctcccgcaccccctggtatgtattttcagcacaaagtctgcagacaatattcccccgatttccatcacttgtgggccctgaagcgtggtcgcccctggaaccagcaggatccgagggccacttgggctccacctgggaagcacgtggagcctgcatttattgggcggcgctgcccccggctgacctggctgtgtcgggagatgcccctcaccctcgcatccaccccggcttcccagcacccactgctggtcctcaggacccgaccctgtcccctctgccttccctgtcaggtttcagggaggcagaggaactcactcagcctgaaaatttcagatatttcataagacctagagccacgtaagagtgcgtccctttaagacacatggaagaagtcatgcaaggccacacggtgagctagagctgaaatcatacctgtcctgcctcagacctgtcacctctcatgctgcccagataatgaatgcaaaatgctccacccagtgtctgacagtagtgtaagcactcaatgaatggtagtcattgtcattaggaagctagttgcctaacttctcagagcctcaggcttcttcatctgtaaaatggacgcagtagtacgataccttattgtgaggattaaatgagctcatgcatggaaggtacttacagcagtggtgtccagcaagcatgcaacagtc

SEQ ID NO: 64519 - DNA, 1014 bp, Homo sapiens
caggtgtgagccaccactccaggctccattatttaattaatgagggaagccatagtgggattattgactcattgtccaaattttaggagaagggtaatatgccacaagaacagatgatacgattaattttgctggaatatactattaactacatttattaagaaacttaaaagcttcaggagcatttaaacatgatattcatttattctacaaacatttgagcgtctactatgggtcagtgactaggaacacccatgtgaataagacagtgcctgtcctcaaaaaggtcatagtctgatgatctcattctgttgaatcgtacagtgacccactgaagtgagtactatcgatttgtattgattaggacatttttgttccaagtgacacaggactgctcaaacaggctttaaccaaaaagggaacagattggtttatgtgactgaaatgtcgaggggctgggtctggcttcaggcatggtgggtttctggatttgatagtgtctcccggaccatgccaccctgtctcttggttctttcctccttgagctggcaccgtgttgtcaccccgacagcggtgggttctcttctcatggtggccaggtggctgtagatttatatccccagagccccaaggccagtgggaaagtgaaaatctcttttccagcagctcctgcaggatcccagtcatccaccctgatgaccagctcagtaattgtccctgaggcaattactgtagccagaagaaagcaatgttcccagtggtttgaggaacacaccaaaagcttcatgtcctgaatgtggtatgggtccggcctgagagctggggaggggcggagcccaaaatgaaaacctacgggcgttgctgtaagagggtggagtggaggccagggaggcagaggacaaatgtttttattttttatttttatttctattttattttattttattttttattgtactttaaatactttagggtacatgtgcacaacgtgcaggtttgttacatatgtataca

SEQ ID NO: 64520 - DNA, 1234 bp, Homo sapiens
ttgaatcctggccacttgctccgaagccaccgacaattcagtgtgctgtcccccgtgtctgggctggcttggtgggctgggaatggcgggggaatgggacacttattttggcaggtaaatgtggttcagaagaaagctcttcgtctttctccaagcctgagcaatcgttttggcgcaggcagtccagagtagagcgctttgtgagccagctacagaagtgctgtaagccccttcccactagatggcagcccctaaacccacatacaaatcctggaacctccctggtccccatcttccagggctgggctgcagctgaggaactgcgggacgcacacccgccgggcgtccagggggcgccgccccatccgggggtcgcgggaagctcctaggccgggtgggggacggaggcggacggggagacgctgctcccccgactctcggcgcctgggggaggagctggcgcggagcagctccacccggggctcccggttggggccggccctcaccgcctgcctcgccgcggccgccgggaggggaggggagaggagggcagggagggcggcgcgggcgcggtccggggccccgagggcggaggccggcggcaggtgcgcggcgtggactacaagtcccagcatgcccggccgccctgacccagcccccgccgccgcttaaaggctccgggagccgcagccgtcgggtcgccgcggctttcgctttgctgccgcggctgggagggtggaagcggcagactcagcggccggctctaccggcgtcccggctcgggcagcgccgaggggcgctcctggtccagctctcctggctcgggggttccttgccgaggcgcccgcgccccgggctcccagcctcggccgccgcggccccgatgccgaggcatggatagagcagcgctgcgcgcggcggcgatgggagagaagaaggagggcggtggcgggggggatgcggcggccgcggagggaggcgcaggggccgcggccagccgggcgctgcagcagtgcgggcagctccagaagctcatcgacatctccatcggcagcctgcgcgggctgcgcaccaagtgcgctgtgtccaacgacctcacccagcaggagatacggaccctggaggtaagtgggtcggggaccaggctgggctcgaggagcgggcccggacacctccctccgggccccagtactcctggccgagttgcatccttgagcccgcgtcgccccccttg

SEQ ID NO: 64521 - DNA, 784 bp, Homo sapiens
ggcacaatttgaaaccagggtattaatctgtaaacagaagttgtgaggctacttcatcctggcaggagctggtgttctgtctccgctagaccctcctaggggtctgaaaactccaccgaggcaaacgggaatgttcttatgccccagtgtactcacagagggacacttggcctgcctaatagctgggcctgcaacctatgccagtaataattaccttcattcctttgaatctgcccagcgctggggagacaagggtgtgtagaagcagacacatgttgcctcatggagatttatgttccagggacattgtgacttgccctttcctgccagcctactagtactttccagagacaggctctgccatgctgagtctccccaccttgtgttcttgtggagaaaaatccctcctaagcaagctggcgtggagaaaggggctgaaggactttgaccatcaggctttgctgggggaggtgatgttggcaactgtggtaggtgcagagtcaggctgtgctgggaggcgatgttgggaactgtggtaggtacagtctctgcccttgggctgctttcctgagcagttgccctggagccgcagggggtcagaggggaggccctcctgccatctggaaggtcagagaggcctggccctcacacagctctgccgtggcagaggtcagagtcccaccgtgtgggggacctgagctctccctatgcctcccaggagcatctgatgatggaactgctgggagaggggaggggtggcattcctgcagattgggtccttagg

SEQ ID NO: 64522 - DNA, 1582 bp, Homo sapiens
tggagcagaggcccagaaatgcttggggagtctctgtgaattcagaagaagtctccttctcccactccgctgtctgacagcaggttaaaaaaaaaaattacaaagagcttccaggaacaaaaagtggagatgattttttttatggcccttaaagacttgaaatttgcaggagaaatgccgtgtggttgcgtaattctatatgtggagtatctggaattattcctggagaggcgggcaagcacccagattagagatgtgtaaagtgcagttttgtcttgcagtccaagcaggtgagcattcaggcctgtgggaaggaaggaagggaacagcaggtggcagtaactgggaagcttgcctctgagtgagattaactagaatgtatttttccgctgcatttaaagagccagtgaaaggggcagatttacccagggtcacgtgcctggtcagtgccttaaatggacccagggtgtcagccccctctgcctcgacttcaacagagttaatgtttccccagagactaatagagggaccgatattagggattccggggacaagtacgaacaggtctttcgatttacatttaaaagcagtagagagcaggaaggagatttctggcatttgtgcagtttaaaaaccaactagacaaaaaatcttgatggagctgtttcccaatcagcctggcagtcctctcagcattgacgtcgtgagaatgaaagcttctctgagagtgccattgggcggtgtcccttccaagttctccaggaagcaaattttggaccctggccgctgactcagtgtggcctgctgggtggctccctgtgcctgggaggcggccctgtcagtgtccctgggctcagcccataagcaagtgccccaggtgatcctgctcccattcagtgactggagaggcagagggaaggggctcccgggcagtgcgggttccaggtgggcacagctggtaagccgggcggctgggcagggctctgcttcaggtgtgcagagtgggtgtgagttctgcacagcacaggaggtggtttctgcccttacccattgggcagggaaggaagcttgagaaatcagacttgattttagcaggacaggagcttgtgggcttctgaaagaatgcacgcctcagtggtacagggttctgggggtatatgcagcggctgctcctctcctcctcccctgagccctctaatactgatctcgcactttcctggccttgtccaacatcttgggaggcagaaaagcatagtttatatgtgtgcttgtctttatacaaggctctgtgtgtgagtgtgactgtgggtgtttatttaactcaagaaaagtccaagggacccctcacacagaggaggtgaggtgcattggacaacctgggccaggacttggaggacatgtctgccccgatgatgacttaggcccagtcccttagtatccttgggatatagccccctgatctgccccaaaggtggagttgggcgacaggagggaggcttggagatcatttctcgtgtcccttccagctctgaaatctgtgagcaatgttgtccagtaaggctgtctctaccaggtaacacat

SEQ ID NO: 64523 - DNA, 755 bp, Homo sapiens
tacagtctgttgtcaggtcctcagactttgcattcccagtggagcatagggaagggtaggaggccctgagctcccagctgtggccgttctcacccctggcctccttgggaatatctccacttgtggtctgggttagacttgtttgtttgtgtttgaagttccccgactctgagtttgacgtcaaggcaggattgctagtgggaggcttggcggggaggttgtctctacacaaatgtaaaagcctggcagcttccccaggagagtgcgggtatgggccgggccgggagagggctggctgttgcgaaatgcccagctcaaggattgaggtcacttgtactttctcctctccttgccccactttccctgtgtgcctctcctgctctgtcccatgcccatgaatgtcagcccccgtgggcgcccttgagggctgggcagtgctgggagccaaggggctgcctctggtcccctcggagctgggtgctatggtcgctgcgtgcctgtgcgtggaactgtcagctgcatcacaacctccagaggcctccttacattctcagaaatcattttgcaacaagttggccatggcagccaggctagactgcttagctggctgggttggtgggaagtccccagaaatgcactccagctttgggaaggaagtggaagatgtaaggggagcttccccgaggcatggacagaatgggtcaatagtggaggaggagcagcagcttcagggaccactggaatgaaggctggag

SEQ ID NO: 64524 - DNA, 1930 bp, Homo sapiens
attaaggtctttttttttttccttcctctccccaatatggaaatcttttaaaaatttctatctggactgtcctgtaaggtagtcacaagcctcatgattatcaagcatttagaacatggctagtccaaattaaaatgtgctataacttcttcccttgctcttacctgtgtgggcaaggccctgtggctctcccccaaggcacactgcagacccgcctgcctctctccctccctgcctccagcaccacggtccaggccgctgtcacctcctgcagaatctctgcagtggcacctcgccccttgcattccattttccacccagcagccagggtgctcacctagaaaggtgacttggatcccatcctttttcagtgcttcctgtttccttcaggataaacgccagatgccttccttgatctggcctctctcgcctctgtttgctcaccttctcctttgctcggtagactctaacctttgcacttgctccccacttccctggagtgctctgcccatgactcatcccttgaatatttttctggtgttgagtgttgtcaccgcctccaggcagtcgtccctggtgatgtgatctaaagatcatcccctgcccatcattctcgcctgcgcacctgagtttattttctcaatgacactgaccactttctggagtgacctaaccgatttgttgtctgtggtctgtctgctccccctgggatgcgagcaccatgagacacggccttgctgtttgggtttgtttgccacaaaatccccattgagtgtcgggcccaatatggcagttgcttggttgcgacagatataaaaataaatacctatttatttactgaataagtagatttcatcatgacatggtggatgtctccaatagcccagggtttggccccaagtgggtggtgacacaggttactcttagctctggctttcagttaagtcctgcaagagaggccagtgtagggatcatagccccaaagaacccccttcccagctatgcctgctgccatgagtcacctccatgagtcacctgccatgagccctgggagagttggtgcccccaggggagatggccctctccaggaaggctagggcaagtgacccaaagatttcttagatgcagtagcactcccctcttcccatgccaacgtccttttcattcatgaagggtttgtgctgccaggagcctgagcagccctttcctgggaggcctctgctatctggttattgagctgcactggtggccacagtggggtcctggggcccctgagagcctctgggttcttttgcctcaaagttgacacatagcacatctggcgtgtcatgatgggtacactgatgtgttgtttaattatcccaacaccctacttaatagagaccattttccccacctcacagttgaggaagctagcactcagtgggtatagaaactcaccagggtcctagagccacagaggagtagagccgggtgcccctccacacctgactgtgagtcctccgtctcaaccacttctctctccttcttcttggaatgcctggattcaggcacctggccaagccctttcaccttccaaagcttcagtctcctcctcttgtgaaatgggaataacccatgtgctgcttgctggcacaggcagttgtgaaagtcaagtgcgggggtggaggaggaaaaattaacaatttcccacctctctcttaccctcagctgctgttaatcccaggtgagagccagacccagcagaggcagctagagaggcctgcacatacggcagctctcaacagcctcctggggagtgaaggaaggctgggaatggctgactagaggcagttttctgaatcaagagagatagcgggagtcagcccagagcttaggacagagagggcggcacaccagcctgacagagctgggccaagtgtcctccttc

SEQ ID NO: 64525 - DNA, 1221 bp, Homo sapiens
atacccacctgctcacatacatgcgcacacagtgacatcaggcaacttggtggttcaggtgactcagcacctgaacgaagatgagagcccgtgcccagaagaggccaggtgcccagctgtaacgcctggcacatggaggccctggcaaatacttactgggtgaaggaatgtaccaaagtcactgcaggatagaggtcagggatgccagacttgaaaacaggactctttcaatatttgtctgtctgtctttctgttttttgttttttttttttttctttggaagggaacaaaatccgtgaagtctctctgtttccttttgctaacctgatagtgctgaaggacccccgcatctttgcagtcagtgcctgaagatgatctgcccagggctgccccctgaggcttcctgggggaactttgtgtggtgggatttgtcccttcagtcactttgagttctctgctgaccttgactcttcatggcttcatgactaggactttgatttttcccttaggaaaacatacgtggatcgtttgtgtgtgcagccgtctgtgtgtgtaatctcctccttccttttccatattgttttcctaagggccatccctgcagggttatctaaataccatttcagattttgtcttttggttggatagtgtttgcggtcttaaagtttccaggaaataatgccttttctactagaggaagagaggggatagacatggatgtggtcacacagtacggcagctgcatttccaggttcctggtgtggctgaggtggccctgcgtgggtttctttctgttcccacctgagtcagatgccagccctctgcggctccgagcctgctgcggcgctgcatgcctgacctttggttcctcgtcccttccctgtctgtagatgttggagacagaacttgggcaatgcctgcatgtgtttgcccaaccactagatcttcatctagagcagcgctgttcaaaaccttctgtattgtccattcagtgtggcagcccttagccatatgtggcttggggacacttgaaatgtgtatagtgcagctgagaaactgaaattcgtgttttgttttatcgtaatgaattttaatttgaatagacatctggctatgactgcattgaccagggccctgtggtgagagctgggatgctgaagacaccttcctctgccccaggagcacacagactggggtgaaacaggaagtgagagccccaga

SEQ ID NO: 64526 - DNA, 536 bp, Homo sapiens
ccctgtctctgtctcattcattcagagctgggagctgattgtccacatgattaggcttgatggaattgacttggttgggaaggaacttggcaggctttagaggccagtttcaatcctggtcacaccctttgtgtgaccttgggtaggtttagcctctctaagcctcagttttctcccctgtaaaatggggatcttcatatatcctccctctctggattggtgtgaggttaaaaacgcgataatccatgctgtggggtacacaggagccctgggtctggtgtttgaagacagcttgaccttggatgagatcatgcctatgtcaggtcacccacgctccatgcacctgactcatcagtgttagttcaaatagagcattggttagaaatcacccactgccacctcttcgcttgataggtgaggaaaccagtcttcagagaagttgagcactgtgtccaaggccacagagtgagtgagaatctgagctgagatggagttcaaaccccagatttcttagtccagggctccttctactacag

SEQ ID NO: 64527 - DNA, 673 bp, Homo sapiens
ctgtctagaactgcccagtcccctcatcaaaggtggccgagagattttaaagcaggaatgaggctgagttctctgcggccggagcctcagttttcgactcgctacaaagttatgaacacactggcagccaagaagtatttatactcaccccatgccatccagagagttgtttttgcataaaggtctcttttttttttttttttttttggtttccaaagggagtgtccccagcttgtgtacagttagctaatttatgactgtgactgccagggcctgtgggtgacctgatcttgctgttacatcactctgtgtggtgcctcttcacccaacccacctctttctggtcccaagtccaaggtggcagttcatcagcagggtggctgctaagatagaggcaccacggagccaggttttatttggccaagccacatggcctcactttcagcatctgggagattttttcctcagcagggagctctctggttaatccctgtccatcctctcacttttccagcttgtgacaggagtccaggaagctgggggaatattgacagtatggaacacactggaaaatgcccaggttccagaaggccagtgatattagatgatgccattattccagacaggcctctgaactagtcacttgaggtttttggaagggaaaggaaggaag

SEQ ID NO: 64528 - DNA, 1019 bp, Homo sapiens
ttaaagagagccagtttaaggtaaaatgtttaagcaaataacagtataggtgcatgcagatgtgacacaaatgataaaggtgggacgtgaaggaaacacaggggcgtggctcttactctctatttgtgtgtgtgcatgtcccgtggcgagtcacgtgtcctgtggggccttcactccactcagctgtcaaaggaaggcattgagaagaggcattcctgggaccctcccggttctgaggccctaacaagctcaagtccccagaccgtgagccctatgtcatttgtcaagtgaccactggagggcgtgagtcacacaaattccagcagctccgaagctgaggtcttccccggtttccaccaccttgcctgactcggagatgacggaagtgaagtgaagggatttttactggaaacgcccggtggtcactccaggatggacaggcccagggtggaccaggaaggtggacaagctttgctgagtccctggagtgtgactcaagctggctggtgcaggcctggcactttgctgctgtttcttttaaaagcctcgtttcttgtcaagcctccccagaacaccctcccttccctgccctcccgttttgcttcctgggtgcccgtccttctaggcggagaaacaacaaacagagtggcacctggggtagtcccagggtgtgatggttcaaggggcaagattcaggggcaagtagtgtatctgggaagtgcaggggacatcaggaggggaatgaggaagtgagacagagaaagggaggcagctggtaaaagtactatagggcagctttcacgatttgcaaccagactcagccccaccagggaacttgaaaaatggtgcagaaaacagggcttcaaatgatcccatccaaggggccaggggctgggctactgacccagcagttccagagcatcactcattgaggctgctcccagggaggttaaattcccaaggcctgctgtgggcagagcagccttccttggttctgggaaagccctctagaattcaca

SEQ ID NO: 64529 - DNA, 973 bp, Homo sapiens
ggatagagagagaaaaatttcttccattttcctgacttggactcaatgaaattgctactacctttttctcgagctgaaattcatgccttgtgatgttttgagcctaatatctagatgacccaactgactgccctccggactgtaagacagctggtttaaggtcagtttcatcctcgatggacaggaccatatgatgtgctgttgatgactcattcctcagtaaaattaagaagagtcaaactgtagatccactattcctgggcaaacctggttccccaagagtttcctaaccctatccatcagaatgtgacagaaaacaggaaccacaccttaaaaacatcacggtcctggtcgtctaaatttggaatgctggcacgccccgaagactgacttctgcaggtggactagtgaaccctgacagatctcacgttgctgttcagaagacagacgcctaacaataaacaataagagatacagacataaaccattctttgtcatcatttattttgtctatcaactactggctaagcagattctgtgtgctgccctagggtcttaattacttcaagtgctcatattgaaccataaacatgattacctttttgttacgtttccctgtggactttgagccccctagattaaaaggataattacgtaacttggatttctcgaacactggcaaagacaaataatctggagatacgttatctgacctggctaatagactaacagtacaacagttcactatattgtcataatctgacaatttattattttagtattctcctcttttggttgcctcattataaagtctgctttgattttgcctcttcagatgagcccggccctcaaatatacctccttagaggcctgctctctgaacacattggaagtccctatcttagtgtgtccagaattggttccttccagtgagttcttggtctcactgacttcaagaatgaagccacggacc

SEQ ID NO: 64530 - DNA, 2203 bp, Homo sapiens
aaatgatagtggcattgatgccaatgaaaataatgaacttaaagcttactgcgctattatttatttgctagatttgtcatgacctgctgaaaaccagaaccttgaatccaatcagtaattaaagggtgaagaatggaggaaacaaattataaaatcaatacttctttgggcaacagcatctttaactattgctaccatttcattcattaaagctgaaagggagagatgagggtcccggttatcagggatcaaatgacaaccagcaagttactcatccctgattggtcaatccagaaggcgctgaactttgccttgtacacaaagacattgcctggcattatcagtgctgccatttgaggagtgttgagattatcttcaccaacccaaacaaatgtgaaacaatgcacaaggaaagtaaagggaacaacagctcacccgccttttcacagtgatggtttctgtcttccagagcccaaggttcaactcacttccagtcaacagggacccaccaagtccctctctctgcctacaactgttcattgagtaacttctaatttggatgatgagcacttgagggctcactccacaacatccatcagtcctgattgttcctagtagtttttcccactgacagcagcatcatctactctctatgaggtgccctctggggtctgactcaggctggatgacacagctgggtgattgattattttgatgcagacacacaactttctgcaactgtatttctgccttctgcttcccagagccagaacctttcccctcaactttttctttttacttcatccacagtggttgtgtaaggggttttagccacccataattctatcaggccactccaaagcaacctcatataaatatgcagtccataaaaagcaataagaggccaggcacagtggctcacgctgtaatcctagcactttgggagaccaaggctagcagatcacttgaggccaggagttcaagaccagcctggccaacatggcaaaaccccatctctactaaaaaaaacaaaaattagctgggtgtggtgggacacctctgtagtccctgctactcaggaggctgaggcaggagaatcacttgaaccctcaaggcggaggttgcagtgaaccaagatcaggccactgcactccagcttgggcaacagagtaagactctgtctcaaaaaaataaaaataaaaagcaatatgagtgctgcccaaatgaacttgctgctcccctttcaacctgactgctactccaagtcccttctatcaggagtcatatgtcagcaggcaagtgactcatctctgatttgccaatgcagagggtgctgaactctctgccctgggtacaaggtattacctcgcactatcagtgatgtcatttcggaactgctgagaatgaacagccaccaccgcccatagtagccaccacctggccaaagaacctgattcatatgcagcaaattgacagagtgttggaatcacacagacccagtgtcaatcccagctgtaccaccttatgtccgtaagaaactgggccagtccttcatttctctgagccccagtgtcctcatcagaaaatgaaaacgacagcacctcttcatgtggttgctgccagaatttgagataatatacaccaagtacccacccagcacctggctccatgttaagagtaatatccactaaacatatgtagaaaaagtgagcattagatgaaacaagtgcaaggaattttgcaccaagagatgacagaattcttagggagaaatccatgtgacctgcagatagagttcaagaaaggctttgtaaggggtcagcatttgagcagagccttgaaacaggggcgaggcatttggcagatggactgggggaggagggcacgccaggcaggggaacagcacaagcagatgctaggaatggagcccaaagcagccgtacctatttgggcaggtaacacaatgcagctgaagcacagtgggcagtgggtgggagcctcaggacaggaggctggggccaagaaggaaatgggttggaagggccctgcagagtcactgctaagttgtagggatgtacaatatagccagagtcttgtcagcaagggtcatgtcaggataaatcaactacaacagcaattagataatggaaaaacgaatatcatattttcaaactccaccatttaaggctctctgggctgttgg

SEQ ID NO: 64531 - DNA, 1131 bp, Homo sapiens
atgggagtagatgggaggggggagtgacagctaaaggaggtgtttcttttggggggtaatgttctaaaacattatggtgacagctgcacaactctgcaaacacactaaaagacactgaattgtgcactttagatgggtgaactgtatgcttcgtgaattatatctcaataaaactttttaaaacaataaccacaaaaaggatcaatcctaggagcgaaagggttttggccacggagcaacttgctcttacgcagaagcataaatcatcacgacaaggttgctccggccaccgggtgccgcgggcagagggacggtggaggggacattctccttttaaaagtggccaggcccgtgagcctctgagaggctggcctccgggctgccccggacctcgcgcccctagctcgcgctgcaggcctttcctgctcctccgaggccgcccggccaggcctgcgtcaagcccgggcgccgcgctccggtgcactcagctctccggtggaagagcgcagaccgcaagggaaaaggtgccggcgcgggtcgcccctaggtcttcaatagatccgaggacacccgaggcctccacatccctagcccgcccccgccacccagtggctccggccgccgctgcccccgcgcccccgccctcggcctcggcctgcgcagcgcggctcaccagcctccaggggaacgccagccccggacgccgccgcggcgacgagtgcgcctgcgccccggggactgagcggcaccgcccctgcccggcgacggtgagcccagcgccctctgccggccgcgcgcgggactcggggtcctactgggtgcctcttcctagatccgaccccacccagttgaaagctgtccccactaacagccttcgttacctgttacctcaaacacccactctgccttctggctgttgctacgccggatataagccctaaaggcactctctcctccttattcctgaatatggattgtgctatgaatatggggtgttcaagatctctgaaaggcttgctggaggacttttcctgaacctctcgtgttgatgacaagaattgtgtttggataggaatctgcgttttgaatcatttcaccaaattacagtcccataacacctgtcaaaagaat

SEQ ID NO: 64532 - DNA, 1370 bp, Homo sapiens
gttctttcgttccgcccctctcttccagcttttgcaggcgggattaccacgcagcttcctgctcctgccaaaaaaaaaaaaataaataataaaagaagaagaagaaaagaggagagaggcgaaagaaaaatgtcacaaagatctttgctttttaattggctttaagccttgtcggtcaagccaaactctgcctttgattggtctttctatctgcccatcccggatcgggggcgggatttccccggaagacccacaccttgttgccactggccgaacagtgcgcctgtctgaagctcctggcccaggattggaggcggtggcggacaggtgggcgtggattggctagggcagccggtccgtgcaaggcgggggcggggcctcggcggctggttgcgcgtgtccgacgctggctccgctctatccggctttgctaggggaggtgagtccggccgcggcggaaccggcggctgaggaggcggcggctgaggagaaggcggccgcggcggctgaggagaaagcggccgcggggacggaagccgggtgggggggagggggggagacggagcagccttgagccctgcggggccgttgcgcgggggacccacccgctctcccccccaaccctcctcagcagaagcagccggcggcgggggcaggagtcagcccgcttccgaccgtaccccgcccgcctcccggggctcctgttctttggccccgggaccctaaccttctcccggggcggttccctccgtctgggcgtccgagcgctgcccacatctttcattcctccctgcacctccttcccttcacttttgccccggctctctttctcctctctgtcctgctgtcgcctcctctcctcactccagcctccttccctggcttattctgcccaggaaagtttggaacccccgccccccctccccaatcaggtcaacctgactaggagtagggggagatgtaggaaggcctgagagttcggggggggggaagctggaagctggtttcccagaaaatttccccccatcttctccatttagggtggtgggaattttttttaatcctgtttttgaggaggtggtaggtgtttagaaaaggatgtgggaatggaaggggtagatgagtcaaccctctttcaagattccaagggtggtgtgttacctgatccttttcgtgtgtggagttcagggggtcgggaggtttggcctttattcccacattcaaagttggaacctcccccaaattaagaatggagttttagtacccacttgtggcaggaatcctggggggaaggggtccttttttcctttttcttttcttttttcccttttttttccttttggcaacccacacccttccacacacgctca

SEQ ID NO: 64533 - DNA, 585 bp, Homo sapiens
ccaaataattcctttgttaaactcattttcagtaaatgagccattgtttccccaagggtaatgattatttcccctatatatagtacaaagccttgagaaatagatttttaaatctaaaatatgagttaatgattggaaaaggctgaaatcatcactgtgtcaactgtatgtgtgaaaagggcaactgctgtgtttgctgcctaggctacaatataagatactatgtttacaagaaatccaatgacagcaaggctttaaaagtgaggtctttcagtttagatgcaaaaagggtggttctgttgagtcaacccagctatttcactacatagtttcgtaatgtaaacacctagaatgaggtagctggagtgcaaatctaaatggcttgtgacagttaaggaagtacataggcaacagttactggttttcttgatgcagctgatatcagtatcttcaaataaatcactgacttaaagtacctcagcaggaaagacattaaatagggacaccgtaatgtttaactggtataggtgctgaaggtctagttatcaacatctatcagcttgtctctgtaggtgggcaaacttt

SEQ ID NO: 64534 - DNA, 671 bp, Homo sapiens
tgttactactgttgatgtttaaaaatagtatgttagacattgtgaataataatgaactataaaataatgttaaaataatgcctggtgatagctccatggtaataataaaataatgcatggtagtagctcctgggactgtgcatgaaaaaaattgagacataagttaacctccctgacattcctgggcaaagtgtcaccagtttccattccacatttaacttggtaaagctttaaataaaagacaggaaatcctaagtcattgattttggtaagctcatgatagtgcagtttattcaaactctaggcttttttattaatactttaggcctatgactcagaatggaaaccaatgtaatagtgagatactttttctgattcaccagtgaggtaatgaaaatctcattcttacacagggggttggtaattccatatgagattgttatctttgataacttcctagaaaataggaacaattaagagcttcccaagagaactaagctgggtaaggatttgggaaaccttatatggtaatagaattgtcactgatcaacactgctgggatgttttgatcttttaaaccaaaagctcttgaatgctagtcagccctccatagatgtgaaactgcatccatggatgaaaaatatttgaaaaaaaaataaaaataaaaaaat

SEQ ID NO: 64535 - DNA, 748 bp, Homo sapiens
ggccggccacgaccagagcgcatgagcagcgcagagcccgcgtctggagggggcagggcggacagagccgcgggcggtcacgtgaccccacggctggggtcggcgcgatccctgacggtagcttgcgggtgttccgcgccgtgggcagcctggcgtgcaggggcgctcagccgagggacgtggctatttctgggacacacaccagtgcacggacgccctaagggacatcctggtgcccaggggaatggtgcacacctggacatgcccggtgatgcacgcagaaagcatcgaggtaaaaatgaacggggagacacctctaaggtgtacgcacgaggacggcataaaaccattggtcagctccctaatctcaccgacctctctcccgcaaattccttatcgccctcctttctccctgcccttccctcaaagtgtcagtcaggttgtcctcagcccagaagactcttcctccagacatcctcatggccggctctgtcgccccctggaggcattagctcaaaatccaccttttaaatgggtcttatcctgacacccctgtttaaaattgcaacccggcagcgtgcggtagatgacgcctgtaatcccagcactttgggaggccaaggcgggcggatcacttgagcccatgagttcgagaccagtgtgggcaaaagacagagagccctgtctcaacaatttaaaaaataaatttaaaaaaattgcaactcaacccttcatcttgctttttctt

SEQ ID NO: 64536 - DNA, 874 bp, Homo sapiens
ccagcctgagcaacaaagtgagaccctgtatccaaaaaaaaaagagcaaagcaaaggtggaagcaggggatagctcttagagctcctgcttggatgtggcacttgccactgttgctcaggtgccactggccaaggcaagtcctgtggtcaagccaggagtggttagagaggcccacatccctctgagccaagggcacagctctcctgtttgaagccacctgccttagccaggatgtctggctggatgccacaccctctctgtatgccccagaagtcagaagcctcaccagaggttatgcagcctggccaggccccaggtaccctcagaaatcacccgtagattccagtcccatcatggagcatatctccgaaacccccaagcagaggtaggtgctattgggctccccctggcccagcctggagttgggctcctctcccagacacggtgagggtagtaacctgttaatcattaatctgggggcaaatcggttcatttccagtccaccagttctacacccaaacccctccctgcagcctggcaggaaaccctcagagcttgacccttggcaggtccagagcagaacaggatgtcaagcccagctgaggaggccacgccttgactggtttccagtgtggagggcagcttgggggctgcagagctacctcgccttcaaacgccctcctcctcacccttctgctcacacagttcccgtgtttcagaaactagacctccctggtagcagctgattgactgacagaggggagaacaagcagggagtgatggaaattttggccaatgaggctgcatatccttcaagacctgcctcaaatgccattttaatagctattattgtcattatagctacattcatat

SEQ ID NO: 64537 - DNA, 1214 bp, Homo sapiens
attgaaattctaagttaaattgctcagttctctattaagcctccactgtacctttaacttcataattacaacagtcattatactgtattaaatttgttacatttgtctccttattagaaataagcctctggagagcagaagggcagacgttatattttactcactcttaaagacttagtacagatctggctttttttttttttttttttttggagacagagtctcacactgttacccagatggctcactgcaacctccacctcctgagttcaagtgattctcatgactcagctttcaagtagctgggaatacaggcatgcaccaacatgcctggctaatttttgtatttttaggagagacaggatttcgccatgttggccaggctggtaatccgcccacctcagcctctcaaagtgctgggattacagtcgtgagccacgacgcccgacccagatctggcatattctaagcatgcaataaacaaatgcagaatacaaaacaagaaaagcaacaatagagaatacataaatgcacagtaattactatcctttaggaatttacagtctactgagggtaaaagacacacatcaacaaaaattatacaagagagaacatttaaaatgccacaggagagaaatataaagtataagaagaaatcagggaggaaattacagtataagatataagttacagtactttctttttccctggacaccaatttccatccctaaatatttggcaaaagttcttaccactcaattttaacctcaggtttctagtgaatttatactcatcatgaaaaatatatattacgacttcaagtgccctaagaaaatatatcatattcagaattatctccactttttccggcccagtatatttcaattctgtagcactggtattccttaccactatcatatctccccaggatagagaagtgaactagcacctacagtttaggtatgttaaggcatattggttaaaagcataggtttcagtaccatgattctaccacttatttgctataagaccttgggcaaattattgctcagaatgtcaatttcctcacctataaaatgggaatgtctatctcaaagaggatttaaattagataattcatgtgcaagcactcagtaaacaataaatgatagctgttataaaggattaacaataaatctagtgaacaggggcttgctagtcaaacacgtgcataa

SEQ ID NO: 64538 - DNA, 528 bp, Homo sapiens
tcaattcaatcctattcaaaccacattcccatccagaaaagtgcttagaaggaagcgaagggcattgctatgaatttcaatttcaaattaagtacaaatttggatatcctttggtcaataaattggttatctagccaaagcctttctgaaattaataatatgctaacaggatatttgtttctggatgtttgcttaaagtgctcttgcagcagtggggcttctatttcacaatagcgaggctttatcttttgattaaaaattaacaggaaaaatattcttggattttccattgtaagtaagataaattcttaccctggagttgcctttattaatcataatatcaagacttatttgtctttgaaggcctgtgtgtcagggcagcgccacatctaggaggttaaatgtgacaaacgtttagtagtccacatagagccaagagcactaggctttgggctcctataaaagcccaagatgggaagccttaaactctgcttcttttctctgcctgtagccaggtcagcatggatc

SEQ ID NO: 64539 - DNA, 2451 bp, Homo sapiens
atggactgactgaatgtgggggtttggggataagagaaaaacaagtcaggcatgactcccatgaatctggcttggcccacctatctgattggaagggctggcttaaagagataggtaagatggaagaagaggtgcagggaaagagttcacagattatctaccaactcccatcacacgcgtgtctgagcatctgagcaacacctggcccaagagctgggactaagctccctgagcatgaggcggtggcatactttctgcgccccggctctcccagatgcatgcgaggcactgcgagccgactctttactatgtaaactccccgaacttatccgagccgcagtttcctcgtaagatcgtggcaagcatcaacgcatcaaactccaggcctaagctgggtgtgaaagcgcccccctgagagtggggcggaattcccacgtctctccccgcccggtactgcctttcctcaggacgcgggcctgtcaggctcctctcgcccctggtccgcccgcgtcccccgacccgaggtcagcctacctgccggccccgcggcggcagcgcgctgcagcccaggctgatgtagacaggcagcttctcctgggtcagcgacagccggtacccagccagcctgccacggccgctgccacggatacagagcctgtttacctatgacgtcactaccttcctgactccggaagcacttacagcccccattccacagagcctgctgggaaacagaggcccgaggggaggcccggcctacaagacccagaagccttagcgccggcaaggcggccagaagtagctctgctctctccgcgaagaccctcgggggattccgcctccaccctttcccggatagagcgctatgcatgcagggacttgtagtctcaggctccccagccggctgggctgggcagcactccgggcggagtcgacgagcgcaggatgtgagctcacagcttgggactgctgaggggcaggcggctgcaggctaggggcggctcggagtccgctggccacccagctgagaggagaggcgcccccggggacggtgagagccgggcccgccgatgccctcggggaagggatggacggcccctgctggagtagagcgagcccggccgggtcctgggggaaaaggcgcgggcggcgtaggggagatggagagctccgatctcccacggagggtgggcgtgagaaccggtgtgggtttctcggtagtgaggagtggtccgggctagagaagagcccacaccggccacatttcccaggactttttgggtgacgcttaacctttacacctagggtttctgctagatccgccactctagccctcagctttcctcccgccgtcctccgtgtctgacggatttctgggtccttcttccttttagacccctcctctttccacctccgcggctgtttgccctttgttgtgcttgggttcccattagcttcgttgcgtgagccacggatccgcccttagccccgggcatccccaaatatccacacacaaagtgcggaaggaagagcactgtggctatcagtggaaacttcattctcactggaattactttctggggcgtcacctgccacagaattcctggaacccattggtctgggcggaatgtgattgacgtcatccaggggctcaaagcaattgctttgtaggaaaggaagagattagctctggatccgccgacctctcttggcaggcctatcctttgagctcctttgcattggcagaacatgtatgtgtgctttctctgatcctgggaaaactaggactagacacaaaatacacagggaacttgctaatacctgttagagaggtggatttattcctttgaggtgggcgggaaaagggaaggtgatctcataccattctagtgtttcttagtcattggcaacctcctggtgagggctcacctcccatacccaacccctgtggcaaatgaaagagtctcccagacaagccgccaaaggaattcactgcttcacacagcacccacgctggctgtccacttccttggacattcttcccagggacttacctaaatcttttcagggacaatttcagtctaacaaactgacgtatgttaaatacttaaaatgtgcatggcattgtgctgagcaccattaggggaacacagcggtaaacttgggaaaccagtgccctgcttctgggttgcacttacaaggcatgagcaactgtaaactcctgcatgtgatgagcattcggtgaaatcattccactttttttctgtctccattattaccaatgtggtccaggctgccatcatctcttcttgcctagactactgcttcctctggtcttcccactttctctcttgcacctttacaattcattctctacccagcagcaagttatcttttcaaaatacactacaagcaagtcagatcatatcactcccctgcttgcaaccctcc

SEQ ID NO: 64540 - DNA, 3226 bp, Homo sapiens
tgggatctgtttctttaaagcactttgtactgttattcaggaggttgataatctccttgacccatgtctttctaccctaatccccacttccctgcagaatcaatctgagggaggggataaagaggaagcaataaaaaaaaaacatccgacagagcagctctggctttgcagcctggccagcagctcagagtgcaccgaggagggaaggatggctaagctgggaccggcagtcctcacagggtgcctgtgagaaaggacattttacccccacatcatagtcacatcactgactcctaggtctagcacgactgctctttgtgattctcttgagtacccttggcttccagccatgctgtcctcacatacggtaaagccaaagagctgtcacatgggccagaaacatgagccacggcaggaagaccgtggagcccgtgggcactgcatggtgttggctggcatgcccatcagctgaggacagcaaactcccagcagcccctacagaggtggcacatgcttggccacacatctactccctgcccacaccatctatgctcttggttggtgctggctgggatggcggttctgcccagtggtgtctctgagcgcgggatgacaggagcaaccgaagcaccctgaaggccttcactccttgttgggtaactcagccatggagatgccaagcactagccaggaggtgagttcctctttagggctttggttttcattcctttttgtttggcttggccaaaccagaattcagcttatctgaattattttccaaaggaatgctgtcagggagggactgttctgccagcctaacaaagcaacgtagccacgtatagtacccactttctgctctttggagagaacacaggttatcaagttcatctctcttgactactcttatgatagctgatgccacagagcctatgggcaaatgccagacccagggttagacacaaggacctgaagtgacatgacggcgggacaggggaaatgtgactttctaattaggcattttatgttagtcacagtcttgaatgtataaacagcactaagactctcaggtcaggtaccttggtgatcagctactagttcttccagccctcattgaggtaacaagataaagacaaatccacttctttggccaaattcaggctttggctttatgactttcccacagagactggaatgcgtcagcctgagaccactggcctattttctcagctgccctcttgaggtcctttaacactcaaattcccagctccccactgaggtgttgtgatgcttgccttttgacctccccatcccctttagtccctgcttactactttgacattcacatcctcagtgtctcagtcttttttgccgagaaagcacagtagtctgggactgggcatttatcttctctgactgaaaatctctccttggtcttaaggaaaatactaacattgaactcactgacatgatcttagcttctttaatcagactttgtgacttaaaagtttgggggttttctttgaaagtttccagccctattcagaaagcaactcttggctgtgtgcatttttcaactccaagcagcccaggggtaagtaaacaaagtatggatgaaggtcagattttcttgtcagtttctgagaaacctggcagcctgctgttaacaacacaggccagtattgggttttattgaatttggtatgtgaccaaggtcggcctaaaggatggcgcaggtcctgggcaggaaagaatttttcctttatcacataactgtaatatttggttgctcagcataagtgatggaagcaaacactaatttctaataaaattgtgttaaactcaatggtacagagccatgtttacagtgagcaggccttgaccagcttgcggccatgggctgagttcctgtgcttctgtttatcatctgaccttgtgttctagccaggtcgtaagcgcgactgtactgttgccctgcaaccccagctccccctggaggactaaggacaagaataacaagggctggaactgtgatttaatattaattcaagaaaactacctctaacaatcactgcagtggcggaggaaaagaaatcctaagaattggggcaagatgcagcacaattcatctctggctcttggaaatctgagagaagctcaggaagtagcttgacttagtcatcaatccatacctaaagctgctcctcagccaaattcctgcatttgtggtctggatgcttggcagagtcatgctgagggctggcacacccattgctccaggaaacccgactggcttgcctccctcctctcctgggcctagcgaggccagaaatggcaatggtcggtcagtgctaagagccaggccactccgaccctgacactggcctccctctctgcatttggcagaaggtaaagtgaacaagagtccagtccagcacccccgccaactagctgagaggcacagtgaccctaggagatgtccagccagcctccaggctgagagggaaacaggcacatgccctaccaggggggcagctccctggaagggcagcaaagaaagcagtcaagggcgcacactgggtcagaaggggagcctgagactctgggagcagaaatggcaagggtggccaagcgtgcactggtttactgatcaaacctcacgtgacaggccaggaaactcctccaggcctgtggcagctgaacacagttccttggtggagaggtttactggaacatggtgtaggcagggcttatgaggaggccagccttggaggtgtcccacatgggtcttctgaagaaaagttataccacccctccccacaaaaagaaccccacaatcaaattaagagacccactgtggcccatgatggggagagaagagttctgcagcaattgtgggatgagagttgttcttcccggtgaccaagcctgggcacttggggcctcagctggcctaccagtgaaggcctgagggtggtgtcttctcatctttattgctttccagggagaagggaggaatccgaacatcaaagtgggagccatcaggtctttcaaagcggaacgtgcccctacagtcagaaagaagctggtttagaaggagccagggctgaggcctcctaaggatctggatggccccatgccctcagctgccagccacagaggacatgtgagcctgagctctcttctatctctagctcatgacaggatgactggtccagagacccaagag

SEQ ID NO: 64541 - DNA, 2183 bp, Homo sapiens
ttgtgtccatgtcttatctttattaaatactgtaaattccctgggagcaatgcctgagtctgattagctggtactgccccctcagagcctagtgtacaagaggtgctcaaaaaatatttgtcctgtattataattccatgtccatctccccctctaacctgtagcccttacattgcccttgaaaagcttaaacatctctagatttcctacggcacatcgctctctcaataccgtttttgttcatattctcacaggggtcttaaattgcaaatagctatcatctctccccaatgttcagtgtctaatatcagccactaaaatgtcagtcaccactctgaacagggctgctctttctaggggcccttcaaataaaggctgtttttactgttttgaagatgtgaactttatgcttcctcccactgatccaccagcccatttgatccgcctgtcccatccgtggaaacagtttccacaccatccccatggcctcaaacccccttccccaagtcacagatagaaaatcgatctccccaaagtcacttggaaacctggggcctacgagggtccacacccaagagtctcgtttcccacctctagcatctttctgaggcagaccttcaccaaatccaaaggctgagggttcaagccaatgccctagggctgaattaaaaagcttccctctgacatcggtgctggggaccccagccggggaagtaggattcacttggggagggtaacctgttcccccccagggccagccctgtacaaccagggctctgggccgcgctggcttccctgctcctggcacatgtcccagacagcgcaggtcggctccctgctcgggaccctctcccgggtcaaactccagtcaccctcagcaggcccgggcccctggcctccgcactggctaggaacacgctctctgggctccaggcccagttcctcgcgccccctggctccgtccctcaccgggacgagaggtgcctccgcgtcgtcgtggtcgacgctggcgagaaggctccagctccggccgccgcacagagcggctttgccaccgggccccagtcagcgaccgggaccaccagcggctgcccacggccaggggccgccgggctgtacaggctgccatgtcccgcccgagcgcccgcccggctgctgacacagagcccgacccgcggccgggcggttccgccccagtcccacactgccccgcgcggcgtcccggccctcttggcccgcctggtcccaccccggagctcagagcaacttccggtgcgcttagcgttacttccggcgcgcggcgggcggaagtccgggttggggtcacctgaccggagagccggctagatatggcgtcctctttgcttgcgggcgagcgattggtgcgtgctttgggccccggcggggagctggagccagagcggctaccccgaaagctgcgggccgagcttgaggccgcgctggggaagaagcacaagggcggtgatagctccagtggcccccaacgcttggtttctttccgtctcatccgggatctgcaccagcatctgagagaaaggggtgagccccagtctccagtccggggtcccctccttgtgtccagatcgattccctcctgaggtcttttcccatcattccccttcttctacggagcactcatctagacaagtcaagagtcactccataaatcccagggccacccactttcttaactcccatgggaatttctcgtggatgacaaatttgcttgtgcagtttctgctcttttgagagccccctcttcacttccaggcacacctaggcccaattcacccttgagaaagtctaggtttttaccaaatacaaatatcacaggttttgtctcttctttttctccactttaggaatcagcttagcatagtgagcttgtaggaatccggatttctttccacctcaaaagcaagagtggtgaaatctgatactttgttttgtttgtttgtttttttaatataggatggcaaaagctgtgttgaaagatctggcctgagagtagcatgtgagttccagtcctagctctgtcactaatcctttgaaggagtcatttctcctcgctgggcctcagttcccttatgtgtaaagggaaggaacaggacaaactagcacataaggtattttgccagaagtaacatagaccagccagaagt
